United States Patent Application Publication US 2002/0048763 A1 - sequence listing, part 11

SEQ ID NO: 41474 - protein, 41 aa, Homo sapiens
  MAP TO AC022658.3; EXPRESSED IN LUNG, SIGNAL = 0.95; EXPRESSED IN PLACENTA, SIGNAL = 1.1; EXPRESSED IN ADULT LIVER, SIGNAL = 1.1; EXPRESSED IN BRAIN, SIGNAL = 1.1; EXPRESSED IN FETAL LIVER, SIGNAL = 0.92; EXPRESSED IN HEART, SIGNAL = 1.3; EXPRESSED IN BONE MARROW, SIGNAL = 1.1
DAENTSTKKLVLPTKQLVLTLTSGTEYSMDVTKKEFLTHWV

SEQ ID NO: 41475 - protein, 19 aa, Homo sapiens
  MAP TO AC022658.3; EXPRESSED IN LUNG, SIGNAL = 0.95; EXPRESSED IN PLACENTA, SIGNAL = 1.1; EXPRESSED IN ADULT LIVER, SIGNAL = 1.1; EXPRESSED IN BRAIN, SIGNAL = 1.1; EXPRESSED IN FETAL LIVER, SIGNAL = 0.92; EXPRESSED IN HEART, SIGNAL = 1.3; EXPRESSED IN BONE MARROW, SIGNAL = 1.1
VMLRTLAQRSLSYLPSNLS

SEQ ID NO: 41476 - protein, 32 aa, Homo sapiens
  MAP TO AC022474.3; EXPRESSED IN PLACENTA, SIGNAL =  25; EXPRESSED IN ADULT LIVER, SIGNAL =  45; EXPRESSED IN HELA, SIGNAL =  49; EXPRESSED IN BRAIN, SIGNAL =  23; EXPRESSED IN BONE MARROW, SIGNAL =  27; EXPRESSED IN FETAL LIVER, SIGNAL =  26; EXPRESSED IN HEART, SIGNAL =  25; EXPRESSED IN LUNG, SIGNAL =  23; EST_HUMAN HIT: AA490123.1, EVALUE 5.00e-08; SWISSPROT HIT: P39188, EVALUE 1.00e-06
LKCNGTITADCSLNLLGSSIPPTSTSRVAGTT

SEQ ID NO: 41477 - protein, 42 aa, Homo sapiens
  MAP TO AC013612.3; EXPRESSED IN ADULT LIVER, SIGNAL = 4.5; EXPRESSED IN HEART, SIGNAL = 3.5; EXPRESSED IN BRAIN, SIGNAL = 3.7; EXPRESSED IN BONE MARROW, SIGNAL = 3.6; EXPRESSED IN LUNG, SIGNAL = 3.3; EXPRESSED IN HELA, SIGNAL =   5; EXPRESSED IN FETAL LIVER, SIGNAL = 3.2; EXPRESSED IN PLACENTA, SIGNAL = 3.6; EST_HUMAN HIT: BE741667.1, EVALUE 2.40e-02; SWISSPROT HIT: Q15034, EVALUE 8.40e-02
DGKVFTFGDNRSGQLGYSPTPEKRGPQLVERIDGLVSQIDCG

SEQ ID NO: 41478 - protein, 34 aa, Homo sapiens
  MAP TO AC013612.3; EXPRESSED IN ADULT LIVER, SIGNAL = 4.5; EXPRESSED IN HEART, SIGNAL = 3.5; EXPRESSED IN BRAIN, SIGNAL = 3.7; EXPRESSED IN BONE MARROW, SIGNAL = 3.6; EXPRESSED IN LUNG, SIGNAL = 3.3; EXPRESSED IN HELA, SIGNAL =   5; EXPRESSED IN FETAL LIVER, SIGNAL = 3.2; EXPRESSED IN PLACENTA, SIGNAL = 3.6
TGKCSHLETIALDSWDTAPLLRREVHNLWKELMA

SEQ ID NO: 41479 - protein, 39 aa, Homo sapiens
  MAP TO AC013657.3; EXPRESSED IN PLACENTA, SIGNAL = 2.3; EXPRESSED IN LUNG, SIGNAL =   2; EXPRESSED IN BONE MARROW, SIGNAL = 2.9; EXPRESSED IN BRAIN, SIGNAL = 1.7; EXPRESSED IN FETAL LIVER, SIGNAL = 2.9; EXPRESSED IN HEART, SIGNAL =   2; EXPRESSED IN HELA, SIGNAL = 3.8; EXPRESSED IN ADULT LIVER, SIGNAL = 4.5; EST_HUMAN HIT: AV684438.1, EVALUE 4.20e+00; SWISSPROT HIT: Q00382, EVALUE 6.40e+00
MWYLVTCYEPDSMPSAEAVTLVKIPTICSLLQWRRLHSR

SEQ ID NO: 41480 - protein, 39 aa, Homo sapiens
  MAP TO AC013657.3; EXPRESSED IN PLACENTA, SIGNAL = 2.3; EXPRESSED IN LUNG, SIGNAL =   2; EXPRESSED IN BONE MARROW, SIGNAL = 2.9; EXPRESSED IN BRAIN, SIGNAL = 1.7; EXPRESSED IN FETAL LIVER, SIGNAL = 2.9; EXPRESSED IN HEART, SIGNAL =   2; EXPRESSED IN HELA, SIGNAL = 3.8; EXPRESSED IN ADULT LIVER, SIGNAL = 4.5
CGIWSPVMSLTPCQVLRPSPWLRSPPSAAYCSGGGYIPE

SEQ ID NO: 41481 - protein, 32 aa, Homo sapiens
  MAP TO AC018529.4; EXPRESSED IN HELA, SIGNAL = 2.7; EXPRESSED IN LUNG, SIGNAL = 1.5; EXPRESSED IN ADULT LIVER, SIGNAL = 1.7; EXPRESSED IN FETAL LIVER, SIGNAL = 1.7; EXPRESSED IN BRAIN, SIGNAL = 1.5; EXPRESSED IN BONE MARROW, SIGNAL = 2.1; EXPRESSED IN PLACENTA, SIGNAL = 1.6; EXPRESSED IN HEART, SIGNAL = 1.8; EST_HUMAN HIT: N44631.1, EVALUE 3.50e-02
MTFIKLSCHEFSLTTHSLFLIHEWIDRALSKC

SEQ ID NO: 41482 - protein, 31 aa, Homo sapiens
  MAP TO AC016706.2; EXPRESSED IN PLACENTA, SIGNAL = 1.4; EXPRESSED IN BONE MARROW, SIGNAL = 1.3; EXPRESSED IN ADULT LIVER, SIGNAL = 1.6; EXPRESSED IN HEART, SIGNAL = 1.3; EXPRESSED IN FETAL LIVER, SIGNAL = 1.1; EXPRESSED IN BRAIN, SIGNAL = 1.3; EXPRESSED IN LUNG, SIGNAL = 1.3
MHFKVSEGFLRILFLGIMVRMRNLQLLTLEE

SEQ ID NO: 41483 - protein, 25 aa, Homo sapiens
  MAP TO AL161730.2; EXPRESSED IN LUNG, SIGNAL = 2.5; EXPRESSED IN ADULT LIVER, SIGNAL = 2.6; EXPRESSED IN HEART, SIGNAL = 2.9; EXPRESSED IN FETAL LIVER, SIGNAL = 2.5; EXPRESSED IN BRAIN, SIGNAL = 2.9; EXPRESSED IN PLACENTA, SIGNAL = 2.6; EXPRESSED IN HELA, SIGNAL = 4.6; EXPRESSED IN BONE MARROW, SIGNAL = 2.7
KAKFEKENFLDVLDVLILTLSRRFK

SEQ ID NO: 41484 - protein, 23 aa, Homo sapiens
  MAP TO AC013611.3; EXPRESSED IN LUNG, SIGNAL = 1.9; EXPRESSED IN ADULT LIVER, SIGNAL = 2.2; EXPRESSED IN HELA, SIGNAL = 2.7; EXPRESSED IN HEART, SIGNAL = 1.9; EXPRESSED IN FETAL LIVER, SIGNAL = 1.7; EXPRESSED IN BRAIN, SIGNAL = 1.9; EXPRESSED IN PLACENTA, SIGNAL = 1.9; EXPRESSED IN BONE MARROW, SIGNAL = 2.2
QLSSHGSAGTFSRMSMFLRRAAQ

SEQ ID NO: 41485 - protein, 51 aa, Homo sapiens
  MAP TO AC016498.4; EXPRESSED IN HELA, SIGNAL = 4.4; EXPRESSED IN FETAL LIVER, SIGNAL = 3.9; EXPRESSED IN BONE MARROW, SIGNAL = 3.3; EXPRESSED IN LUNG, SIGNAL = 3.4; EXPRESSED IN PLACENTA, SIGNAL = 3.6; EXPRESSED IN ADULT LIVER, SIGNAL = 3.3; EXPRESSED IN HEART, SIGNAL = 3.8; EXPRESSED IN BRAIN, SIGNAL = 3.2; EST_HUMAN HIT: AW963692.1, EVALUE 1.30e+00
GPTWTSFPGSWKFCGRSCFHGLLWSRIYPNRRPAWELVLPRSWMRMGISPP

SEQ ID NO: 41486 - protein, 37 aa, Homo sapiens
  MAP TO AL161724.2; EXPRESSED IN HELA, SIGNAL = 3.6; EXPRESSED IN LUNG, SIGNAL = 4.6; EXPRESSED IN PLACENTA, SIGNAL = 4.2; EXPRESSED IN FETAL LIVER, SIGNAL = 4.2; EXPRESSED IN BONE MARROW, SIGNAL = 3.7; EXPRESSED IN ADULT LIVER, SIGNAL = 4.2; EXPRESSED IN HEART, SIGNAL = 3.9; EXPRESSED IN BRAIN, SIGNAL = 4.1; EST_HUMAN HIT: BE177007.1, EVALUE 5.60e+00
WALEKKVPDMGSSKCETPGLRMILECWMKSRRLMWQM

SEQ ID NO: 41487 - protein, 46 aa, Homo sapiens
  MAP TO AC016851.3; EXPRESSED IN PLACENTA, SIGNAL = 5.3; EXPRESSED IN BONE MARROW, SIGNAL =  11; EXPRESSED IN ADULT LIVER, SIGNAL = 5.3; EXPRESSED IN HEART, SIGNAL = 3.4; EXPRESSED IN BRAIN, SIGNAL = 6.2; EXPRESSED IN LUNG, SIGNAL = 4.2; EXPRESSED IN HELA, SIGNAL =  13; EXPRESSED IN FETAL LIVER, SIGNAL =  12; EST_HUMAN HIT: BF685741.1, EVALUE 2.00e-18; SWISSPROT HIT: P33459, EVALUE 1.20e+00
SDESTASTRSQSHFLYSVGNLSIPQQQIRAAAGWLQWVMETAGPLP

SEQ ID NO: 41488 - protein, 23 aa, Homo sapiens
  MAP TO AC016851.3; EXPRESSED IN PLACENTA, SIGNAL = 5.3; EXPRESSED IN BONE MARROW, SIGNAL =  11; EXPRESSED IN ADULT LIVER, SIGNAL = 5.3; EXPRESSED IN HEART, SIGNAL = 3.4; EXPRESSED IN BRAIN, SIGNAL = 6.2; EXPRESSED IN LUNG, SIGNAL = 4.2; EXPRESSED IN HELA, SIGNAL =  13; EXPRESSED IN FETAL LIVER, SIGNAL =  12; EST_HUMAN HIT: W28198.1, EVALUE 6.00e-04
SRLSVQTTMPVFQSQTAVAPSTY

SEQ ID NO: 41489 - protein, 44 aa, Homo sapiens
  MAP TO AC013771.3; EXPRESSED IN PLACENTA, SIGNAL = 1.7; EXPRESSED IN ADULT LIVER, SIGNAL = 1.4; EXPRESSED IN HEART, SIGNAL = 1.6; EXPRESSED IN FETAL LIVER, SIGNAL = 1.3; EXPRESSED IN BONE MARROW, SIGNAL = 1.2; EXPRESSED IN LUNG, SIGNAL = 1.4; EXPRESSED IN BRAIN, SIGNAL = 1.6
LISRDHIIGQNHGGNLGSYVIDCLRESRMRESADACPTHMNIKK

SEQ ID NO: 41490 - protein, 33 aa, Homo sapiens
  MAP TO AC025324.2; EXPRESSED IN BONE MARROW, SIGNAL =   4; EXPRESSED IN LUNG, SIGNAL = 4.2; EXPRESSED IN PLACENTA, SIGNAL = 3.9; EXPRESSED IN ADULT LIVER, SIGNAL =   4; EXPRESSED IN HELA, SIGNAL = 4.8; EXPRESSED IN HEART, SIGNAL = 3.1; EXPRESSED IN FETAL LIVER, SIGNAL = 3.5; EXPRESSED IN BRAIN, SIGNAL = 3.5; EST_HUMAN HIT: AA506906.1, EVALUE 4.40e+00
GLRTGRPMPITSGDSDASTGKAITHCMCFPGSN

SEQ ID NO: 41491 - protein, 53 aa, Homo sapiens
  MAP TO AC025863.2; EXPRESSED IN LUNG, SIGNAL = 4.5; EXPRESSED IN ADULT LIVER, SIGNAL = 4.1; EXPRESSED IN HELA, SIGNAL = 2.9; EXPRESSED IN HEART, SIGNAL = 3.3; EXPRESSED IN FETAL LIVER, SIGNAL = 3.1; EXPRESSED IN BRAIN, SIGNAL = 3.4; EXPRESSED IN PLACENTA, SIGNAL = 3.5; EXPRESSED IN BONE MARROW, SIGNAL = 3.3; SWISSPROT HIT: P18562, EVALUE 2.00e-14; EST_HUMAN HIT: AW956032.1, EVALUE 2.00e-24
EAMEQGLRDCCRSIRIGKILIQSDEETQRAKVYYAKFPPDIYRRKVLLMYPIL

SEQ ID NO: 41492 - protein, 20 aa, Homo sapiens
  MAP TO AC025863.2; EXPRESSED IN LUNG, SIGNAL = 4.5; EXPRESSED IN ADULT LIVER, SIGNAL = 4.1; EXPRESSED IN HELA, SIGNAL = 2.9; EXPRESSED IN HEART, SIGNAL = 3.3; EXPRESSED IN FETAL LIVER, SIGNAL = 3.1; EXPRESSED IN BRAIN, SIGNAL = 3.4; EXPRESSED IN PLACENTA, SIGNAL = 3.5; EXPRESSED IN BONE MARROW, SIGNAL = 3.3; EST_HUMAN HIT: R51690.1, EVALUE 1.00e-04
VRQWNKVYETAVDPYELERS

SEQ ID NO: 41493 - protein, 36 aa, Homo sapiens
  MAP TO AC018583.3; EXPRESSED IN PLACENTA, SIGNAL = 1.1; EXPRESSED IN ADULT LIVER, SIGNAL = 1.3; EXPRESSED IN BRAIN, SIGNAL = 2.5; EXPRESSED IN BONE MARROW, SIGNAL = 1.2; EXPRESSED IN LUNG, SIGNAL = 1.2; EXPRESSED IN HEART, SIGNAL = 1.2; EXPRESSED IN FETAL LIVER, SIGNAL = 0.93; EST_HUMAN HIT: AU131863.1, EVALUE 8.00e-16; SWISSPROT HIT: Q99435, EVALUE 6.00e-17
LSRAEQRMNRLDQCYCERTCTMKGTTYREFESWIDG

SEQ ID NO: 41494 - protein, 43 aa, Homo sapiens
  MAP TO AL138956.3; EXPRESSED IN LUNG, SIGNAL = 1.6; EXPRESSED IN PLACENTA, SIGNAL = 1.3; EXPRESSED IN ADULT LIVER, SIGNAL = 1.4; EXPRESSED IN FETAL LIVER, SIGNAL = 1.1; EXPRESSED IN BRAIN, SIGNAL = 1.4; EXPRESSED IN BONE MARROW, SIGNAL = 1.2; EXPRESSED IN HEART, SIGNAL = 1.2; SWISSPROT HIT: O01975, EVALUE 3.70e+00
MFLELPSHAQLVKHNHYKPNQNYSIFLLIKISEHVLNEEMGKK

SEQ ID NO: 41495 - protein, 43 aa, Homo sapiens
  MAP TO AC015914.3; EXPRESSED IN PLACENTA, SIGNAL = 0.99; EXPRESSED IN FETAL LIVER, SIGNAL = 0.57; EXPRESSED IN BRAIN, SIGNAL = 0.84; EXPRESSED IN BONE MARROW, SIGNAL = 0.85; EXPRESSED IN ADULT LIVER, SIGNAL = 0.66; EXPRESSED IN HEART, SIGNAL = 1.3; SWISSPROT HIT: P51461, EVALUE 9.50e-01
EEELSPWLEGQLAGVGNLVNENPTLLLAQQCQPLSRGAQLKCQ

SEQ ID NO: 41496 - protein, 26 aa, Homo sapiens
  MAP TO AC020991.3; EXPRESSED IN PLACENTA, SIGNAL = 1.6; EXPRESSED IN FETAL LIVER, SIGNAL = 2.4; EXPRESSED IN HEART, SIGNAL = 1.4; EXPRESSED IN BONE MARROW, SIGNAL = 1.5; EXPRESSED IN LUNG, SIGNAL = 1.8; EXPRESSED IN ADULT LIVER, SIGNAL = 1.9; EXPRESSED IN BRAIN, SIGNAL = 1.4; SWISSPROT HIT: Q91274, EVALUE 6.60e+00
TTTTNLGLSSCCRMSGIPRALQKLSM

SEQ ID NO: 41497 - protein, 49 aa, Homo sapiens
  MAP TO AL121901.10; EXPRESSED IN LUNG, SIGNAL = 3.1; EXPRESSED IN PLACENTA, SIGNAL = 2.6; EXPRESSED IN ADULT LIVER, SIGNAL =   3; EXPRESSED IN HELA, SIGNAL = 4.1; EXPRESSED IN HEART, SIGNAL = 3.1; EXPRESSED IN BRAIN, SIGNAL = 2.4; EXPRESSED IN BONE MARROW, SIGNAL = 2.9; EXPRESSED IN FETAL LIVER, SIGNAL = 2.5; EST_HUMAN HIT: AA383555.1, EVALUE 5.00e-21
SFDNNIVKMCAHMSIVVEFWLEKDEFGRRDLVIGKCDAEPSSVHVAILT

SEQ ID NO: 41498 - protein, 90 aa, Homo sapiens
  MAP TO AC007923.2; EXPRESSED IN LUNG, SIGNAL = 3.4; EXPRESSED IN ADULT LIVER, SIGNAL = 3.7; EXPRESSED IN HEART, SIGNAL = 2.9; EXPRESSED IN FETAL LIVER, SIGNAL = 2.9; EXPRESSED IN BRAIN, SIGNAL = 2.8; EXPRESSED IN BONE MARROW, SIGNAL = 3.4; EXPRESSED IN HELA, SIGNAL = 3.4; EXPRESSED IN PLACENTA, SIGNAL = 3.2; SWISSPROT HIT: P23963, EVALUE 8.00e-06; EST_HUMAN HIT: AW081890.1, EVALUE 3.00e-11
VTLTAKVRGFILEVSETRNPPEVINFRHRIMGMHHHAQLILFFLVEMGFLQLVRLVLNSRPQVTHLPEPPKVYSFTFLINLLSLYSMDLP

SEQ ID NO: 41499 - protein, 32 aa, Homo sapiens
  MAP TO AC007923.2; EXPRESSED IN LUNG, SIGNAL = 3.4; EXPRESSED IN ADULT LIVER, SIGNAL = 3.7; EXPRESSED IN HEART, SIGNAL = 2.9; EXPRESSED IN FETAL LIVER, SIGNAL = 2.9; EXPRESSED IN BRAIN, SIGNAL = 2.8; EXPRESSED IN BONE MARROW, SIGNAL = 3.4; EXPRESSED IN HELA, SIGNAL = 3.4; EXPRESSED IN PLACENTA, SIGNAL = 3.2; EST_HUMAN HIT: AI267927.1, EVALUE 4.00e-05
WWCMPIILCLKFITSGGFLVSLTSRMKPRTFA

SEQ ID NO: 41500 - protein, 59 aa, Homo sapiens
  MAP TO AL121895.18; EXPRESSED IN LUNG, SIGNAL =  11; EXPRESSED IN ADULT LIVER, SIGNAL =  11; EXPRESSED IN HELA, SIGNAL =  14; EXPRESSED IN FETAL LIVER, SIGNAL = 9.1; EXPRESSED IN BRAIN, SIGNAL = 9.2; EXPRESSED IN PLACENTA, SIGNAL =  11; EXPRESSED IN HEART, SIGNAL = 9.9; EXPRESSED IN BONE MARROW, SIGNAL =  10; EST_HUMAN HIT: AI878956.1, EVALUE 4.00e-14
MTTETGPDSEVKKAQEEAPQQPEAAAAVTTPVTPAGHGHPEANSNEKHPSQQDTRPAEQ

SEQ ID NO: 41501 - protein, 34 aa, Homo sapiens; identical to SEQ ID NO: 41067
  MAP TO AL133232.9; EXPRESSED IN HELA, SIGNAL = 4.5; EXPRESSED IN PLACENTA, SIGNAL = 3.6; EXPRESSED IN HEART, SIGNAL = 3.4; EXPRESSED IN BONE MARROW, SIGNAL = 3.3; EXPRESSED IN LUNG, SIGNAL = 3.4; EXPRESSED IN ADULT LIVER, SIGNAL = 4.5; EXPRESSED IN FETAL LIVER, SIGNAL = 3.1; EXPRESSED IN BRAIN, SIGNAL = 3.6; EST_HUMAN HIT: AI682253.1, EVALUE 3.00e-09

SEQ ID NO: 41502 - protein, 33 aa, Homo sapiens; identical to SEQ ID NO: 41068
  MAP TO AL133232.9; EXPRESSED IN HELA, SIGNAL = 4.5; EXPRESSED IN PLACENTA, SIGNAL = 3.6; EXPRESSED IN HEART, SIGNAL = 3.4; EXPRESSED IN BONE MARROW, SIGNAL = 3.3; EXPRESSED IN LUNG, SIGNAL = 3.4; EXPRESSED IN ADULT LIVER, SIGNAL = 4.5; EXPRESSED IN FETAL LIVER, SIGNAL = 3.1; EXPRESSED IN BRAIN, SIGNAL = 3.6; EST_HUMAN HIT: BE891814.1, EVALUE 9.00e-11

SEQ ID NO: 41503 - protein, 62 aa, Homo sapiens
  MAP TO AC009466.2; EXPRESSED IN PLACENTA, SIGNAL =  11; EXPRESSED IN HELA, SIGNAL = 6.7; EXPRESSED IN HEART, SIGNAL = 5.8; EXPRESSED IN FETAL LIVER, SIGNAL = 8.2; EXPRESSED IN BONE MARROW, SIGNAL = 5.5; EXPRESSED IN LUNG, SIGNAL = 6.6; EXPRESSED IN ADULT LIVER, SIGNAL = 6.9; EXPRESSED IN BRAIN, SIGNAL = 6.2; SWISSPROT HIT: P24943, EVALUE 1.20e+00; EST_HUMAN HIT: AU124478.1, EVALUE 1.00e-28
YLNQVDLQEKADLQEKEAHELLDSGKNTAVTTKNLLETLSKPDQIPLFYAGGIEILTEMINE

SEQ ID NO: 41504 - protein, 24 aa, Homo sapiens
  MAP TO AC009466.2; EXPRESSED IN PLACENTA, SIGNAL =  11; EXPRESSED IN HELA, SIGNAL = 6.7; EXPRESSED IN HEART, SIGNAL = 5.8; EXPRESSED IN FETAL LIVER, SIGNAL = 8.2; EXPRESSED IN BONE MARROW, SIGNAL = 5.5; EXPRESSED IN LUNG, SIGNAL = 6.6; EXPRESSED IN ADULT LIVER, SIGNAL = 6.9; EXPRESSED IN BRAIN, SIGNAL = 6.2; EST_HUMAN HIT: AU124478.1, EVALUE 7.00e-08
IFRKKQTFKKRKPTNCWIQERTQP

SEQ ID NO: 41505 - protein, 81 aa, Homo sapiens
  MAP TO AL161642.2; EXPRESSED IN PLACENTA, SIGNAL = 2.3; EXPRESSED IN HELA, SIGNAL =   3; EXPRESSED IN FETAL LIVER, SIGNAL = 2.8; EXPRESSED IN HEART, SIGNAL = 1.5; EXPRESSED IN BONE MARROW, SIGNAL = 5.3; EXPRESSED IN LUNG, SIGNAL = 2.3; EXPRESSED IN ADULT LIVER, SIGNAL =   3; EXPRESSED IN BRAIN, SIGNAL = 3.4; EST_HUMAN HIT: AI760820.1, EVALUE 2.00e-30; SWISSPROT HIT: P16047, EVALUE 8.20e+00
YLANDMEEDDEDPKQNIFYFLYGKTRSRIPLVRNRRFQLCRCMNPRARKNRSQIALFQKLRFQFFCSMSGRAWVSREELEE

SEQ ID NO: 41506 - protein, 82 aa, Homo sapiens
  MAP TO AL161732.1; EXPRESSED IN ADULT LIVER, SIGNAL = 2.1; EXPRESSED IN LUNG, SIGNAL = 1.8; EXPRESSED IN PLACENTA, SIGNAL = 1.9; EXPRESSED IN HELA, SIGNAL = 2.3; EXPRESSED IN HEART, SIGNAL = 1.7; EXPRESSED IN FETAL LIVER, SIGNAL =   2; EXPRESSED IN BRAIN, SIGNAL = 1.7; EXPRESSED IN BONE MARROW, SIGNAL = 1.8; EST_HUMAN HIT: BE155938.1, EVALUE 3.00e-06
TCYYRLGDLNDRNVFSQSSGGWKSGSPRSRCQQAWFLARPFSSARRSYLLALSSHCPSLCGTHVERELSVVASSYRTSVLLD

SEQ ID NO: 41507 - protein, 50 aa, Homo sapiens
  MAP TO AL158176.5; EXPRESSED IN PLACENTA, SIGNAL = 2.8; EXPRESSED IN ADULT LIVER, SIGNAL = 2.8; EXPRESSED IN HEART, SIGNAL = 3.1; EXPRESSED IN FETAL LIVER, SIGNAL =   2; EXPRESSED IN BONE MARROW, SIGNAL = 2.9; EXPRESSED IN LUNG, SIGNAL = 2.9; EXPRESSED IN HELA, SIGNAL = 3.6; EXPRESSED IN BRAIN, SIGNAL = 2.3; EST_HUMAN HIT: AV691563.1, EVALUE 1.00e-16; SWISSPROT HIT: P00640, EVALUE 4.10e-01
MKDNINTFVSRIIELCHQFPHGITDQVIQNEMPHIEAQQRAVAINRLLSM

SEQ ID NO: 41508 - protein, 32 aa, Homo sapiens
  MAP TO AC023296.2; EXPRESSED IN LUNG, SIGNAL = 3.5; EXPRESSED IN HEART, SIGNAL = 3.3; EXPRESSED IN BRAIN, SIGNAL = 3.3; EXPRESSED IN PLACENTA, SIGNAL = 3.4; EXPRESSED IN FETAL LIVER, SIGNAL = 3.4; EXPRESSED IN ADULT LIVER, SIGNAL =   4; EXPRESSED IN HELA, SIGNAL = 4.3; EXPRESSED IN BONE MARROW, SIGNAL = 3.5; EST_HUMAN HIT: AA853077.1, EVALUE 1.30e-01; SWISSPROT HIT: P08174, EVALUE 8.60e-02
PIVNGHISGDGFSYRDTVVYQCNPGFRLVGTS

SEQ ID NO: 41509 - protein, 32 aa, Homo sapiens
  MAP TO AC018530.4; EXPRESSED IN ADULT LIVER, SIGNAL = 5.4; EXPRESSED IN BRAIN, SIGNAL = 4.8; EXPRESSED IN HELA, SIGNAL = 6.5; EXPRESSED IN HEART, SIGNAL = 5.3; EXPRESSED IN BONE MARROW, SIGNAL = 5.2; EXPRESSED IN LUNG, SIGNAL = 4.5; EXPRESSED IN PLACENTA, SIGNAL =   5; EXPRESSED IN FETAL LIVER, SIGNAL = 7.2; EST_HUMAN HIT: AW962076.1, EVALUE 2.00e-04; SWISSPROT HIT: P23196, EVALUE 8.50e+00
CTESMVATTFQEASGSFYSWWKAKQEQASYMQ

SEQ ID NO: 41510 - protein, 34 aa, Homo sapiens
  MAP TO AL133419.11; EXPRESSED IN LUNG, SIGNAL = 3.1; EXPRESSED IN FETAL LIVER, SIGNAL = 3.6; EXPRESSED IN BONE MARROW, SIGNAL = 2.6; EXPRESSED IN HEART, SIGNAL = 3.2; EXPRESSED IN PLACENTA, SIGNAL = 3.3; EXPRESSED IN ADULT LIVER, SIGNAL =   3; EXPRESSED IN HELA, SIGNAL = 3.9; EXPRESSED IN BRAIN, SIGNAL =   3
GKPRNAERSRGGRRGGGRGGKRREKRKKEKEKRE

SEQ ID NO: 41511 - protein, 36 aa, Homo sapiens
  MAP TO AC021287.4; EXPRESSED IN LUNG, SIGNAL = 3.7; EXPRESSED IN HELA, SIGNAL =   5; EXPRESSED IN HEART, SIGNAL = 3.6; EXPRESSED IN PLACENTA, SIGNAL = 3.6; EXPRESSED IN FETAL LIVER, SIGNAL = 3.5; EXPRESSED IN ADULT LIVER, SIGNAL = 4.1; EXPRESSED IN BRAIN, SIGNAL = 3.2; EXPRESSED IN BONE MARROW, SIGNAL = 3.4
TEQLRSREVKIPVKGCTATDTAETSTDLSDLESHSK

SEQ ID NO: 41512 - protein, 55 aa, Homo sapiens
  MAP TO AC023032.2; EXPRESSED IN LUNG, SIGNAL =   6; EXPRESSED IN ADULT LIVER, SIGNAL = 7.4; EXPRESSED IN HELA, SIGNAL = 8.6; EXPRESSED IN BRAIN, SIGNAL = 5.4; EXPRESSED IN BONE MARROW, SIGNAL = 6.1; EXPRESSED IN PLACENTA, SIGNAL = 6.3; EXPRESSED IN HEART, SIGNAL = 6.5; EXPRESSED IN FETAL LIVER, SIGNAL = 5.9; EST_HUMAN HIT: AA773127.1, EVALUE 1.00e-10; SWISSPROT HIT: P11260, EVALUE 1.20e-02
MKQKLKAAKENGHDTYKGNPIRLRIDLLAENQQSRRQRGPMFSILKKISVKNFMF

SEQ ID NO: 41513 - protein, 97 aa, Homo sapiens
  MAP TO AL162458.1; EXPRESSED IN LUNG, SIGNAL = 1.1; EXPRESSED IN PLACENTA, SIGNAL = 0.77; EXPRESSED IN BRAIN, SIGNAL = 1.1; EXPRESSED IN BONE MARROW, SIGNAL = 1.2; EXPRESSED IN FETAL LIVER, SIGNAL = 1.3; EXPRESSED IN ADULT LIVER, SIGNAL = 0.9; EXPRESSED IN HEART, SIGNAL = 1.2; SWISSPROT HIT: P28167, EVALUE 7.10e-02; EST_HUMAN HIT: AW977544.1, EVALUE 4.00e-28
APMTSPMSSSTLAHSLAAIEALADGPTSTSTCLEAQGGPSSPVQLPPASGAEEPDLQSLEAMMEVVVVQQFKCKMCQYRSSTKATLLRHMRERHFRP

SEQ ID NO: 41514 - protein, 68 aa, Homo sapiens
  MAP TO AC011859.4; EXPRESSED IN BONE MARROW, SIGNAL = 6.4; EXPRESSED IN ADULT LIVER, SIGNAL = 5.9; EXPRESSED IN BRAIN, SIGNAL = 5.2; EXPRESSED IN LUNG, SIGNAL = 5.8; EXPRESSED IN PLACENTA, SIGNAL = 5.6; EXPRESSED IN HELA, SIGNAL = 7.7; EXPRESSED IN HEART, SIGNAL = 6.4; EXPRESSED IN FETAL LIVER, SIGNAL = 5.8; EST_HUMAN HIT: AA131248.1, EVALUE 3.00e-19; SWISSPROT HIT: O50404, EVALUE 3.90e+00
PMFSVAPSLATNASAAAFNPYLGPVSPSLVPAEILPTAPMLVTGNPGVPVPAAAAAAAQKLMRTDRLE

SEQ ID NO: 41515 - protein, 82 aa, Homo sapiens
  MAP TO AL137853.3; EXPRESSED IN PLACENTA, SIGNAL = 1.6; EXPRESSED IN ADULT LIVER, SIGNAL = 0.84; EXPRESSED IN FETAL LIVER, SIGNAL = 1.5; EXPRESSED IN BONE MARROW, SIGNAL = 1.4; EXPRESSED IN HEART, SIGNAL = 1.6; EXPRESSED IN BRAIN, SIGNAL = 1.7; EST_HUMAN HIT: AV753128.1, EVALUE 7.00e-23; SWISSPROT HIT: P46939, EVALUE 1.00e-03
FMLKEFEARRQQHEQLNEAAQGILTGPGDVSLSTSQVQKELQSINQKWVELTDKLNSRSSQIDQAIVKSTQYQELLQDLSEK

SEQ ID NO: 41516 - protein, 55 aa, Homo sapiens
  MAP TO AC008065.3; EXPRESSED IN LUNG, SIGNAL = 2.2; EXPRESSED IN PLACENTA, SIGNAL = 1.4; EXPRESSED IN ADULT LIVER, SIGNAL = 2.9; EXPRESSED IN BRAIN, SIGNAL = 3.5; EXPRESSED IN FETAL LIVER, SIGNAL = 7.6; EXPRESSED IN BONE MARROW, SIGNAL =   7; EXPRESSED IN HELA, SIGNAL = 4.1; EXPRESSED IN HEART, SIGNAL = 3.3; SWISSPROT HIT: P30742, EVALUE 4.00e-25; EST_HUMAN HIT: AW084953.1, EVALUE 4.00e-24
MTKKRRNNGHAKKGRGHVHPIRCTNCTRCVPKDKAIKKFVIRNVVEAAAVRDISE

SEQ ID NO: 41517 - protein, 68 aa, Homo sapiens
  MAP TO AC025115.2; EXPRESSED IN LUNG, SIGNAL = 5.2; EXPRESSED IN BRAIN, SIGNAL = 5.4; EXPRESSED IN BONE MARROW, SIGNAL = 4.4; EXPRESSED IN HEART, SIGNAL = 4.6; EXPRESSED IN PLACENTA, SIGNAL = 5.1; EXPRESSED IN ADULT LIVER, SIGNAL = 5.3; EXPRESSED IN HELA, SIGNAL = 6.4; EXPRESSED IN FETAL LIVER, SIGNAL = 4.6; SWISSPROT HIT: Q13606, EVALUE 2.00e-11; EST_HUMAN HIT: AA954584.1, EVALUE 1.00e-15
ITPAIMANLTIVTEFILMGFSTNKNMCILHSILFLLIYLCALMGNVLIIMITTLDHHLHTPVYFFLKN

SEQ ID NO: 41518 - protein, 65 aa, Homo sapiens
  MAP TO AL121575.24; EXPRESSED IN HELA, SIGNAL = 2.7; EXPRESSED IN HEART, SIGNAL = 1.9; EXPRESSED IN FETAL LIVER, SIGNAL = 1.6; EXPRESSED IN BRAIN, SIGNAL = 1.6; EXPRESSED IN BONE MARROW, SIGNAL = 1.6; EXPRESSED IN PLACENTA, SIGNAL = 1.8; EXPRESSED IN ADULT LIVER, SIGNAL = 0.92; EST_HUMAN HIT: AW363299.1, EVALUE 4.00e-22
REAFGILYLISALQHKQRCPVLEDQLVDLVVYAMERSETEEKFDDGGTSQLLWQHLSSQLIFFVL

SEQ ID NO: 41519 - protein, 101 aa, Homo sapiens
  MAP TO AL161756.1; EXPRESSED IN FETAL LIVER, SIGNAL =   6; EXPRESSED IN PLACENTA, SIGNAL = 5.8; EXPRESSED IN ADULT LIVER, SIGNAL = 4.3; EXPRESSED IN HEART, SIGNAL = 5.2; EXPRESSED IN BONE MARROW, SIGNAL = 4.1; EXPRESSED IN LUNG, SIGNAL = 4.7; EXPRESSED IN BRAIN, SIGNAL =   6; EST_HUMAN HIT: BF510841.1, EVALUE 5.00e-12; SWISSPROT HIT: Q92731, EVALUE 8.00e-58
QSILPLEHGSIYIPSSYVDSHHEYPAMTFYSPAVMNYSIPSNVTNLEGGPGRQTTSPNVLWPTPGHLSPLVVHRQLSHLYAEPQKSPWCEARSLEHTLPVN

SEQ ID NO: 41520 - protein, 17 aa, Homo sapiens
  MAP TO AL161756.1; EXPRESSED IN FETAL LIVER, SIGNAL =   6; EXPRESSED IN PLACENTA, SIGNAL = 5.8; EXPRESSED IN ADULT LIVER, SIGNAL = 4.3; EXPRESSED IN HEART, SIGNAL = 5.2; EXPRESSED IN BONE MARROW, SIGNAL = 4.1; EXPRESSED IN LUNG, SIGNAL = 4.7; EXPRESSED IN BRAIN, SIGNAL =   6
NPSYPWSTAPYTYLPPM

SEQ ID NO: 41521 - protein, 105 aa, Homo sapiens
  MAP TO AC013550.4; EXPRESSED IN HEART, SIGNAL = 3.3; EXPRESSED IN FETAL LIVER, SIGNAL = 0.57; EST_HUMAN HIT: C03096.1, EVALUE 1.00e-50; SWISSPROT HIT: P54296, EVALUE 5.00e-57
TLNLTCTVFGNPDPEVIWFKNDQDIQLSEHFSVKVEQAKYVSMTIKGVTSEDSGKYSINIKNKYGGEKIDVTVSVYKHGEKIPDMAPPQQAKPKLIPASASAAGQ

SEQ ID NO: 41522 - protein, 104 aa, Homo sapiens
  MAP TO AL161747.1; EXPRESSED IN FETAL LIVER, SIGNAL = 5.5; EXPRESSED IN LUNG, SIGNAL = 4.5; EXPRESSED IN PLACENTA, SIGNAL = 4.8; EXPRESSED IN ADULT LIVER, SIGNAL = 4.7; EXPRESSED IN HEART, SIGNAL = 5.4; EXPRESSED IN BONE MARROW, SIGNAL = 4.5; EXPRESSED IN HELA, SIGNAL =   4; EXPRESSED IN BRAIN, SIGNAL = 5.5; EST_HUMAN HIT: BF340331.1, EVALUE 2.00e-24; SWISSPROT HIT: P53236, EVALUE 1.50e+00
APVEKSPEETATQVPSLESLTLKLEHEVVARSRPTPQDYEMRVSPSDTTPLVSRSVPPVKLEDEDDSDSELDLSKLSPSSSSSSSSSSSSSSTDESEDEKEEKL

SEQ ID NO: 41523 - protein, 20 aa, Homo sapiens
  MAP TO AL161747.1; EXPRESSED IN FETAL LIVER, SIGNAL = 5.5; EXPRESSED IN LUNG, SIGNAL = 4.5; EXPRESSED IN PLACENTA, SIGNAL = 4.8; EXPRESSED IN ADULT LIVER, SIGNAL = 4.7; EXPRESSED IN HEART, SIGNAL = 5.4; EXPRESSED IN BONE MARROW, SIGNAL = 4.5; EXPRESSED IN HELA, SIGNAL =   4; EXPRESSED IN BRAIN, SIGNAL = 5.5; EST_HUMAN HIT: AU118560.1, EVALUE 1.00e-04
MLLLKSHPRRQLPRSPVWRV

SEQ ID NO: 41524 - protein, 45 aa, Homo sapiens
  MAP TO AC015999.3; EXPRESSED IN PLACENTA, SIGNAL = 7.5; EXPRESSED IN FETAL LIVER, SIGNAL =  11; EXPRESSED IN ADULT LIVER, SIGNAL =  14; EXPRESSED IN HELA, SIGNAL =  16; EXPRESSED IN HEART, SIGNAL = 8.4; EXPRESSED IN BONE MARROW, SIGNAL =  11; EXPRESSED IN LUNG, SIGNAL =  11; EXPRESSED IN BRAIN, SIGNAL =  13; EST_HUMAN HIT: AW898344.1, EVALUE 2.00e-12; SWISSPROT HIT: P55013, EVALUE 3.60e+00
MWESLEPPRDLLNGFDQNDDSDMGNKVQADVASEGNEKLVGTGAK

SEQ ID NO: 41525 - protein, 26 aa, Homo sapiens
  MAP TO AC015999.3; EXPRESSED IN PLACENTA, SIGNAL = 7.5; EXPRESSED IN FETAL LIVER, SIGNAL =  11; EXPRESSED IN ADULT LIVER, SIGNAL =  14; EXPRESSED IN HELA, SIGNAL =  16; EXPRESSED IN HEART, SIGNAL = 8.4; EXPRESSED IN BONE MARROW, SIGNAL =  11; EXPRESSED IN LUNG, SIGNAL =  11; EXPRESSED IN BRAIN, SIGNAL =  13; EST_HUMAN HIT: AA777621.1, EVALUE 8.00e-06
ARIGTVWRTPKKTRKCGKVWNLLETC

SEQ ID NO: 41526 - protein, 55 aa, Homo sapiens
  MAP TO AC013657.3; EXPRESSED IN PLACENTA, SIGNAL = 2.4; EXPRESSED IN BONE MARROW, SIGNAL = 2.5; EXPRESSED IN ADULT LIVER, SIGNAL = 3.3; EXPRESSED IN HELA, SIGNAL = 4.1; EXPRESSED IN HEART, SIGNAL = 2.5; EXPRESSED IN BRAIN, SIGNAL = 2.2; EXPRESSED IN LUNG, SIGNAL = 2.4; EXPRESSED IN FETAL LIVER, SIGNAL = 2.8; EST_HUMAN HIT: BE207855.1, EVALUE 4.80e+00
LGLLVSTQNQDKQNKQRDAGRRLGVSPQVYRCAGATLRKALVCMQGAGRSALGRI

SEQ ID NO: 41527 - protein, 36 aa, Homo sapiens
  MAP TO AC013657.3; EXPRESSED IN PLACENTA, SIGNAL = 2.4; EXPRESSED IN BONE MARROW, SIGNAL = 2.5; EXPRESSED IN ADULT LIVER, SIGNAL = 3.3; EXPRESSED IN HELA, SIGNAL = 4.1; EXPRESSED IN HEART, SIGNAL = 2.5; EXPRESSED IN BRAIN, SIGNAL = 2.2; EXPRESSED IN LUNG, SIGNAL = 2.4; EXPRESSED IN FETAL LIVER, SIGNAL = 2.8
SACSCQRKTRTSRINKEMLAEGWVCRLRSTDVLGPH

SEQ ID NO: 41528 - protein, 46 aa, Homo sapiens
  MAP TO AL162171.1; EXPRESSED IN FETAL LIVER, SIGNAL = 0.99; EXPRESSED IN LUNG, SIGNAL = 1.4; EXPRESSED IN PLACENTA, SIGNAL = 1.3; EXPRESSED IN ADULT LIVER, SIGNAL = 1.2; EXPRESSED IN BRAIN, SIGNAL = 0.79; EXPRESSED IN BONE MARROW, SIGNAL =   1; EXPRESSED IN HEART, SIGNAL = 1.3; EST_HUMAN HIT: AA102018.1, EVALUE 5.00e-05; SWISSPROT HIT: Q16825, EVALUE 6.00e-20
GMKKTRVDAKKIGPLKLAALNGLSLSRVPLPDEGKEVATRATNDER

SEQ ID NO: 41529 - protein, 26 aa, Homo sapiens
  MAP TO AC022050.2; EXPRESSED IN LUNG, SIGNAL =   4; EXPRESSED IN BONE MARROW, SIGNAL = 7.8; EXPRESSED IN BRAIN, SIGNAL = 7.8; EXPRESSED IN HEART, SIGNAL =   4; EXPRESSED IN HELA, SIGNAL = 5.8; EXPRESSED IN ADULT LIVER, SIGNAL =   6; EXPRESSED IN PLACENTA, SIGNAL =   3; EXPRESSED IN FETAL LIVER, SIGNAL = 7.6; EST_HUMAN HIT: AA601187.1, EVALUE 8.00e-06
KFSMRTSPLQQTSSWTSRCFHTSSET

SEQ ID NO: 41530 - protein, 25 aa, Homo sapiens
  MAP TO AC016057.3; EXPRESSED IN PLACENTA, SIGNAL = 1.6; EXPRESSED IN ADULT LIVER, SIGNAL =   2; EXPRESSED IN HEART, SIGNAL = 1.7; EXPRESSED IN FETAL LIVER, SIGNAL = 1.6; EXPRESSED IN BRAIN, SIGNAL = 1.6; EXPRESSED IN BONE MARROW, SIGNAL = 1.7; EXPRESSED IN LUNG, SIGNAL = 1.8; EXPRESSED IN HELA, SIGNAL = 2.3
SMWYSPGMPGSGSEEQNPVSHMIRR

SEQ ID NO: 41531 - protein, 21 aa, Homo sapiens
  MAP TO AC016057.3; EXPRESSED IN PLACENTA, SIGNAL = 1.6; EXPRESSED IN ADULT LIVER, SIGNAL =   2; EXPRESSED IN HEART, SIGNAL = 1.7; EXPRESSED IN FETAL LIVER, SIGNAL = 1.6; EXPRESSED IN BRAIN, SIGNAL = 1.6; EXPRESSED IN BONE MARROW, SIGNAL = 1.7; EXPRESSED IN LUNG, SIGNAL = 1.8; EXPRESSED IN HELA, SIGNAL = 2.3
VCGILLGCRAVAARNRTQSAT

SEQ ID NO: 41532 - protein, 40 aa, Homo sapiens
  MAP TO AC010769.3; EXPRESSED IN BONE MARROW, SIGNAL = 3.4; EXPRESSED IN LUNG, SIGNAL = 3.4; EXPRESSED IN BRAIN, SIGNAL = 3.5; EXPRESSED IN HEART, SIGNAL = 4.3; EXPRESSED IN HELA, SIGNAL = 4.7; EXPRESSED IN ADULT LIVER, SIGNAL = 3.7; EXPRESSED IN PLACENTA, SIGNAL = 3.4; EXPRESSED IN FETAL LIVER, SIGNAL = 3.9; EST_HUMAN HIT: BE877120.1, EVALUE 3.00e-17
CSSSNSISGQSMCTARLRECSSLRRYVKKHLKTWSSCWES

SEQ ID NO: 41533 - protein, 28 aa, Homo sapiens
  MAP TO AC022758.3; EXPRESSED IN LUNG, SIGNAL =   4; EXPRESSED IN ADULT LIVER, SIGNAL =   3; EXPRESSED IN BRAIN, SIGNAL = 4.4; EXPRESSED IN PLACENTA, SIGNAL =   4; EXPRESSED IN HEART, SIGNAL = 2.8; EXPRESSED IN FETAL LIVER, SIGNAL = 4.2; EXPRESSED IN BONE MARROW, SIGNAL = 3.7; EST_HUMAN HIT: BE737449.1, EVALUE 2.70e+00
SSIPLTAWGPGPHFTSPLSSAPTATRLQ

SEQ ID NO: 41534 - protein, 37 aa, Homo sapiens
  MAP TO AC018528.3; EXPRESSED IN HEART, SIGNAL = 2.5; EXPRESSED IN BRAIN, SIGNAL = 1.5; EXPRESSED IN BONE MARROW, SIGNAL = 1.1; EXPRESSED IN LUNG, SIGNAL = 1.4; EXPRESSED IN PLACENTA, SIGNAL = 1.3; EXPRESSED IN ADULT LIVER, SIGNAL = 1.5; EXPRESSED IN FETAL LIVER, SIGNAL =   1
PRTGELNALEFLTNFANVVQNNTEFICAELFMLTVTT

SEQ ID NO: 41535 - protein, 40 aa, Homo sapiens
  MAP TO AC013552.3; EXPRESSED IN ADULT LIVER, SIGNAL = 1.3; EXPRESSED IN PLACENTA, SIGNAL = 1.3; EXPRESSED IN BRAIN, SIGNAL = 0.89; EXPRESSED IN BONE MARROW, SIGNAL = 0.99; EXPRESSED IN LUNG, SIGNAL = 1.1; EXPRESSED IN HEART, SIGNAL = 1.3; EXPRESSED IN FETAL LIVER, SIGNAL = 1.1; SWISSPROT HIT: P57159, EVALUE 8.30e+00
WMHLKSKILRERKQITKSSTCRLTIKESKEIITTKFRMVV

SEQ ID NO: 41536 - protein, 27 aa, Homo sapiens
  MAP TO AC021239.3; EXPRESSED IN ADULT LIVER, SIGNAL = 4.5; EXPRESSED IN HELA, SIGNAL = 3.8; EXPRESSED IN HEART, SIGNAL =   2; EXPRESSED IN BRAIN, SIGNAL =   2; EXPRESSED IN BONE MARROW, SIGNAL = 2.2; EXPRESSED IN LUNG, SIGNAL = 1.3; EXPRESSED IN PLACENTA, SIGNAL = 2.5; EXPRESSED IN FETAL LIVER, SIGNAL = 2.5
MNNPRYYKEGWDTDRTMMMVHNLKIRQ

SEQ ID NO: 41537 - protein, 20 aa, Homo sapiens
  MAP TO AC018516.3; EXPRESSED IN HELA, SIGNAL = 7.6; EXPRESSED IN HEART, SIGNAL = 4.8; EXPRESSED IN FETAL LIVER, SIGNAL = 4.7; EXPRESSED IN BRAIN, SIGNAL = 5.5; EXPRESSED IN PLACENTA, SIGNAL = 4.1; EXPRESSED IN ADULT LIVER, SIGNAL = 5.4; EXPRESSED IN BONE MARROW, SIGNAL = 5.2; EXPRESSED IN LUNG, SIGNAL = 4.1; EST_HUMAN HIT: BE733463.1, EVALUE 8.30e+00
WGLSTGAPLAQPWQTQWRLC

SEQ ID NO: 41538 - protein, 27 aa, Homo sapiens
  MAP TO AC022714.2; EXPRESSED IN LUNG, SIGNAL = 2.6; EXPRESSED IN PLACENTA, SIGNAL = 2.2; EXPRESSED IN ADULT LIVER, SIGNAL = 2.9; EXPRESSED IN HEART, SIGNAL = 2.2; EXPRESSED IN FETAL LIVER, SIGNAL = 2.4; EXPRESSED IN BRAIN, SIGNAL = 2.7; EXPRESSED IN BONE MARROW, SIGNAL = 2.7; EST_HUMAN HIT: AA601493.1, EVALUE 4.00e-07
WDKHGVWFVPPWNFLTLIMRRKESIMK

SEQ ID NO: 41539 - protein, 57 aa, Homo sapiens
  MAP TO AC021641.4; EXPRESSED IN BONE MARROW, SIGNAL = 2.6; EXPRESSED IN LUNG, SIGNAL = 2.2; EXPRESSED IN ADULT LIVER, SIGNAL = 2.4; EXPRESSED IN HEART, SIGNAL = 2.2; EXPRESSED IN BRAIN, SIGNAL = 2.3; EXPRESSED IN PLACENTA, SIGNAL = 2.2; EXPRESSED IN FETAL LIVER, SIGNAL = 2.1; EST_HUMAN HIT: AI610529.1, EVALUE 2.10e+00
RTSSRTCRSSIIASLIGWHCWHWPFKFATRGRQTRHYPRQSIQCLPHRVIQELNSTI

SEQ ID NO: 41540 - protein, 76 aa, Homo sapiens
  MAP TO AC009334.3; EXPRESSED IN PLACENTA, SIGNAL = 0.99; EXPRESSED IN ADULT LIVER, SIGNAL = 1.7; EXPRESSED IN FETAL LIVER, SIGNAL = 2.2; EXPRESSED IN BONE MARROW, SIGNAL = 1.9; EXPRESSED IN LUNG, SIGNAL = 1.7; EXPRESSED IN HELA, SIGNAL = 3.6; EXPRESSED IN HEART, SIGNAL = 1.2; EXPRESSED IN BRAIN, SIGNAL = 1.3; SWISSPROT HIT: Q99698, EVALUE 4.00e-25; EST_HUMAN HIT: BF087027.1, EVALUE 6.00e-21
FDLEDVRNMGLFQKWSVIPILGLIETSLYDNILLHNALLLLLQILNSCSKVADMLLDNGLLYVLCNTVAALNGLEK

SEQ ID NO: 41541 - protein, 33 aa, Homo sapiens
  MAP TO AC013657.3; EXPRESSED IN ADULT LIVER, SIGNAL = 2.6; EXPRESSED IN HELA, SIGNAL = 2.2; EXPRESSED IN HEART, SIGNAL = 1.4; EXPRESSED IN BRAIN, SIGNAL = 1.2; EXPRESSED IN BONE MARROW, SIGNAL = 1.4; EXPRESSED IN PLACENTA, SIGNAL = 1.5; EXPRESSED IN FETAL LIVER, SIGNAL = 1.4; EST_HUMAN HIT: AA662268.1, EVALUE 9.90e+00
WMRLLRRKECSSLLIRWEHNSRSCSPTSCRINV

SEQ ID NO: 41542 - protein, 30 aa, Homo sapiens
  MAP TO AC013657.3; EXPRESSED IN ADULT LIVER, SIGNAL = 2.6; EXPRESSED IN HELA, SIGNAL = 2.2; EXPRESSED IN HEART, SIGNAL = 1.4; EXPRESSED IN BRAIN, SIGNAL = 1.2; EXPRESSED IN BONE MARROW, SIGNAL = 1.4; EXPRESSED IN PLACENTA, SIGNAL = 1.5; EXPRESSED IN FETAL LIVER, SIGNAL = 1.4
GCGFSAARSAAPSSSVGNITAEAAPPQAAG

SEQ ID NO: 41543 - protein, 20 aa, Homo sapiens
  MAP TO AC022637.3; EXPRESSED IN PLACENTA, SIGNAL = 1.1; EXPRESSED IN ADULT LIVER, SIGNAL = 1.4; EXPRESSED IN HEART, SIGNAL = 1.3; EXPRESSED IN FETAL LIVER, SIGNAL = 1.2; EXPRESSED IN BRAIN, SIGNAL = 1.4; EXPRESSED IN BONE MARROW, SIGNAL = 1.3; EXPRESSED IN LUNG, SIGNAL = 1.4
WWPMICWIKFWFPWKPHMAT

SEQ ID NO: 41544 - protein, 42 aa, Homo sapiens
  MAP TO AC007326.28; EXPRESSED IN HELA, SIGNAL = 2.6; EXPRESSED IN BONE MARROW, SIGNAL = 2.2; EXPRESSED IN LUNG, SIGNAL = 2.3; EXPRESSED IN ADULT LIVER, SIGNAL = 2.2; EXPRESSED IN BRAIN, SIGNAL = 1.9; EXPRESSED IN PLACENTA, SIGNAL = 2.1; EXPRESSED IN HEART, SIGNAL =   2; EXPRESSED IN FETAL LIVER, SIGNAL = 2.1; EST_HUMAN HIT: AA467933.1, EVALUE 5.40e+00
PPDHSYSGTRPLLPVCWGPSVVWRSQQPRPSSQRRNPRPRRV

SEQ ID NO: 41545 - protein, 30 aa, Homo sapiens
  MAP TO AC016113.4; EXPRESSED IN BONE MARROW, SIGNAL = 2.4; EXPRESSED IN LUNG, SIGNAL = 2.1; EXPRESSED IN ADULT LIVER, SIGNAL = 2.6; EXPRESSED IN HEART, SIGNAL = 1.8; EXPRESSED IN BRAIN, SIGNAL = 2.3; EXPRESSED IN PLACENTA, SIGNAL = 2.3; EXPRESSED IN FETAL LIVER, SIGNAL = 2.1; EST_HUMAN HIT: BE080833.1, EVALUE 1.00e-08
WCVGSLFLQMFDSVWSFFLLVGSWSRWLQE

SEQ ID NO: 41546 - protein, 19 aa, Homo sapiens
  MAP TO AL139352.8; EXPRESSED IN HELA, SIGNAL = 2.5; EXPRESSED IN PLACENTA, SIGNAL =   2; EXPRESSED IN ADULT LIVER, SIGNAL = 2.1; EXPRESSED IN HEART, SIGNAL = 1.5; EXPRESSED IN FETAL LIVER, SIGNAL =   2; EXPRESSED IN LUNG, SIGNAL = 1.8; EXPRESSED IN BRAIN, SIGNAL = 2.5; EXPRESSED IN BONE MARROW, SIGNAL = 2.9
WCAKGPRNRPCARSFSHSW

SEQ ID NO: 41547 - protein, 32 aa, Homo sapiens
  MAP TO AC027304.1; EXPRESSED IN PLACENTA, SIGNAL = 1.8; EXPRESSED IN ADULT LIVER, SIGNAL = 2.1; EXPRESSED IN FETAL LIVER, SIGNAL = 1.6; EXPRESSED IN BRAIN, SIGNAL = 1.6; EXPRESSED IN BONE MARROW, SIGNAL = 1.5; EXPRESSED IN LUNG, SIGNAL = 1.8; EXPRESSED IN HEART, SIGNAL = 1.6
MVTKENTGMPITTHQMSLTPVKESLINLESTA

SEQ ID NO: 41548 - protein, 34 aa, Homo sapiens
  MAP TO AL133232.9; EXPRESSED IN PLACENTA, SIGNAL = 1.8; EXPRESSED IN ADULT LIVER, SIGNAL = 1.9; EXPRESSED IN HEART, SIGNAL = 1.4; EXPRESSED IN FETAL LIVER, SIGNAL = 1.6; EXPRESSED IN BRAIN, SIGNAL = 1.8; EXPRESSED IN BONE MARROW, SIGNAL = 1.9; EXPRESSED IN LUNG, SIGNAL = 1.8; EST_HUMAN HIT: AW005372.1, EVALUE 1.50e+00
RDVPTAPQQRIIWPKMPRVLRSSWSWPLSTPGRI

SEQ ID NO: 41549 - protein, 47 aa, Homo sapiens
  MAP TO AC026414.2; EXPRESSED IN LUNG, SIGNAL = 4.9; EXPRESSED IN HEART, SIGNAL = 4.1; EXPRESSED IN FETAL LIVER, SIGNAL = 4.5; EXPRESSED IN BONE MARROW, SIGNAL = 5.4; EXPRESSED IN HELA, SIGNAL = 5.8; EXPRESSED IN PLACENTA, SIGNAL = 5.5; EXPRESSED IN ADULT LIVER, SIGNAL = 7.3; EXPRESSED IN BRAIN, SIGNAL = 4.9; EST_HUMAN HIT: AW858142.1, EVALUE 3.00e-06; SWISSPROT HIT: P09053, EVALUE 2.10e+00
MLLPAFQLPQLWPWLRDTQIHLKLLLQRMQAKGFGSFHIVLILQVHR

SEQ ID NO: 41550 - protein, 27 aa, Homo sapiens
  MAP TO AL157997.2; EXPRESSED IN ADULT LIVER, SIGNAL = 1.5; EXPRESSED IN BRAIN, SIGNAL = 1.5; EXPRESSED IN LUNG, SIGNAL = 1.5; EXPRESSED IN PLACENTA, SIGNAL = 1.5; EXPRESSED IN HEART, SIGNAL = 1.2; EXPRESSED IN FETAL LIVER, SIGNAL = 1.2; EXPRESSED IN BONE MARROW, SIGNAL = 1.6
EMIQCNKEINQDMKDMEDCGQDSDRRS

SEQ ID NO: 41551 - protein, 32 aa, Homo sapiens
  MAP TO AC021037.4; EXPRESSED IN ADULT LIVER, SIGNAL = 4.5; EXPRESSED IN BONE MARROW, SIGNAL = 3.9; EXPRESSED IN PLACENTA, SIGNAL = 4.2; EXPRESSED IN HEART, SIGNAL = 5.1; EXPRESSED IN FETAL LIVER, SIGNAL = 3.5; EXPRESSED IN LUNG, SIGNAL = 4.3; EXPRESSED IN BRAIN, SIGNAL = 4.1; EST_HUMAN HIT: AA848050.1, EVALUE 2.00e-11
YFGSVAEIIRNHQHSPLVLIDSQNNTKDSTRL

SEQ ID NO: 41552 - protein, 31 aa, Homo sapiens
  MAP TO AC021037.4; EXPRESSED IN ADULT LIVER, SIGNAL = 4.5; EXPRESSED IN BONE MARROW, SIGNAL = 3.9; EXPRESSED IN PLACENTA, SIGNAL = 4.2; EXPRESSED IN HEART, SIGNAL = 5.1; EXPRESSED IN FETAL LIVER, SIGNAL = 3.5; EXPRESSED IN LUNG, SIGNAL = 4.3; EXPRESSED IN BRAIN, SIGNAL = 4.1; EST_HUMAN HIT: AA848050.1, EVALUE 5.00e-10
TLEVLLKSSGIINIVLWFLLTVRITQKIPPD

SEQ ID NO: 41553 - protein, 61 aa, Homo sapiens
  MAP TO AC022429.2; EXPRESSED IN PLACENTA, SIGNAL = 1.8; EXPRESSED IN BONE MARROW, SIGNAL = 1.3; EXPRESSED IN LUNG, SIGNAL = 1.7; EXPRESSED IN ADULT LIVER, SIGNAL =   2; EXPRESSED IN FETAL LIVER, SIGNAL = 1.4; EXPRESSED IN BRAIN, SIGNAL = 1.3; EXPRESSED IN HEART, SIGNAL = 1.3; SWISSPROT HIT: P29719, EVALUE 2.60e+00
ESIYADIETAKARKNSMISPRLTDLSQEGSPGIHNKQLQLACSVSRTVDLSSFLESVLQQG

SEQ ID NO: 41554 - protein, 17 aa, Homo sapiens
  MAP TO AC022429.2; EXPRESSED IN PLACENTA, SIGNAL = 1.8; EXPRESSED IN BONE MARROW, SIGNAL = 1.3; EXPRESSED IN LUNG, SIGNAL = 1.7; EXPRESSED IN ADULT LIVER, SIGNAL =   2; EXPRESSED IN FETAL LIVER, SIGNAL = 1.4; EXPRESSED IN BRAIN, SIGNAL = 1.3; EXPRESSED IN HEART, SIGNAL = 1.3
KKASMQILKQPKRGRTP

SEQ ID NO: 41555 - protein, 70 aa, Homo sapiens
  MAP TO AL161642.2; EXPRESSED IN HEART, SIGNAL = 1.2; EXPRESSED IN PLACENTA, SIGNAL = 1.8; EXPRESSED IN ADULT LIVER, SIGNAL = 1.7; EXPRESSED IN FETAL LIVER, SIGNAL = 1.6; EXPRESSED IN BRAIN, SIGNAL = 1.9; EXPRESSED IN BONE MARROW, SIGNAL = 2.3; EXPRESSED IN LUNG, SIGNAL = 1.4; SWISSPROT HIT: P21754, EVALUE 2.00e-18; EST_HUMAN HIT: BF195407.1, EVALUE 2.00e-17
TEEADVTVGPLIFLDRRGDHEVEQWALPSDTSVVLLGVGLAVVVSLTLTAVILVLTRRCRTASHPVSASE

SEQ ID NO: 41556 - protein, 76 aa, Homo sapiens
  MAP TO AL135936.10; EXPRESSED IN HELA, SIGNAL = 3.3; EXPRESSED IN PLACENTA, SIGNAL = 3.8; EXPRESSED IN ADULT LIVER, SIGNAL = 4.1; EXPRESSED IN FETAL LIVER, SIGNAL = 3.5; EXPRESSED IN BRAIN, SIGNAL = 3.7; EXPRESSED IN LUNG, SIGNAL = 3.4; EXPRESSED IN HEART, SIGNAL = 6.7; EXPRESSED IN BONE MARROW, SIGNAL = 3.8; SWISSPROT HIT: Q63384, EVALUE 6.40e+00; EST_HUMAN HIT: AA808530.1, EVALUE 1.00e+00
RSVSEIHHRTPGVYLPGQCTCSLRHLQDLFSQIPSATLLPSSSQSFIDTLTLANAFGEVLPRENPAGSRAVFPQEP

SEQ ID NO: 41557 - protein, 46 aa, Homo sapiens
  MAP TO AL135936.10; EXPRESSED IN HELA, SIGNAL = 3.3; EXPRESSED IN PLACENTA, SIGNAL = 3.8; EXPRESSED IN ADULT LIVER, SIGNAL = 4.1; EXPRESSED IN FETAL LIVER, SIGNAL = 3.5; EXPRESSED IN BRAIN, SIGNAL = 3.7; EXPRESSED IN LUNG, SIGNAL = 3.4; EXPRESSED IN HEART, SIGNAL = 6.7; EXPRESSED IN BONE MARROW, SIGNAL = 3.8; SWISSPROT HIT: Q9JI70, EVALUE 5.50e-01; EST_HUMAN HIT: W01720.1, EVALUE 3.00e+00
GLCLKSITAPLVSTFLASAPAACGTSKTFSPKFPLQHFFHLVPNLL

SEQ ID NO: 41558 - protein, 61 aa, Homo sapiens
  MAP TO AC005481.3; EXPRESSED IN HELA, SIGNAL = 2.5; EXPRESSED IN PLACENTA, SIGNAL = 4.7; EXPRESSED IN ADULT LIVER, SIGNAL = 4.4; EXPRESSED IN HEART, SIGNAL = 4.2; EXPRESSED IN FETAL LIVER, SIGNAL = 3.6; EXPRESSED IN BRAIN, SIGNAL = 3.9; EXPRESSED IN LUNG, SIGNAL = 3.7; EXPRESSED IN BONE MARROW, SIGNAL = 3.7; SWISSPROT HIT: Q03132, EVALUE 1.00e-01; EST_HUMAN HIT: AI050027.1, EVALUE 3.00e-09
PKCAGLPGSAATVWAAVAPPQRGGGGGVLPAAWNRMPRLRLPAAAGVMVVATPEGLSLPSL

SEQ ID NO: 41559 - protein, 82 aa, Homo sapiens
  MAP TO AC022317.4; EXPRESSED IN ADULT LIVER, SIGNAL = 1.9; EXPRESSED IN FETAL LIVER, SIGNAL = 1.7; EXPRESSED IN PLACENTA, SIGNAL = 1.2; EXPRESSED IN HEART, SIGNAL = 1.5; EXPRESSED IN BRAIN, SIGNAL =   2; EXPRESSED IN BONE MARROW, SIGNAL = 2.2; EXPRESSED IN LUNG, SIGNAL = 1.3; EST_HUMAN HIT: BF240386.1, EVALUE 9.00e+00
IPAQMSLHPSLILPGSKPHFSTIFFIVASFTCIYLSPLPGHGKFLRASRLSYASLQLISQSLSSLATIQFRTMFSQSRHMTK

SEQ ID NO: 41560 - protein, 28 aa, Homo sapiens
  MAP TO AC022813.3; EXPRESSED IN ADULT LIVER, SIGNAL = 1.3; EXPRESSED IN PLACENTA, SIGNAL = 1.6; EXPRESSED IN HEART, SIGNAL = 1.5; EXPRESSED IN FETAL LIVER, SIGNAL = 0.99; EXPRESSED IN BRAIN, SIGNAL = 1.4; EXPRESSED IN BONE MARROW, SIGNAL = 1.2; EXPRESSED IN LUNG, SIGNAL = 1.4
AVCHGGSSERHVGYENAECDSIWQTFGY

SEQ ID NO: 41561 - protein, 65 aa, Homo sapiens
  MAP TO AL133227.7; EXPRESSED IN LUNG, SIGNAL = 1.5; EXPRESSED IN PLACENTA, SIGNAL = 1.7; EXPRESSED IN ADULT LIVER, SIGNAL = 1.7; EXPRESSED IN HEART, SIGNAL = 1.6; EXPRESSED IN FETAL LIVER, SIGNAL = 1.7; EXPRESSED IN BRAIN, SIGNAL = 1.7; EXPRESSED IN BONE MARROW, SIGNAL = 1.6; SWISSPROT HIT: P08547, EVALUE 2.00e+00; EST_HUMAN HIT: AI631231.1, EVALUE 3.00e-01
PAAVTLLESNLATYIKRKQLHTFFHPAIPRMGILPIEIKTPEYMCLWMFTSTVIMIAMGGKNLKT

SEQ ID NO: 41562 - protein, 44 aa, Homo sapiens
  MAP TO AL136300.5; EXPRESSED IN LUNG, SIGNAL = 2.3; EXPRESSED IN PLACENTA, SIGNAL = 2.5; EXPRESSED IN ADULT LIVER, SIGNAL = 2.3; EXPRESSED IN HEART, SIGNAL = 1.9; EXPRESSED IN FETAL LIVER, SIGNAL = 1.9; EXPRESSED IN BRAIN, SIGNAL = 1.9; EXPRESSED IN BONE MARROW, SIGNAL = 2.1; EXPRESSED IN HELA, SIGNAL = 2.8
MKGEKKHRNQKISSRKQISRKRSKGDHQGHGEIPEAVQDKDPTS

SEQ ID NO: 41563 - protein, 28 aa, Homo sapiens
  MAP TO AC009334.3; EXPRESSED IN PLACENTA, SIGNAL = 2.6; EXPRESSED IN BONE MARROW, SIGNAL = 2.4; EXPRESSED IN ADULT LIVER, SIGNAL = 2.8; EXPRESSED IN FETAL LIVER, SIGNAL = 2.2; EXPRESSED IN BRAIN, SIGNAL = 2.3; EXPRESSED IN LUNG, SIGNAL = 2.4; EXPRESSED IN HELA, SIGNAL =   3; EXPRESSED IN HEART, SIGNAL = 2.2; SWISSPROT HIT: P39016, EVALUE 2.20e+00; EST_HUMAN HIT: AI733244.1, EVALUE 3.00e-11
PRNPMNTKQHKHKENHIKAHHNHTVENQ

SEQ ID NO: 41564 - protein, 111 aa, Homo sapiens
  MAP TO AL137141.7; EXPRESSED IN ADULT LIVER, SIGNAL = 1.3; EXPRESSED IN FETAL LIVER, SIGNAL = 1.3; EXPRESSED IN PLACENTA, SIGNAL = 1.6; EXPRESSED IN HEART, SIGNAL = 1.4; EXPRESSED IN BRAIN, SIGNAL = 1.5; EXPRESSED IN BONE MARROW, SIGNAL =   2; EXPRESSED IN LUNG, SIGNAL = 1.6; SWISSPROT HIT: P33955, EVALUE 4.10e+00; EST_HUMAN HIT: T03078.1, EVALUE 2.00e-48
KTGKIESLHVAFTEDETTSIKMDRTRFPDVLRNQSLTPINIQNIFLDHCVQERVTAISSPQKSTKHVREQIPDTATGSIFFPHCNSASTRIFGKQTNKMESSRKFKTMKDV

SEQ ID NO: 41565 - protein, 64 aa, Homo sapiens
  MAP TO AC013593.3; EXPRESSED IN LUNG, SIGNAL = 1.5; EXPRESSED IN PLACENTA, SIGNAL = 1.5; EXPRESSED IN ADULT LIVER, SIGNAL = 1.5; EXPRESSED IN HEART, SIGNAL = 1.4; EXPRESSED IN BRAIN, SIGNAL = 1.3; EXPRESSED IN BONE MARROW, SIGNAL = 1.4; EXPRESSED IN FETAL LIVER, SIGNAL =   1; SWISSPROT HIT: O05942, EVALUE 4.00e-01; EST_HUMAN HIT: AV709766.1, EVALUE 8.00e-29
DILYLHNSLEEVNSALVGYQRQNDLKLEGMNETVSNLTQRVNLIESDVVAMSKVEKKANLSFSM

SEQ ID NO: 41566 - protein, 58 aa, Homo sapiens
  MAP TO AL136984.7; EXPRESSED IN LUNG, SIGNAL = 5.8; EXPRESSED IN PLACENTA, SIGNAL = 5.4; EXPRESSED IN FETAL LIVER, SIGNAL = 4.1; EXPRESSED IN ADULT LIVER, SIGNAL = 4.9; EXPRESSED IN HEART, SIGNAL = 4.9; EXPRESSED IN BRAIN, SIGNAL = 4.4; EXPRESSED IN BONE MARROW, SIGNAL = 4.3; EST_HUMAN HIT: W23062.1, EVALUE 6.30e-02
LTTTWKLPRLTTCPIWSSSLRRIWAPFSHKEFSFSWPQASTFYALPIMSGRSVAVVGK

SEQ ID NO: 41567 - protein, 52 aa, Homo sapiens
  MAP TO AC025812.4; EXPRESSED IN PLACENTA, SIGNAL = 0.64; EXPRESSED IN ADULT LIVER, SIGNAL = 0.82; EXPRESSED IN HEART, SIGNAL = 1.5; EXPRESSED IN BRAIN, SIGNAL = 0.59; EXPRESSED IN BONE MARROW, SIGNAL = 0.68; EXPRESSED IN FETAL LIVER, SIGNAL = 0.63
TRVRKTQQTMVKRIYVNSTSQEVKIKNISPLSQYIPHYFTGDFSPNLFEETK

SEQ ID NO: 41568 - protein, 62 aa, Homo sapiens
  MAP TO AL161450.2; EXPRESSED IN PLACENTA, SIGNAL = 1.9; EXPRESSED IN ADULT LIVER, SIGNAL =   2; EXPRESSED IN HEART, SIGNAL = 1.8; EXPRESSED IN FETAL LIVER, SIGNAL = 1.7; EXPRESSED IN BRAIN, SIGNAL = 1.5; EXPRESSED IN HELA, SIGNAL = 2.7; EXPRESSED IN LUNG, SIGNAL = 2.1; EXPRESSED IN BONE MARROW, SIGNAL =   2; SWISSPROT HIT: O60674, EVALUE 5.00e-33; EST_HUMAN HIT: AI905997.1, EVALUE 9.00e-05
RENVIEYKHCLITKNENEEYNLSGTKKNFSSLKDLLNCYQMETVRSDNIIFQFTKCCPPKPK

SEQ ID NO: 41569 - protein, 26 aa, Homo sapiens
  MAP TO AC022637.3; EXPRESSED IN LUNG, SIGNAL = 1.7; EXPRESSED IN PLACENTA, SIGNAL = 1.6; EXPRESSED IN HEART, SIGNAL = 1.7; EXPRESSED IN FETAL LIVER, SIGNAL = 1.6; EXPRESSED IN BRAIN, SIGNAL = 1.9; EXPRESSED IN BONE MARROW, SIGNAL = 1.8; EXPRESSED IN ADULT LIVER, SIGNAL = 1.6
TPVYHMDNIMLIRPDGQEMESILETL

SEQ ID NO: 41570 - protein, 48 aa, Homo sapiens
  MAP TO AL135924.5; EXPRESSED IN LUNG, SIGNAL = 1.8; EXPRESSED IN ADULT LIVER, SIGNAL = 1.1; EXPRESSED IN BRAIN, SIGNAL = 1.7; EXPRESSED IN BONE MARROW, SIGNAL = 1.5; EXPRESSED IN PLACENTA, SIGNAL = 1.1; EXPRESSED IN HEART, SIGNAL = 1.3; EXPRESSED IN FETAL LIVER, SIGNAL = 2.3; SWISSPROT HIT: Q58558, EVALUE 8.10e+00; EST_HUMAN HIT: AA737626.1, EVALUE 1.00e-23
FDCRCGNLFCGLHRYSDKHNCPYDYKAEAAAKIRKENPVVVAEKIQRI

SEQ ID NO: 41571 - protein, 49 aa, Homo sapiens
  MAP TO AL135924.5; EXPRESSED IN LUNG, SIGNAL = 1.8; EXPRESSED IN ADULT LIVER, SIGNAL = 1.1; EXPRESSED IN BRAIN, SIGNAL = 1.7; EXPRESSED IN BONE MARROW, SIGNAL = 1.5; EXPRESSED IN PLACENTA, SIGNAL = 1.1; EXPRESSED IN HEART, SIGNAL = 1.3; EXPRESSED IN FETAL LIVER, SIGNAL = 2.3; EST_HUMAN HIT: AA278973.1, EVALUE 4.00e-21
GLTADVEICFVDFTVTLTSTTVRMITKQKLQQKSEKRIQLLWLKKFREY

SEQ ID NO: 41572 - protein, 26 aa, Homo sapiens
  MAP TO AC025443.2; EXPRESSED IN PLACENTA, SIGNAL = 1.6; EXPRESSED IN ADULT LIVER, SIGNAL = 1.7; EXPRESSED IN BRAIN, SIGNAL = 1.3; EXPRESSED IN BONE MARROW, SIGNAL = 1.2; EXPRESSED IN LUNG, SIGNAL = 1.5; EXPRESSED IN HEART, SIGNAL = 1.5; EXPRESSED IN FETAL LIVER, SIGNAL = 1.2
KAEAHCGTLKEHGVVFIPQFINGQGE

SEQ ID NO: 41573 - protein, 20 aa, Homo sapiens
  MAP TO AC025443.2; EXPRESSED IN PLACENTA, SIGNAL = 1.6; EXPRESSED IN ADULT LIVER, SIGNAL = 1.7; EXPRESSED IN BRAIN, SIGNAL = 1.3; EXPRESSED IN BONE MARROW, SIGNAL = 1.2; EXPRESSED IN LUNG, SIGNAL = 1.5; EXPRESSED IN HEART, SIGNAL = 1.5; EXPRESSED IN FETAL LIVER, SIGNAL = 1.2
KQRLIVEPSRSMGSSSSLSL

SEQ ID NO: 41574 - protein, 26 aa, Homo sapiens
  MAP TO AC016212.3; EXPRESSED IN BONE MARROW, SIGNAL = 1.2; EXPRESSED IN ADULT LIVER, SIGNAL = 1.1; EXPRESSED IN LUNG, SIGNAL = 1.4; EXPRESSED IN PLACENTA, SIGNAL = 0.93; EXPRESSED IN HEART, SIGNAL = 1.3; EXPRESSED IN FETAL LIVER, SIGNAL = 1.2; EXPRESSED IN BRAIN, SIGNAL = 1.2; EST_HUMAN HIT: BE395444.1, EVALUE 6.10e+00
PLWDFGLPVPFYCWRGREEGRCLLPQ

SEQ ID NO: 41575 - protein, 26 aa, Homo sapiens
  MAP TO AC016212.3; EXPRESSED IN BONE MARROW, SIGNAL = 1.2; EXPRESSED IN ADULT LIVER, SIGNAL = 1.1; EXPRESSED IN LUNG, SIGNAL = 1.4; EXPRESSED IN PLACENTA, SIGNAL = 0.93; EXPRESSED IN HEART, SIGNAL = 1.3; EXPRESSED IN FETAL LIVER, SIGNAL = 1.2; EXPRESSED IN BRAIN, SIGNAL = 1.2
LWEQTPSLFPSPPAIERHRQPEVPEG

SEQ ID NO: 41576 - protein, 46 aa, Homo sapiens
  MAP TO AL133324.7; EXPRESSED IN LUNG, SIGNAL = 1.5; EXPRESSED IN PLACENTA, SIGNAL = 1.3; EXPRESSED IN ADULT LIVER, SIGNAL = 1.2; EXPRESSED IN HEART, SIGNAL = 1.3; EXPRESSED IN FETAL LIVER, SIGNAL = 1.5; EXPRESSED IN BRAIN, SIGNAL = 1.2; EXPRESSED IN BONE MARROW, SIGNAL = 1.1; SWISSPROT HIT: P48637, EVALUE 3.00e-20; EST_HUMAN HIT: BE887048.1, EVALUE 4.00e-19
TVFLGLNRSDYMFQRSADGSPALKQIEINTISASFGGLASRTPAVH

SEQ ID NO: 41577 - protein, 50 aa, Homo sapiens
  MAP TO AC019221.3; EXPRESSED IN ADULT LIVER, SIGNAL = 0.85; EXPRESSED IN PLACENTA, SIGNAL = 0.7; EXPRESSED IN HEART, SIGNAL = 1.2; EXPRESSED IN FETAL LIVER, SIGNAL = 0.93; EXPRESSED IN BONE MARROW, SIGNAL = 1.1; EXPRESSED IN LUNG, SIGNAL = 0.88; EXPRESSED IN BRAIN, SIGNAL = 0.95; SWISSPROT HIT: Q16760, EVALUE 3.00e-24; EST_HUMAN HIT: AA573922.1, EVALUE 1.00e-23
AFESTLKSWEDKQKCELPRPPSCSLHPEMLSEEEATQMDQFGQAAGVLIH

SEQ ID NO: 41578 - protein, 42 aa, Homo sapiens
  MAP TO AC021880.2; EXPRESSED IN LUNG, SIGNAL = 3.8; EXPRESSED IN PLACENTA, SIGNAL = 2.9; EXPRESSED IN HEART, SIGNAL = 3.1; EXPRESSED IN FETAL LIVER, SIGNAL = 3.4; EXPRESSED IN BRAIN, SIGNAL = 3.1; EXPRESSED IN BONE MARROW, SIGNAL = 3.8; EXPRESSED IN ADULT LIVER, SIGNAL = 3.9; EXPRESSED IN HELA, SIGNAL = 4.8
MTVMVTVTVTVMVMVMVMVMVTVMVTVTVMVTVMVTAEMTVM

SEQ ID NO: 41579 - protein, 46 aa, Homo sapiens
  MAP TO AC011666.18; EXPRESSED IN ADULT LIVER, SIGNAL = 1.2; EXPRESSED IN HEART, SIGNAL = 1.3; EXPRESSED IN LUNG, SIGNAL = 1.4; EXPRESSED IN PLACENTA, SIGNAL = 1.1; EXPRESSED IN FETAL LIVER, SIGNAL = 1.7; EXPRESSED IN BRAIN, SIGNAL = 1.2; EXPRESSED IN BONE MARROW, SIGNAL = 7.1; EST_HUMAN HIT: AV715719.1, EVALUE 1.00e-19; SWISSPROT HIT: P80511, EVALUE 1.00e-20
MTKLEEHLEGIVNIFHQYSVRKGHFDTLSKGELKQLLTKELANTIK

SEQ ID NO: 41580 - protein, 62 aa, Homo sapiens
  MAP TO AC013550.4; EXPRESSED IN HEART, SIGNAL =   2; EXPRESSED IN PLACENTA, SIGNAL = 0.67; EXPRESSED IN BONE MARROW, SIGNAL = 0.43; SWISSPROT HIT: P54296, EVALUE 2.00e-34; EST_HUMAN HIT: AA933991.1, EVALUE 3.00e-07
VPSHPYGITLLNCDGHSMTLGWKVPKFSGGSPILGYYLDKREVHHKNWHEVNSSPSKPTILT

SEQ ID NO: 41581 - protein, 18 aa, Homo sapiens
  MAP TO AC013550.4; EXPRESSED IN HEART, SIGNAL =   2; EXPRESSED IN PLACENTA, SIGNAL = 0.67; EXPRESSED IN BONE MARROW, SIGNAL = 0.43
PSRPILMGLRSSTVTATP

SEQ ID NO: 41582 - protein, 34 aa, Homo sapiens
  MAP TO AC021811.2; EXPRESSED IN ADULT LIVER, SIGNAL = 1.9; EXPRESSED IN HEART, SIGNAL = 1.7; EXPRESSED IN BRAIN, SIGNAL = 1.8; EXPRESSED IN LUNG, SIGNAL = 1.5; EXPRESSED IN PLACENTA, SIGNAL = 1.6; EXPRESSED IN FETAL LIVER, SIGNAL = 1.7; EXPRESSED IN BONE MARROW, SIGNAL = 1.5; SWISSPROT HIT: Q99081, EVALUE 3.00e-15; EST_HUMAN HIT: AV682474.1, EVALUE 4.00e-14
GFTDSPHYSDHLNDSRLGAHEGLSPTPFMNSNLM

SEQ ID NO: 41583 - protein, 29 aa, Homo sapiens
  MAP TO AL109976.21; EXPRESSED IN LUNG, SIGNAL = 1.3; EXPRESSED IN PLACENTA, SIGNAL =   1; EXPRESSED IN FETAL LIVER, SIGNAL = 2.1; EXPRESSED IN HEART, SIGNAL = 1.4; EXPRESSED IN ADULT LIVER, SIGNAL = 1.1; EXPRESSED IN BRAIN, SIGNAL = 1.2; EXPRESSED IN BONE MARROW, SIGNAL = 1.4; EST_HUMAN HIT: AL049110.1, EVALUE 4.00e-09
VFSLWKQQDNSGISLKVIQEDGLSVEQKR

SEQ ID NO: 41584 - protein, 72 aa, Homo sapiens
  MAP TO AL162387.2; EXPRESSED IN ADULT LIVER, SIGNAL = 1.7; EXPRESSED IN BRAIN, SIGNAL = 1.7; EXPRESSED IN HELA, SIGNAL = 2.4; EXPRESSED IN HEART, SIGNAL = 1.9; EXPRESSED IN BONE MARROW, SIGNAL = 1.7; EXPRESSED IN LUNG, SIGNAL = 1.9; EXPRESSED IN PLACENTA, SIGNAL = 1.8; EXPRESSED IN FETAL LIVER, SIGNAL =   2; SWISSPROT HIT: P06444, EVALUE 6.10e-01; EST_HUMAN HIT: BE540397.1, EVALUE 3.30e-02
MGVTAEGWGGTKPWSCANVMGGSLTAASASGPTDHGLGTTPPWRALGDLQAWGDGEPSRSPIRGTAPTLPWA

SEQ ID NO: 41585 - protein, 63 aa, Homo sapiens
  MAP TO AL121771.17; EXPRESSED IN ADULT LIVER, SIGNAL = 4.1; EXPRESSED IN BRAIN, SIGNAL = 4.5; EXPRESSED IN LUNG, SIGNAL =   5; EXPRESSED IN HELA, SIGNAL = 4.7; EXPRESSED IN PLACENTA, SIGNAL = 4.5; EXPRESSED IN HEART, SIGNAL = 4.5; EXPRESSED IN FETAL LIVER, SIGNAL =   5; EXPRESSED IN BONE MARROW, SIGNAL = 5.1; EST_HUMAN HIT: AU130765.1, EVALUE 1.00e-30; SWISSPROT HIT: Q22712, EVALUE 1.50e+00
GTTVLVELTPDIHICGICKQQFNNLDAFVAHKQSGCQLTGTSAAAPSTVQFVSEETVPATQTQ

SEQ ID NO: 41586 - protein, 33 aa, Homo sapiens
  MAP TO AL162458.1; EXPRESSED IN ADULT LIVER, SIGNAL = 1.7; EXPRESSED IN BRAIN, SIGNAL =   2; EXPRESSED IN LUNG, SIGNAL =   2; EXPRESSED IN HELA, SIGNAL = 2.2; EXPRESSED IN PLACENTA, SIGNAL =   2; EXPRESSED IN HEART, SIGNAL = 1.9; EXPRESSED IN FETAL LIVER, SIGNAL =   2; EXPRESSED IN BONE MARROW, SIGNAL =   2; EST_HUMAN HIT: AA559203.1, EVALUE 9.00e-05; SWISSPROT HIT: P52746, EVALUE 2.90e+00
DLRFHVNSHEAGDPQLFKCLQCSYRSRRWSSLK

SEQ ID NO: 41587 - protein, 61 aa, Homo sapiens
  MAP TO AL162458.1; EXPRESSED IN ADULT LIVER, SIGNAL = 1.7; EXPRESSED IN BRAIN, SIGNAL =   2; EXPRESSED IN LUNG, SIGNAL =   2; EXPRESSED IN HELA, SIGNAL = 2.2; EXPRESSED IN PLACENTA, SIGNAL =   2; EXPRESSED IN HEART, SIGNAL = 1.9; EXPRESSED IN FETAL LIVER, SIGNAL =   2; EXPRESSED IN BONE MARROW, SIGNAL =   2; EST_HUMAN HIT: AA559203.1, EVALUE 6.00e-09
GPSCAASVVLAFCPTRTCASTSTPMRLAIPSSSSACSAAIVPAAGPRSRCGSQRGLGLMGG

SEQ ID NO: 41588 - protein, 56 aa, Homo sapiens
  MAP TO AL136438.8; EXPRESSED IN PLACENTA, SIGNAL = 9.7; EXPRESSED IN ADULT LIVER, SIGNAL =  13; EXPRESSED IN FETAL LIVER, SIGNAL = 8.8; EXPRESSED IN BRAIN, SIGNAL = 9.2; EXPRESSED IN BONE MARROW, SIGNAL = 5.9; EXPRESSED IN LUNG, SIGNAL =   7; EXPRESSED IN HELA, SIGNAL =   5; EXPRESSED IN HEART, SIGNAL =  15; EST_HUMAN HIT: BF092680.1, EVALUE 5.00e-15; SWISSPROT HIT: P98200, EVALUE 1.00e-25
KSEIVDVVKKRVKAITLAIGDGANDVGMIQTAHVGVGISGNEGMQATNNSDYAIAQ

SEQ ID NO: 41589 - protein, 53 aa, Homo sapiens
  MAP TO AL139296.2; EXPRESSED IN LUNG, SIGNAL =   3; EXPRESSED IN PLACENTA, SIGNAL = 2.9; EXPRESSED IN HELA, SIGNAL = 3.7; EXPRESSED IN HEART, SIGNAL = 2.7; EXPRESSED IN FETAL LIVER, SIGNAL = 2.8; EXPRESSED IN ADULT LIVER, SIGNAL =   3; EXPRESSED IN BRAIN, SIGNAL = 2.9; EXPRESSED IN BONE MARROW, SIGNAL = 2.9; EST_HUMAN HIT: AI360153.1, EVALUE 1.00e-21; SWISSPROT HIT: Q24119, EVALUE 5.00e-21
LQALRKEKSRDAARSRRGKENFEFYELAKLLPLPAAITSQLDKASIIRLTISY

SEQ ID NO: 41590 - protein, 22 aa, Homo sapiens
  MAP TO AL139296.2; EXPRESSED IN LUNG, SIGNAL =   3; EXPRESSED IN PLACENTA, SIGNAL = 2.9; EXPRESSED IN HELA, SIGNAL = 3.7; EXPRESSED IN HEART, SIGNAL = 2.7; EXPRESSED IN FETAL LIVER, SIGNAL = 2.8; EXPRESSED IN ADULT LIVER, SIGNAL =   3; EXPRESSED IN BRAIN, SIGNAL = 2.9; EXPRESSED IN BONE MARROW, SIGNAL = 2.9; EST_HUMAN HIT: AI360153.1, EVALUE 3.00e-06
FTSIEKGEIPRCCSLPPGKRKL

SEQ ID NO: 41591 - protein, 27 aa, Homo sapiens
  MAP TO AC019221.3; EXPRESSED IN LUNG, SIGNAL = 1.8; EXPRESSED IN ADULT LIVER, SIGNAL = 1.8; EXPRESSED IN BRAIN, SIGNAL = 1.7; EXPRESSED IN BONE MARROW, SIGNAL = 1.7; EXPRESSED IN PLACENTA, SIGNAL = 1.7; EXPRESSED IN HEART, SIGNAL = 1.7; EXPRESSED IN FETAL LIVER, SIGNAL =   2; EST_HUMAN HIT: AI247442.1, EVALUE 3.00e-06; SWISSPROT HIT: Q16760, EVALUE 2.00e-08
SIIFDEVDLTDASVAESSTKNVNNSFT

SEQ ID NO: 41592 - protein, 56 aa, Homo sapiens
  MAP TO AL121903.13; EXPRESSED IN ADULT LIVER, SIGNAL = 2.5; EXPRESSED IN HELA, SIGNAL = 2.5; EXPRESSED IN BRAIN, SIGNAL = 2.5; EXPRESSED IN LUNG, SIGNAL = 2.7; EXPRESSED IN HEART, SIGNAL = 2.5; EXPRESSED IN BONE MARROW, SIGNAL = 2.5; EXPRESSED IN PLACENTA, SIGNAL = 6.4; EXPRESSED IN FETAL LIVER, SIGNAL = 2.5; EST_HUMAN HIT: AW878615.1, EVALUE 5.00e-17
QKLFASLLIKCVVQLELIQTIDNIVFYPATSKKEDAEHMVAAQVRTGGLRKSIPVH

SEQ ID NO: 41593 - protein, 81 aa, Homo sapiens
  MAP TO AC017086.3; EXPRESSED IN LUNG, SIGNAL = 2.2; EXPRESSED IN HEART, SIGNAL = 2.3; EXPRESSED IN PLACENTA, SIGNAL = 2.2; EXPRESSED IN FETAL LIVER, SIGNAL = 2.7; EXPRESSED IN ADULT LIVER, SIGNAL = 2.4; EXPRESSED IN HELA, SIGNAL = 2.5; EXPRESSED IN BRAIN, SIGNAL = 2.5; EXPRESSED IN BONE MARROW, SIGNAL = 2.6; EST_HUMAN HIT: BF436218.1, EVALUE 2.00e-41; SWISSPROT HIT: P37703, EVALUE 9.10e+00
VDLSCDKAEKTLSYYQARLLSLRMKTCTQAASHSGMAATHQKAVKIIAYKNGDGYRNGKLIVAGTFPMVSGYHLNAACIFR

SEQ ID NO: 41594 - protein, 77 aa, Homo sapiens
  MAP TO AL161646.3; EXPRESSED IN ADULT LIVER, SIGNAL = 2.5; EXPRESSED IN HELA, SIGNAL = 3.2; EXPRESSED IN BRAIN, SIGNAL = 3.1; EXPRESSED IN BONE MARROW, SIGNAL = 3.1; EXPRESSED IN LUNG, SIGNAL = 2.7; EXPRESSED IN PLACENTA, SIGNAL = 2.6; EXPRESSED IN HEART, SIGNAL = 2.9; EXPRESSED IN FETAL LIVER, SIGNAL =   3; SWISSPROT HIT: P71067, EVALUE 7.80e+00; EST_HUMAN HIT: BE141796.1, EVALUE 8.30e+00
LLQEMTWLDSQDPPLAHVAGILADLGPALAWKEWNLIFKGDMNRKKKKISLLRRREYGKGHILGRIYRAVSLEDTGT

SEQ ID NO: 41595 - protein, 30 aa, Homo sapiens
  MAP TO AC021782.2; EXPRESSED IN LUNG, SIGNAL = 2.8; EXPRESSED IN PLACENTA, SIGNAL = 2.4; EXPRESSED IN ADULT LIVER, SIGNAL = 1.9; EXPRESSED IN HELA, SIGNAL = 3.5; EXPRESSED IN BRAIN, SIGNAL = 3.9; EXPRESSED IN BONE MARROW, SIGNAL = 4.5; EXPRESSED IN HEART, SIGNAL =   4; EXPRESSED IN FETAL LIVER, SIGNAL = 4.6
SSSSSSSSSSSSSSSSSRETNAAALPKGIF

SEQ ID NO: 41596 - protein, 29 aa, Homo sapiens
  MAP TO AC025588.1; EXPRESSED IN HELA, SIGNAL = 7.5; EXPRESSED IN BONE MARROW, SIGNAL = 7.7; EXPRESSED IN LUNG, SIGNAL = 3.5; EXPRESSED IN ADULT LIVER, SIGNAL = 3.8; EXPRESSED IN HEART, SIGNAL = 3.7; EXPRESSED IN BRAIN, SIGNAL = 3.7; EXPRESSED IN PLACENTA, SIGNAL =   2; EXPRESSED IN FETAL LIVER, SIGNAL = 8.8; EST_HUMAN HIT: AI289421.1, EVALUE 1.60e-02; SWISSPROT HIT: Q29375, EVALUE 1.70e-02
FTHSKKAQLMVTACDMDPSKLSVFLPALD

SEQ ID NO: 41597 - protein, 65 aa, Homo sapiens
  MAP TO AC012405.4; EXPRESSED IN ADULT LIVER, SIGNAL = 1.9; EXPRESSED IN BRAIN, SIGNAL = 1.5; EXPRESSED IN LUNG, SIGNAL = 2.1; EXPRESSED IN PLACENTA, SIGNAL =   2; EXPRESSED IN HELA, SIGNAL = 2.8; EXPRESSED IN BONE MARROW, SIGNAL = 1.7; EXPRESSED IN HEART, SIGNAL = 1.7; EXPRESSED IN FETAL LIVER, SIGNAL = 1.5; EST_HUMAN HIT: BE903321.1, EVALUE 7.50e+00; SWISSPROT HIT: P43121, EVALUE 3.20e+00
KELKYTLLMFLIMISLNYHSCPFITICKKNHHLEMNMAKRRTFIVCFPAFYPLPKKWMETDDEEK

SEQ ID NO: 41598 - protein, 61 aa, Homo sapiens; identical to SEQ ID NO: 40542
  MAP TO AC007325.51; EXPRESSED IN HELA, SIGNAL = 3.1; EXPRESSED IN BONE MARROW, SIGNAL =   3; EXPRESSED IN LUNG, SIGNAL = 2.8; EXPRESSED IN PLACENTA, SIGNAL = 3.3; EXPRESSED IN HEART, SIGNAL = 2.9; EXPRESSED IN FETAL LIVER, SIGNAL = 3.5; EXPRESSED IN ADULT LIVER, SIGNAL = 3.2; EXPRESSED IN BRAIN, SIGNAL = 3.7; EST_HUMAN HIT: AI905037.1, EVALUE 3.00e-09; SWISSPROT HIT: O43272, EVALUE 3.00e-10

SEQ ID NO: 41599 - protein, 43 aa, Homo sapiens
  MAP TO AC007325.51; EXPRESSED IN HELA, SIGNAL = 3.1; EXPRESSED IN BONE MARROW, SIGNAL =   3; EXPRESSED IN LUNG, SIGNAL = 2.8; EXPRESSED IN PLACENTA, SIGNAL = 3.3; EXPRESSED IN HEART, SIGNAL = 2.9; EXPRESSED IN FETAL LIVER, SIGNAL = 3.5; EXPRESSED IN ADULT LIVER, SIGNAL = 3.2; EXPRESSED IN BRAIN, SIGNAL = 3.7; SWISSPROT HIT: Q51792, EVALUE 4.80e+00; EST_HUMAN HIT: R88591.1, EVALUE 4.00e-18
LPPCRPGRLPRVQVRALWPRDGGAALLVPPCPGEQQPHEGHPS

SEQ ID NO: 41600 - protein, 75 aa, Homo sapiens
  MAP TO AC010474.2; EXPRESSED IN LUNG, SIGNAL = 4.6; EXPRESSED IN PLACENTA, SIGNAL = 3.1; EXPRESSED IN HEART, SIGNAL = 3.6; EXPRESSED IN FETAL LIVER, SIGNAL = 3.5; EXPRESSED IN ADULT LIVER, SIGNAL = 3.8; EXPRESSED IN HELA, SIGNAL = 5.3; EXPRESSED IN BRAIN, SIGNAL = 2.7; EXPRESSED IN BONE MARROW, SIGNAL =   5; EST_HUMAN HIT: BE563508.1, EVALUE 1.00e-26; SWISSPROT HIT: P26038, EVALUE 1.00e-27
PAENEQDEQDENGAEASADLRADAMAKDRSEEECNTEAEKNERVQKHLKAPTSELASARDESKKTANDMIHAENM

SEQ ID NO: 41601 - protein, 30 aa, Homo sapiens
  MAP TO AC022206.2; EXPRESSED IN LUNG, SIGNAL = 5.4; EXPRESSED IN PLACENTA, SIGNAL = 5.6; EXPRESSED IN HEART, SIGNAL = 5.5; EXPRESSED IN FETAL LIVER, SIGNAL = 5.9; EXPRESSED IN BRAIN, SIGNAL = 5.5; EXPRESSED IN ADULT LIVER, SIGNAL = 4.9; EXPRESSED IN HELA, SIGNAL = 6.1; EXPRESSED IN BONE MARROW, SIGNAL = 5.4
VVRIGKLEPNCTDTKLTKGDKTSTDKTVVV

SEQ ID NO: 41602 - protein, 73 aa, Homo sapiens
  MAP TO AC015525.3; EXPRESSED IN ADULT LIVER, SIGNAL = 5.1; EXPRESSED IN BONE MARROW, SIGNAL =  18; EXPRESSED IN PLACENTA, SIGNAL = 2.9; EXPRESSED IN HELA, SIGNAL =  13; EXPRESSED IN HEART, SIGNAL = 6.1; EXPRESSED IN FETAL LIVER, SIGNAL =  21; EXPRESSED IN LUNG, SIGNAL = 5.5; EXPRESSED IN BRAIN, SIGNAL = 8.8; EST_HUMAN HIT: BE514193.1, EVALUE 1.00e-36
TQPKNDMPSVLPWLPQPYQHWSCLKVIVLRKFLNFLWYLKIKLKATRRPRKLFCSLRNLKPGMISKRSMPLSE

SEQ ID NO: 41603 - protein, 28 aa, Homo sapiens
  MAP TO AC008506.4; EXPRESSED IN LUNG, SIGNAL =  20; EXPRESSED IN ADULT LIVER, SIGNAL =  22; EXPRESSED IN HEART, SIGNAL =  17; EXPRESSED IN BRAIN, SIGNAL =  16; EXPRESSED IN FETAL LIVER, SIGNAL =  20; EXPRESSED IN PLACENTA, SIGNAL =  20; EXPRESSED IN HELA, SIGNAL =  32; EXPRESSED IN BONE MARROW, SIGNAL =  20
GELCNRHNYSAYRSNTALQTLEISDSRG

SEQ ID NO: 41604 - protein, 28 aa, Homo sapiens
  MAP TO AC008506.4; EXPRESSED IN LUNG, SIGNAL =  20; EXPRESSED IN ADULT LIVER, SIGNAL =  22; EXPRESSED IN HEART, SIGNAL =  17; EXPRESSED IN BRAIN, SIGNAL =  16; EXPRESSED IN FETAL LIVER, SIGNAL =  20; EXPRESSED IN PLACENTA, SIGNAL =  20; EXPRESSED IN HELA, SIGNAL =  32; EXPRESSED IN BONE MARROW, SIGNAL =  20
VNYAIGIITVPIVQIRLCRHWKFLTAEE

SEQ ID NO: 41605 - protein, 50 aa, Homo sapiens
  MAP TO AC027273.2; EXPRESSED IN ADULT LIVER, SIGNAL = 8.8; EXPRESSED IN HELA, SIGNAL = 8.5; EXPRESSED IN HEART, SIGNAL = 7.9; EXPRESSED IN BRAIN, SIGNAL =  11; EXPRESSED IN BONE MARROW, SIGNAL = 9.1; EXPRESSED IN LUNG, SIGNAL = 7.7; EXPRESSED IN PLACENTA, SIGNAL = 6.9; EXPRESSED IN FETAL LIVER, SIGNAL =  10; EST_HUMAN HIT: BE161049.1, EVALUE 4.00e-15
GFVVSLTSGVKLQTFAVLQFIKVVWTQRVSSSKIYCEERNNKASTARKGT

SEQ ID NO: 41606 - protein, 37 aa, Homo sapiens
  MAP TO AC007956.5; EXPRESSED IN BONE MARROW, SIGNAL = 1.6; EXPRESSED IN LUNG, SIGNAL = 1.6; EXPRESSED IN BRAIN, SIGNAL = 1.4; EXPRESSED IN HEART, SIGNAL = 1.5; EXPRESSED IN HELA, SIGNAL = 2.4; EXPRESSED IN ADULT LIVER, SIGNAL = 1.6; EXPRESSED IN PLACENTA, SIGNAL = 1.4; EXPRESSED IN FETAL LIVER, SIGNAL = 1.6; EST_HUMAN HIT: AA055870.1, EVALUE 8.00e-16; SWISSPROT HIT: P53119, EVALUE 2.20e+00
VHPNPNRPAHLRLKMYEFAGRLVGKCLYESSLGGAYK

SEQ ID NO: 41607 - protein, 47 aa, Homo sapiens
  MAP TO AL135844.8; EXPRESSED IN FETAL LIVER, SIGNAL = 1.4; EXPRESSED IN BONE MARROW, SIGNAL = 1.5; EXPRESSED IN LUNG, SIGNAL = 1.7; EXPRESSED IN PLACENTA, SIGNAL = 1.8; EXPRESSED IN ADULT LIVER, SIGNAL = 1.8; EXPRESSED IN HEART, SIGNAL = 1.3; EXPRESSED IN BRAIN, SIGNAL = 1.4; EST_HUMAN HIT: BE410790.1, EVALUE 2.00e-20; SWISSPROT HIT: P38888, EVALUE 8.00e-04
VGNHIDVLTGKWVAQDAGIGAGVDSYFEYLVKGAILLQDKKLMAMFL

SEQ ID NO: 41608 - protein, 48 aa, Homo sapiens
  MAP TO AC022562.3; EXPRESSED IN PLACENTA, SIGNAL = 0.97; EXPRESSED IN BONE MARROW, SIGNAL = 0.82; EXPRESSED IN ADULT LIVER, SIGNAL = 0.7; EXPRESSED IN HEART, SIGNAL =   2; EXPRESSED IN FETAL LIVER, SIGNAL = 0.51; EXPRESSED IN LUNG, SIGNAL =   1; EXPRESSED IN BRAIN, SIGNAL = 1.2; EST_HUMAN HIT: AU129526.1, EVALUE 7.00e-04
DCISLGSGEPNRSSYHSFVLYHSNSPRWGEIIKLPIPIDRFRGSHLRF

SEQ ID NO: 41609 - protein, 48 aa, Homo sapiens
  MAP TO AC022562.3; EXPRESSED IN PLACENTA, SIGNAL = 0.97; EXPRESSED IN BONE MARROW, SIGNAL = 0.82; EXPRESSED IN ADULT LIVER, SIGNAL = 0.7; EXPRESSED IN HEART, SIGNAL =   2; EXPRESSED IN FETAL LIVER, SIGNAL = 0.51; EXPRESSED IN LUNG, SIGNAL =   1; EXPRESSED IN BRAIN, SIGNAL = 1.2; EST_HUMAN HIT: F32204.1, EVALUE 1.30e+00; SWISSPROT HIT: P49015, EVALUE 8.10e+00
IASAWVQESQIGVPTTPLSSTTVIVLAGEKLSNCLSPLTGSGAPTCAL

SEQ ID NO: 41610 - protein, 44 aa, Homo sapiens
  MAP TO AC013396.4; EXPRESSED IN LUNG, SIGNAL =  25; EXPRESSED IN ADULT LIVER, SIGNAL =  25; EXPRESSED IN HELA, SIGNAL =  16; EXPRESSED IN HEART, SIGNAL =  25; EXPRESSED IN FETAL LIVER, SIGNAL =  24; EXPRESSED IN BRAIN, SIGNAL =  25; EXPRESSED IN PLACENTA, SIGNAL =  26; EXPRESSED IN BONE MARROW, SIGNAL =  26; EST_HUMAN HIT: BF529800.1, EVALUE 1.40e+00
CRSSSVPYAVIVVSSPISSTVDIFTASKPGITYYVCPTWLTPSG

SEQ ID NO: 41611 - protein, 40 aa, Homo sapiens
  MAP TO AC013396.4; EXPRESSED IN LUNG, SIGNAL =  25; EXPRESSED IN ADULT LIVER, SIGNAL =  25; EXPRESSED IN HELA, SIGNAL =  16; EXPRESSED IN HEART, SIGNAL =  25; EXPRESSED IN FETAL LIVER, SIGNAL =  24; EXPRESSED IN BRAIN, SIGNAL =  25; EXPRESSED IN PLACENTA, SIGNAL =  26; EXPRESSED IN BONE MARROW, SIGNAL =  26; EST_HUMAN HIT: BF671276.1, EVALUE 5.50e+00
DVGPAVCRMLSLWFPVPSPPLWTFLLLANQVSPTMFALLG

SEQ ID NO: 41612 - protein, 42 aa, Homo sapiens
  MAP TO AC013593.3; EXPRESSED IN BONE MARROW, SIGNAL = 1.5; EXPRESSED IN PLACENTA, SIGNAL = 1.4; EXPRESSED IN ADULT LIVER, SIGNAL = 1.7; EXPRESSED IN HEART, SIGNAL = 1.5; EXPRESSED IN LUNG, SIGNAL = 1.8; EXPRESSED IN FETAL LIVER, SIGNAL = 1.4; EXPRESSED IN BRAIN, SIGNAL = 1.8; SWISSPROT HIT: P32086, EVALUE 9.50e-01
ESKLRKSMLKTVSGKIILMQCFSNFLTMTTIRNIFYIAIQYT

SEQ ID NO: 41613 - protein, 46 aa, Homo sapiens
  MAP TO AL160060.3; EXPRESSED IN PLACENTA, SIGNAL = 1.4; EXPRESSED IN ADULT LIVER, SIGNAL = 1.6; EXPRESSED IN FETAL LIVER, SIGNAL = 1.2; EXPRESSED IN HEART, SIGNAL = 2.5; EXPRESSED IN BRAIN, SIGNAL = 1.3; EXPRESSED IN BONE MARROW, SIGNAL = 1.7; EXPRESSED IN LUNG, SIGNAL = 1.7; EST_HUMAN HIT: AU133721.1, EVALUE 5.00e-11
EMEKSFDEQNVPKRRSRNTAVEQRLRRLQDRSLTQPITTEEVVIAA

SEQ ID NO: 41614 - protein, 46 aa, Homo sapiens
  MAP TO AL160060.3; EXPRESSED IN PLACENTA, SIGNAL = 1.4; EXPRESSED IN ADULT LIVER, SIGNAL = 1.6; EXPRESSED IN FETAL LIVER, SIGNAL = 1.2; EXPRESSED IN HEART, SIGNAL = 2.5; EXPRESSED IN BRAIN, SIGNAL = 1.3; EXPRESSED IN BONE MARROW, SIGNAL = 1.7; EXPRESSED IN LUNG, SIGNAL = 1.7; EST_HUMAN HIT: AU133721.1, EVALUE 1.00e-13; SWISSPROT HIT: Q06846, EVALUE 8.20e+00
RWKNLLMNKMFQSDAQETQLWSRGYAVCRTGPSPSPSPLKRWSSQP

SEQ ID NO: 41615 - protein, 52 aa, Homo sapiens
  MAP TO AC019101.3; EXPRESSED IN LUNG, SIGNAL = 1.6; EXPRESSED IN PLACENTA, SIGNAL = 1.1; EXPRESSED IN HEART, SIGNAL = 1.2; EXPRESSED IN FETAL LIVER, SIGNAL = 1.4; EXPRESSED IN BONE MARROW, SIGNAL = 1.9; EXPRESSED IN ADULT LIVER, SIGNAL = 1.5; EXPRESSED IN BRAIN, SIGNAL = 1.3; EST_HUMAN HIT: R65754.1, EVALUE 3.00e-03
SSLCVRLNLHLLCLWDVLVHFRLLAQNTIDLVAYKQQTLILPSLGGWKSQIQ

SEQ ID NO: 41616 - protein, 32 aa, Homo sapiens
  MAP TO AL117381.9; EXPRESSED IN BONE MARROW, SIGNAL =   2; EXPRESSED IN PLACENTA, SIGNAL = 1.4; EXPRESSED IN ADULT LIVER, SIGNAL = 1.1; EXPRESSED IN HEART, SIGNAL = 1.5; EXPRESSED IN LUNG, SIGNAL = 1.8; EXPRESSED IN FETAL LIVER, SIGNAL = 1.8; EXPRESSED IN BRAIN, SIGNAL = 1.2; EST_HUMAN HIT: F28784.1, EVALUE 2.00e-13; SWISSPROT HIT: O46587, EVALUE 4.00e-08
MNRRSNEWKTVMGCVFFFIGFAALVIWWQRVY

SEQ ID NO: 41617 - protein, 21 aa, Homo sapiens
  MAP TO AC025749.2; EXPRESSED IN PLACENTA, SIGNAL = 1.1; EXPRESSED IN ADULT LIVER, SIGNAL = 0.76; EXPRESSED IN FETAL LIVER, SIGNAL = 0.92; EXPRESSED IN BRAIN, SIGNAL = 1.3; EXPRESSED IN BONE MARROW, SIGNAL = 1.1; EXPRESSED IN LUNG, SIGNAL = 1.1; EXPRESSED IN HEART, SIGNAL = 1.4; EST_HUMAN HIT: BF525411.1, EVALUE 4.80e+00; SWISSPROT HIT: P03204, EVALUE 8.80e+00
LGSGSTQWTSRKRHPCRRPWW

SEQ ID NO: 41618 - protein, 29 aa, Homo sapiens
  MAP TO AC024252.3; EXPRESSED IN ADULT LIVER, SIGNAL = 1.4; EXPRESSED IN PLACENTA, SIGNAL = 1.7; EXPRESSED IN HEART, SIGNAL = 1.2; EXPRESSED IN FETAL LIVER, SIGNAL = 1.2; EXPRESSED IN BONE MARROW, SIGNAL = 3.9; EXPRESSED IN LUNG, SIGNAL =   2; EXPRESSED IN BRAIN, SIGNAL =   2; EST_HUMAN HIT: AW374519.1, EVALUE 8.00e-08; SWISSPROT HIT: P33241, EVALUE 6.00e-09
MAMASTKSRWETGEVQAQSAAKTPSCKMK

SEQ ID NO: 41619 - protein, 51 aa, Homo sapiens
  MAP TO AL133354.8; EXPRESSED IN LUNG, SIGNAL = 1.6; EXPRESSED IN PLACENTA, SIGNAL = 1.4; EXPRESSED IN ADULT LIVER, SIGNAL = 1.4; EXPRESSED IN FETAL LIVER, SIGNAL = 1.5; EXPRESSED IN BRAIN, SIGNAL = 1.6; EXPRESSED IN HEART, SIGNAL = 1.5; EXPRESSED IN BONE MARROW, SIGNAL = 1.7; SWISSPROT HIT: P50749, EVALUE 3.00e-25; EST_HUMAN HIT: AW897550.1, EVALUE 4.00e-24
GLKPLQEDTPQLMRTRSDVGVRRRGNVRTPSDQRRIRRHRFSINGHFYNHK

SEQ ID NO: 41620 - protein, 131 aa, Homo sapiens
  MAP TO AC018774.3; EXPRESSED IN ADULT LIVER, SIGNAL = 2.1; EXPRESSED IN BRAIN, SIGNAL = 2.8; EXPRESSED IN PLACENTA, SIGNAL = 3.4; EXPRESSED IN FETAL LIVER, SIGNAL =   3; EXPRESSED IN BONE MARROW, SIGNAL = 4.1; EXPRESSED IN LUNG, SIGNAL = 2.4; EXPRESSED IN HELA, SIGNAL = 2.9; EXPRESSED IN HEART, SIGNAL = 1.6; EST_HUMAN HIT: BE256808.1, EVALUE 2.00e-51; SWISSPROT HIT: P27345, EVALUE 2.10e+00
WHPWITVPIAKLQRSRATVLTTPSPLKDMHRPPRHMGNKAMEPMDSPLMSAIPRLRPLQSMGRPPMQLLMDSLPLVILLQLPPRHTASLSRGMALVLMIPPLLQSPPPRPPMQLNLHMALSLLIQLMGSSQ

SEQ ID NO: 41621 - protein, 37 aa, Homo sapiens
  MAP TO AC013591.3; EXPRESSED IN LUNG, SIGNAL =   1; EXPRESSED IN PLACENTA, SIGNAL =   1; EXPRESSED IN HEART, SIGNAL = 1.2; EXPRESSED IN FETAL LIVER, SIGNAL =   1; EXPRESSED IN BONE MARROW, SIGNAL = 0.92; EXPRESSED IN ADULT LIVER, SIGNAL = 1.1; EXPRESSED IN BRAIN, SIGNAL = 3.1; EST_HUMAN HIT: AI929010.1, EVALUE 2.00e-14
MPKRRDILAIVLIVLPWTLLITVWHQSTLAPLLAVHK

SEQ ID NO: 41622 - protein, 19 aa, Homo sapiens
  MAP TO AC013591.3; EXPRESSED IN LUNG, SIGNAL =   1; EXPRESSED IN PLACENTA, SIGNAL =   1; EXPRESSED IN HEART, SIGNAL = 1.2; EXPRESSED IN FETAL LIVER, SIGNAL =   1; EXPRESSED IN BONE MARROW, SIGNAL = 0.92; EXPRESSED IN ADULT LIVER, SIGNAL = 1.1; EXPRESSED IN BRAIN, SIGNAL = 3.1; EST_HUMAN HIT: AI929010.1, EVALUE 6.00e-05
VMRSRGCSQPWRCRRDGTS

SEQ ID NO: 41623 - protein, 26 aa, Homo sapiens
  MAP TO AL121884.5; EXPRESSED IN LUNG, SIGNAL = 0.92; EXPRESSED IN PLACENTA, SIGNAL =   1; EXPRESSED IN HEART, SIGNAL = 1.4; EXPRESSED IN FETAL LIVER, SIGNAL = 0.87; EXPRESSED IN BONE MARROW, SIGNAL = 0.96; EXPRESSED IN ADULT LIVER, SIGNAL = 0.72; EXPRESSED IN BRAIN, SIGNAL = 1.2
TVTFRMNYSALEINKMAFANNILGEA

SEQ ID NO: 41624 - protein, 63 aa, Homo sapiens
  MAP TO AC006159.3; EXPRESSED IN BONE MARROW, SIGNAL = 1.1; EXPRESSED IN ADULT LIVER, SIGNAL = 1.1; EXPRESSED IN BRAIN, SIGNAL = 1.2; EXPRESSED IN LUNG, SIGNAL = 2.2; EXPRESSED IN PLACENTA, SIGNAL = 1.5; EXPRESSED IN HEART, SIGNAL = 2.3; EXPRESSED IN FETAL LIVER, SIGNAL = 1.6; SWISSPROT HIT: P51636, EVALUE 3.00e-32; EST_HUMAN HIT: AA868069.1, EVALUE 3.00e-31
LGFEDVIAEPVTTHSFDKVWICSHALFEISKYVMYKFLTVFLAIPLAFIAGILFATLSCLHIW

SEQ ID NO: 41625 - protein, 55 aa, Homo sapiens
  MAP TO AC019126.3; EXPRESSED IN BONE MARROW, SIGNAL = 1.3; EXPRESSED IN PLACENTA, SIGNAL = 1.3; EXPRESSED IN ADULT LIVER, SIGNAL = 1.1; EXPRESSED IN FETAL LIVER, SIGNAL = 1.3; EXPRESSED IN BRAIN, SIGNAL = 1.1; EXPRESSED IN LUNG, SIGNAL = 1.2; EXPRESSED IN HEART, SIGNAL = 1.4; EST_HUMAN HIT: AU133814.1, EVALUE 1.00e-25; SWISSPROT HIT: P30291, EVALUE 2.00e-27
NYTHLPKADIFALALTVVCAAGAEPLPRNGDQWHEIRQGRLPRIPQVLSQEFTEL

SEQ ID NO: 41626 - protein, 22 aa, Homo sapiens
  MAP TO AC019126.3; EXPRESSED IN BONE MARROW, SIGNAL = 1.3; EXPRESSED IN PLACENTA, SIGNAL = 1.3; EXPRESSED IN ADULT LIVER, SIGNAL = 1.1; EXPRESSED IN FETAL LIVER, SIGNAL = 1.3; EXPRESSED IN BRAIN, SIGNAL = 1.1; EXPRESSED IN LUNG, SIGNAL = 1.2; EXPRESSED IN HEART, SIGNAL = 1.4; EST_HUMAN HIT: AU116898.1, EVALUE 6.00e-09
LYPSTKSRYFCACPHSGMCCWC

SEQ ID NO: 41627 - protein, 39 aa, Homo sapiens
  MAP TO AC019263.4; EXPRESSED IN BONE MARROW, SIGNAL = 5.3; EXPRESSED IN PLACENTA, SIGNAL = 5.7; EXPRESSED IN ADULT LIVER, SIGNAL = 5.7; EXPRESSED IN FETAL LIVER, SIGNAL = 3.8; EXPRESSED IN BRAIN, SIGNAL = 5.2; EXPRESSED IN LUNG, SIGNAL = 6.1; EXPRESSED IN HELA, SIGNAL = 5.1; EXPRESSED IN HEART, SIGNAL =   5
GDCILTRIQMHKEEKASFVLATPHSFLIFSASKQAFPKA

SEQ ID NO: 41628 - protein, 39 aa, Homo sapiens
  MAP TO AC019263.4; EXPRESSED IN BONE MARROW, SIGNAL = 5.3; EXPRESSED IN PLACENTA, SIGNAL = 5.7; EXPRESSED IN ADULT LIVER, SIGNAL = 5.7; EXPRESSED IN FETAL LIVER, SIGNAL = 3.8; EXPRESSED IN BRAIN, SIGNAL = 5.2; EXPRESSED IN LUNG, SIGNAL = 6.1; EXPRESSED IN HELA, SIGNAL = 5.1; EXPRESSED IN HEART, SIGNAL =   5; EST_HUMAN HIT: AA834325.1, EVALUE 3.20e+00
ETVSSHEYRCTRKKKHPLCWPLHIAFSSSVHPNRHFQKP

SEQ ID NO: 41629 - protein, 82 aa, Homo sapiens
  MAP TO AC026407.1; EXPRESSED IN HELA, SIGNAL = 2.5; EXPRESSED IN LUNG, SIGNAL = 2.2; EXPRESSED IN PLACENTA, SIGNAL = 2.3; EXPRESSED IN HEART, SIGNAL = 2.2; EXPRESSED IN BONE MARROW, SIGNAL = 3.1; EXPRESSED IN ADULT LIVER, SIGNAL = 2.3; EXPRESSED IN FETAL LIVER, SIGNAL = 2.9; EXPRESSED IN BRAIN, SIGNAL = 1.9; SWISSPROT HIT: P21171, EVALUE 9.60e+00; EST_HUMAN HIT: BE082720.1, EVALUE 2.00e-30
DSDEEKKARRGRSPKGEFKDEEETVTTKHIHITQATETTTTRHKRTANPSKTIDLGAAAHYTGDKASPDQNASTHTPQSSVK

SEQ ID NO: 41630 - protein, 24 aa, Homo sapiens
  MAP TO AC026407.1; EXPRESSED IN HELA, SIGNAL = 2.5; EXPRESSED IN LUNG, SIGNAL = 2.2; EXPRESSED IN PLACENTA, SIGNAL = 2.3; EXPRESSED IN HEART, SIGNAL = 2.2; EXPRESSED IN BONE MARROW, SIGNAL = 3.1; EXPRESSED IN ADULT LIVER, SIGNAL = 2.3; EXPRESSED IN FETAL LIVER, SIGNAL = 2.9; EXPRESSED IN BRAIN, SIGNAL = 1.9; SWISSPROT HIT: P47083, EVALUE 5.10e+00; EST_HUMAN HIT: AV647078.1, EVALUE 6.00e-06
TAMRKRKREEADLPKVNSKMKRRL

SEQ ID NO: 41631 - protein, 24 aa, Homo sapiens
  MAP TO AC015649.5; EXPRESSED IN BONE MARROW, SIGNAL = 2.1; EXPRESSED IN LUNG, SIGNAL = 1.4; EXPRESSED IN ADULT LIVER, SIGNAL = 1.5; EXPRESSED IN HEART, SIGNAL = 1.4; EXPRESSED IN BRAIN, SIGNAL = 1.4; EXPRESSED IN PLACENTA, SIGNAL = 1.7; EXPRESSED IN FETAL LIVER, SIGNAL =   2
AAKIQAEDLACDKEEVVYIVDSSI

SEQ ID NO: 41632 - protein, 18 aa, Homo sapiens
  MAP TO AC015649.5; EXPRESSED IN BONE MARROW, SIGNAL = 2.1; EXPRESSED IN LUNG, SIGNAL = 1.4; EXPRESSED IN ADULT LIVER, SIGNAL = 1.5; EXPRESSED IN HEART, SIGNAL = 1.4; EXPRESSED IN BRAIN, SIGNAL = 1.4; EXPRESSED IN PLACENTA, SIGNAL = 1.7; EXPRESSED IN FETAL LIVER, SIGNAL =   2
QQRSRQKILPVIRRKLST

SEQ ID NO: 41633 - protein, 27 aa, Homo sapiens
  MAP TO AC021677.3; EXPRESSED IN LUNG, SIGNAL = 1.7; EXPRESSED IN ADULT LIVER, SIGNAL = 1.8; EXPRESSED IN BRAIN, SIGNAL = 2.1; EXPRESSED IN PLACENTA, SIGNAL = 1.4; EXPRESSED IN FETAL LIVER, SIGNAL = 1.5; EXPRESSED IN BONE MARROW, SIGNAL = 1.6; EXPRESSED IN HEART, SIGNAL = 1.6
MEHSFTVPLVTFSSTGLEGRGTSLCSA

SEQ ID NO: 41634 - protein, 38 aa, Homo sapiens
  MAP TO AC007956.5; EXPRESSED IN PLACENTA, SIGNAL = 1.6; EXPRESSED IN ADULT LIVER, SIGNAL = 1.8; EXPRESSED IN FETAL LIVER, SIGNAL = 1.3; EXPRESSED IN BRAIN, SIGNAL = 1.2; EXPRESSED IN BONE MARROW, SIGNAL = 1.4; EXPRESSED IN LUNG, SIGNAL = 1.6; EXPRESSED IN HELA, SIGNAL = 2.2; EXPRESSED IN HEART, SIGNAL = 1.7
FLSIPLSGIRVAKKNKAKDGPYPQAAASIVGKADSTYH

SEQ ID NO: 41635 - protein, 55 aa, Homo sapiens
  MAP TO AL121889.3; EXPRESSED IN PLACENTA, SIGNAL = 1.4; EXPRESSED IN ADULT LIVER, SIGNAL = 2.1; EXPRESSED IN FETAL LIVER, SIGNAL = 0.97; EXPRESSED IN BRAIN, SIGNAL = 2.3; EXPRESSED IN BONE MARROW, SIGNAL = 1.1; EXPRESSED IN LUNG, SIGNAL = 1.6; EXPRESSED IN HEART, SIGNAL = 1.2; EST_HUMAN HIT: AI820688.1, EVALUE 2.00e-25
KVVRRASLSDRTNLYRKEYEGEAILWQRSAAEDQRTSTYNGDIRETRTDQENKDP

SEQ ID NO: 41636 - protein, 54 aa, Homo sapiens
  MAP TO AL121889.3; EXPRESSED IN PLACENTA, SIGNAL = 1.4; EXPRESSED IN ADULT LIVER, SIGNAL = 2.1; EXPRESSED IN FETAL LIVER, SIGNAL = 0.97; EXPRESSED IN BRAIN, SIGNAL = 2.3; EXPRESSED IN BONE MARROW, SIGNAL = 1.1; EXPRESSED IN LUNG, SIGNAL = 1.6; EXPRESSED IN HEART, SIGNAL = 1.2; SWISSPROT HIT: P14585, EVALUE 3.50e+00; EST_HUMAN HIT: AI820688.1, EVALUE 4.00e-16
RWCGEPACRTGPTCIGRSMRERPSCGSGVQLRISGPPPTTGTSGRPGQTKRIRT

SEQ ID NO: 41637 - protein, 20 aa, Homo sapiens
  MAP TO AC019214.2; EXPRESSED IN LUNG, SIGNAL =   3; EXPRESSED IN HEART, SIGNAL = 2.5; EXPRESSED IN BONE MARROW, SIGNAL =   3; EXPRESSED IN PLACENTA, SIGNAL = 2.8; EXPRESSED IN ADULT LIVER, SIGNAL = 3.2; EXPRESSED IN FETAL LIVER, SIGNAL = 2.4; EXPRESSED IN BRAIN, SIGNAL = 2.6
PAGAAPAARRIPQQRGSGPG

SEQ ID NO: 41638 - protein, 63 aa, Homo sapiens
  MAP TO AC019214.2; EXPRESSED IN PLACENTA, SIGNAL = 5.4; EXPRESSED IN FETAL LIVER, SIGNAL = 3.9; EXPRESSED IN LUNG, SIGNAL =   5; EXPRESSED IN ADULT LIVER, SIGNAL = 5.2; EXPRESSED IN BRAIN, SIGNAL = 4.4; EXPRESSED IN BONE MARROW, SIGNAL = 4.5; EXPRESSED IN HELA, SIGNAL = 5.6; EXPRESSED IN HEART, SIGNAL = 4.2; EST_HUMAN HIT: BE001596.1, EVALUE 3.00e-30; SWISSPROT HIT: P16144, EVALUE 7.00e-33
HMVGFKEDHYMLRENLMASDHLDTPMLRSGNLKGRDVVRWKVTNNMQRPGFATHAASINPTEL

SEQ ID NO: 41639 - protein, 56 aa, Homo sapiens
  MAP TO AL121712.19; EXPRESSED IN LUNG, SIGNAL = 4.1; EXPRESSED IN HELA, SIGNAL = 5.2; EXPRESSED IN HEART, SIGNAL = 1.7; EXPRESSED IN PLACENTA, SIGNAL = 9.1; EXPRESSED IN ADULT LIVER, SIGNAL =   3; EXPRESSED IN FETAL LIVER, SIGNAL = 5.5; EXPRESSED IN BRAIN, SIGNAL = 1.3; EXPRESSED IN BONE MARROW, SIGNAL = 1.6; EST_HUMAN HIT: BE394340.1, EVALUE 6.00e-22; SWISSPROT HIT: P05783, EVALUE 2.00e-21
MAGDLAGMGGIQNEKETMQSLNDHLASYLDRMRSLETKNWKPESKIREHLEKKGPQ

SEQ ID NO: 41640 - protein, 66 aa, Homo sapiens
  MAP TO AL121712.19; EXPRESSED IN LUNG, SIGNAL = 4.1; EXPRESSED IN HELA, SIGNAL = 5.2; EXPRESSED IN HEART, SIGNAL = 1.7; EXPRESSED IN PLACENTA, SIGNAL = 9.1; EXPRESSED IN ADULT LIVER, SIGNAL =   3; EXPRESSED IN FETAL LIVER, SIGNAL = 5.5; EXPRESSED IN BRAIN, SIGNAL = 1.3; EXPRESSED IN BONE MARROW, SIGNAL = 1.6; EST_HUMAN HIT: BE538893.1, EVALUE 7.00e-11
RPAMAPGRSAVWLASMQVPGALVPGSPSPTPPASGAAWGPGTWPGGWLGIWQEWEASRTRRRPCKA

SEQ ID NO: 41641 - protein, 22 aa, Homo sapiens
  MAP TO AC024252.3; EXPRESSED IN BONE MARROW, SIGNAL = 3.5; EXPRESSED IN ADULT LIVER, SIGNAL = 2.4; EXPRESSED IN HELA, SIGNAL = 2.8; EXPRESSED IN LUNG, SIGNAL = 3.3; EXPRESSED IN PLACENTA, SIGNAL = 4.3; EXPRESSED IN HEART, SIGNAL = 3.7; EXPRESSED IN FETAL LIVER, SIGNAL = 3.3; EXPRESSED IN BRAIN, SIGNAL = 2.8; EST_HUMAN HIT: AL041782.1, EVALUE 2.20e-02
ARRARSAGAPSVSWSTPTMALT

SEQ ID NO: 41642 - protein, 77 aa, Homo sapiens
  MAP TO AC013698.3; EXPRESSED IN BONE MARROW, SIGNAL = 4.2; EXPRESSED IN PLACENTA, SIGNAL = 2.1; EXPRESSED IN ADULT LIVER, SIGNAL =   3; EXPRESSED IN HELA, SIGNAL = 4.7; EXPRESSED IN HEART, SIGNAL = 2.6; EXPRESSED IN LUNG, SIGNAL = 2.8; EXPRESSED IN FETAL LIVER, SIGNAL =   3; EXPRESSED IN BRAIN, SIGNAL = 3.9; EST_HUMAN HIT: AI251752.1, EVALUE 1.00e-27; SWISSPROT HIT: P31104, EVALUE 1.40e+00
KEYTCRQFCYKSTANKGDRVIYNLTRSPYCCVRFPLAGTGPHILYLSQLDSNLELSKRGKGRGEQRKEEVTCGMLRK

SEQ ID NO: 41643 - protein, 19 aa, Homo sapiens
  MAP TO AC013698.3; EXPRESSED IN BONE MARROW, SIGNAL = 4.2; EXPRESSED IN PLACENTA, SIGNAL = 2.1; EXPRESSED IN ADULT LIVER, SIGNAL =   3; EXPRESSED IN HELA, SIGNAL = 4.7; EXPRESSED IN HEART, SIGNAL = 2.6; EXPRESSED IN LUNG, SIGNAL = 2.8; EXPRESSED IN FETAL LIVER, SIGNAL =   3; EXPRESSED IN BRAIN, SIGNAL = 3.9; EST_HUMAN HIT: AW274947.1, EVALUE 8.30e+00
KSTLAGSFATRVQRTKGTG

SEQ ID NO: 41644 - protein, 34 aa, Homo sapiens
  MAP TO AC022758.3; EXPRESSED IN LUNG, SIGNAL = 2.6; EXPRESSED IN PLACENTA, SIGNAL = 3.5; EXPRESSED IN HEART, SIGNAL = 2.4; EXPRESSED IN FETAL LIVER, SIGNAL = 2.6; EXPRESSED IN BRAIN, SIGNAL =   2; EXPRESSED IN ADULT LIVER, SIGNAL = 2.7; EXPRESSED IN HELA, SIGNAL = 5.1; EXPRESSED IN BONE MARROW, SIGNAL = 2.1
LVGLALTTAVHVQAGAGFKSFLWQHCSLLPLQED

SEQ ID NO: 41645 - protein, 34 aa, Homo sapiens
  MAP TO AC022758.3; EXPRESSED IN LUNG, SIGNAL = 2.6; EXPRESSED IN PLACENTA, SIGNAL = 3.5; EXPRESSED IN HEART, SIGNAL = 2.4; EXPRESSED IN FETAL LIVER, SIGNAL = 2.6; EXPRESSED IN BRAIN, SIGNAL =   2; EXPRESSED IN ADULT LIVER, SIGNAL = 2.7; EXPRESSED IN HELA, SIGNAL = 5.1; EXPRESSED IN BONE MARROW, SIGNAL = 2.1; EST_HUMAN HIT: BF326489.1, EVALUE 4.40e+00
ACGTCPYDCCACAGWCWIQILPLAALLITATPGR

SEQ ID NO: 41646 - protein, 56 aa, Homo sapiens
  MAP TO AC013550.4; EXPRESSED IN HEART, SIGNAL = 3.5; EST_HUMAN HIT: AA180920.1, EVALUE 1.00e-07; SWISSPROT HIT: P54296, EVALUE 8.00e-27
CNDAPVKICKYPVTGLFEGRSYIFRVRAVNSAGISRPSRVSDAVAALDPLDLRRLQ

SEQ ID NO: 41647 - protein, 84 aa, Homo sapiens
  MAP TO AL135787.3; EXPRESSED IN BONE MARROW, SIGNAL = 8.6; EXPRESSED IN HEART, SIGNAL = 9.7; EXPRESSED IN PLACENTA, SIGNAL = 8.4; EXPRESSED IN BRAIN, SIGNAL =  11; EXPRESSED IN HELA, SIGNAL =  16; EXPRESSED IN ADULT LIVER, SIGNAL =  11; EXPRESSED IN FETAL LIVER, SIGNAL =  13; EXPRESSED IN LUNG, SIGNAL = 8.2; EST_HUMAN HIT: AA430006.1, EVALUE 1.00e-24; SWISSPROT HIT: Q44697, EVALUE 7.40e+00
DQFEIQLNQQLWSLIPNNDVRRLVSHVIRTLKTDCTETHLQLACAKLISRTGLLMKLLSEQQELRTVSMTAWKPRMNRKSRSRM

SEQ ID NO: 41648 - protein, 38 aa, Homo sapiens
  MAP TO AL035705.22; EXPRESSED IN BRAIN, SIGNAL = 3.3; EXPRESSED IN HELA, SIGNAL = 3.2; EXPRESSED IN BONE MARROW, SIGNAL = 2.9; EXPRESSED IN PLACENTA, SIGNAL = 2.8; EXPRESSED IN LUNG, SIGNAL = 4.9; EXPRESSED IN HEART, SIGNAL = 3.1; EXPRESSED IN FETAL LIVER, SIGNAL = 3.3; EXPRESSED IN ADULT LIVER, SIGNAL = 4.1; SWISSPROT HIT: P53713, EVALUE 6.40e+00
VHTGRRNMLAGKQEAMIDIIQTNPCPEGPKLARHSQGH

SEQ ID NO: 41649 - protein, 80 aa, Homo sapiens
  MAP TO AC007058.2; EXPRESSED IN BRAIN, SIGNAL =   2; EXPRESSED IN HELA, SIGNAL = 2.9; EXPRESSED IN HEART, SIGNAL = 2.8; EXPRESSED IN ADULT LIVER, SIGNAL = 2.1; EXPRESSED IN FETAL LIVER, SIGNAL = 3.6; EXPRESSED IN LUNG, SIGNAL = 1.7; EXPRESSED IN PLACENTA, SIGNAL = 1.9; EST_HUMAN HIT: AL040240.1, EVALUE 2.30e+00; SWISSPROT HIT: Q09470, EVALUE 4.10e-01
RFLNSQIGIEFLEIMPLFKDEEELTILMNFIINLFSKQIITPYFILSPMQILIFTFKLYLTVSICIVIFKQWSVPTLIIE

SEQ ID NO: 41650 - protein, 64 aa, Homo sapiens
  MAP TO AC009542.2; EXPRESSED IN BRAIN, SIGNAL =   6; EXPRESSED IN HELA, SIGNAL = 4.7; EXPRESSED IN HEART, SIGNAL = 4.2; EXPRESSED IN PLACENTA, SIGNAL = 4.3; EXPRESSED IN LUNG, SIGNAL = 5.7; EXPRESSED IN FETAL LIVER, SIGNAL = 4.7; EXPRESSED IN BONE MARROW, SIGNAL = 2.4; EXPRESSED IN ADULT LIVER, SIGNAL = 5.3; EST_HUMAN HIT: BE298391.1, EVALUE 1.00e-07; SWISSPROT HIT: P07313, EVALUE 4.00e-01
CAEKKPEASGPEAEPCPELHTEPVEPLTRASSAGPEGGGVRPEQPFIVLGQEEYGEHHSSIMHC

SEQ ID NO: 41651 - protein, 17 aa, Homo sapiens
  MAP TO AC009542.2; EXPRESSED IN BRAIN, SIGNAL =   6; EXPRESSED IN HELA, SIGNAL = 4.7; EXPRESSED IN HEART, SIGNAL = 4.2; EXPRESSED IN PLACENTA, SIGNAL = 4.3; EXPRESSED IN LUNG, SIGNAL = 5.7; EXPRESSED IN FETAL LIVER, SIGNAL = 4.7; EXPRESSED IN BONE MARROW, SIGNAL = 2.4; EXPRESSED IN ADULT LIVER, SIGNAL = 5.3; EST_HUMAN HIT: R16471.1, EVALUE 3.20e-01
LLVTVCREETRSQWPRG

SEQ ID NO: 41652 - protein, 59 aa, Homo sapiens
  MAP TO AC016372.2; EXPRESSED IN BRAIN, SIGNAL = 3.6; EXPRESSED IN ADULT LIVER, SIGNAL = 1.7; EXPRESSED IN HEART, SIGNAL =  16; EXPRESSED IN LUNG, SIGNAL = 3.1; EXPRESSED IN PLACENTA, SIGNAL = 4.5; EST_HUMAN HIT: AI092929.1, EVALUE 2.00e-27; SWISSPROT HIT: O64245, EVALUE 1.20e+00
ESRLAKNEAARMAALVEAEKECNLELSEKLKGVTKNWEDVPGDQVKPDQYTEALAQRDK

SEQ ID NO: 41653 - protein, 54 aa, Homo sapiens
  MAP TO AC000097.1; EXPRESSED IN ADULT LIVER, SIGNAL = 5.3; EXPRESSED IN HEART, SIGNAL =   9; EXPRESSED IN BRAIN, SIGNAL = 5.1; EXPRESSED IN PLACENTA, SIGNAL = 4.9; EXPRESSED IN BONE MARROW, SIGNAL = 5.6; EXPRESSED IN FETAL LIVER, SIGNAL =  11; EXPRESSED IN HELA, SIGNAL =  10; EXPRESSED IN LUNG, SIGNAL = 4.6; EST_HUMAN HIT: AI651982.1, EVALUE 2.00e-25
EKERFGHGRIRAQEEHRVKTGILLHEPRHHQKLGEGPASEPLLEPSEGADLLSL

SEQ ID NO: 41654 - protein, 25 aa, Homo sapiens
  MAP TO AC018826.3; EXPRESSED IN PLACENTA, SIGNAL = 1.8; EXPRESSED IN FETAL LIVER, SIGNAL = 1.8; EXPRESSED IN HELA, SIGNAL = 1.9; EXPRESSED IN HEART, SIGNAL = 1.8; EXPRESSED IN BRAIN, SIGNAL = 2.3; EXPRESSED IN LUNG, SIGNAL = 2.1; EXPRESSED IN BONE MARROW, SIGNAL = 1.7; EXPRESSED IN ADULT LIVER, SIGNAL =   2
NVEDDEDNEEGEEHGDDDNHNERLL

SEQ ID NO: 41655 - protein, 24 aa, Homo sapiens
  MAP TO AC018826.3; EXPRESSED IN PLACENTA, SIGNAL = 1.8; EXPRESSED IN FETAL LIVER, SIGNAL = 1.8; EXPRESSED IN HELA, SIGNAL = 1.9; EXPRESSED IN HEART, SIGNAL = 1.8; EXPRESSED IN BRAIN, SIGNAL = 2.3; EXPRESSED IN LUNG, SIGNAL = 2.1; EXPRESSED IN BONE MARROW, SIGNAL = 1.7; EXPRESSED IN ADULT LIVER, SIGNAL =   2
MLRMTRTMRRGKSMVMMIIIMNVY

SEQ ID NO: 41656 - protein, 60 aa, Homo sapiens
  MAP TO AC012683.3; EXPRESSED IN BRAIN, SIGNAL = 1.6; EXPRESSED IN HEART, SIGNAL = 2.3; SWISSPROT HIT: Q02218, EVALUE 4.00e-26; EST_HUMAN HIT: AU140138.1, EVALUE 5.00e-25
GSGDVKYHLGMYHERINRVTNRNITLSLVANPSHLEAVDPVVQGKTKAEQFYRGDAQGKK

SEQ ID NO: 41657 - protein, 59 aa, Homo sapiens
  MAP TO AC012683.3; EXPRESSED IN BRAIN, SIGNAL = 1.6; EXPRESSED IN HEART, SIGNAL = 2.3; EST_HUMAN HIT: AU142192.1, EVALUE 7.00e-24; SWISSPROT HIT: P39636, EVALUE 2.00e+00
APGMSSTTWACTMRGSTASPTGTSLCRWLPTPPTWRQWTLWCRGRQRQSSSTVEMPRAR

SEQ ID NO: 41658 - protein, 181 aa, Homo sapiens; identical to SEQ ID NO: 33314
  MAP TO AC007263.4; EXPRESSED IN BRAIN, SIGNAL = 7.9; EXPRESSED IN HEART, SIGNAL = 5.7; EXPRESSED IN LUNG, SIGNAL =  12; EXPRESSED IN PLACENTA, SIGNAL =  12; EXPRESSED IN HELA, SIGNAL = 6.5; EXPRESSED IN FETAL LIVER, SIGNAL = 7.2; EXPRESSED IN BONE MARROW, SIGNAL = 5.4; EXPRESSED IN ADULT LIVER, SIGNAL =   5; EST_HUMAN HIT: BE676347.1, EVALUE 1.00e-87; SWISSPROT HIT: O00409, EVALUE 5.00e-97

SEQ ID NO: 41659 - protein, 18 aa, Homo sapiens
  MAP TO AP001341.1; EXPRESSED IN BRAIN, SIGNAL =   6; EXPRESSED IN PLACENTA, SIGNAL = 7.7; EXPRESSED IN ADULT LIVER, SIGNAL =   6; EXPRESSED IN HELA, SIGNAL = 6.3; EXPRESSED IN FETAL LIVER, SIGNAL = 7.6; EXPRESSED IN HEART, SIGNAL = 4.7; EXPRESSED IN BONE MARROW, SIGNAL = 9.2; EXPRESSED IN LUNG, SIGNAL =  28
LGLTLHGVEPKLVNGGGS

SEQ ID NO: 41660 - protein, 111 aa, Homo sapiens
  MAP TO AC020557.2; EXPRESSED IN ADULT LIVER, SIGNAL = 3.5; EXPRESSED IN FETAL LIVER, SIGNAL =   4; EXPRESSED IN HEART, SIGNAL = 4.5; EXPRESSED IN PLACENTA, SIGNAL = 3.3; EXPRESSED IN BRAIN, SIGNAL = 3.5; EXPRESSED IN BONE MARROW, SIGNAL = 3.2; EXPRESSED IN HELA, SIGNAL = 4.6; EXPRESSED IN LUNG, SIGNAL = 4.9; EST_HUMAN HIT: BE206277.1, EVALUE 2.40e-01; SWISSPROT HIT: P49746, EVALUE 4.10e+00
LRVEVLGNEPTPGMPEKFQFRWNLSHDAGPVQFWAKKTLLLSALRLVLWVFFCCASCGLHRSSFPGEQQARQLPQQLCHHPSMAWGLPCHQNTAGANPHLFLGCYSTSSLQ

SEQ ID NO: 41661 - protein, 67 aa, Homo sapiens
  MAP TO AC018720.2; EXPRESSED IN BONE MARROW, SIGNAL = 2.5; EXPRESSED IN HELA, SIGNAL = 2.8; EXPRESSED IN HEART, SIGNAL = 2.4; EXPRESSED IN LUNG, SIGNAL = 2.7; EXPRESSED IN BRAIN, SIGNAL = 2.5; EXPRESSED IN PLACENTA, SIGNAL = 1.7; EXPRESSED IN ADULT LIVER, SIGNAL = 2.2; EXPRESSED IN FETAL LIVER, SIGNAL = 3.3; EST_HUMAN HIT: AA446529.1, EVALUE 2.00e-33; SWISSPROT HIT: P27124, EVALUE 1.00e-09
ITLWGMELGLLSMQRGELARFLFKPNYAYGTLGSPPLIPPNTTVLFKIELLDFLDCAESDKFCALSA

SEQ ID NO: 41662 - protein, 52 aa, Homo sapiens
  MAP TO AP001328.1; EXPRESSED IN BONE MARROW, SIGNAL = 5.8; EXPRESSED IN FETAL LIVER, SIGNAL = 4.1; EXPRESSED IN LUNG, SIGNAL = 7.4; EXPRESSED IN PLACENTA, SIGNAL = 4.4; EXPRESSED IN ADULT LIVER, SIGNAL = 2.7; EXPRESSED IN HEART, SIGNAL = 3.6; EXPRESSED IN BRAIN, SIGNAL = 3.4; EXPRESSED IN HELA, SIGNAL = 3.8
NTEHLLQVMQDNKNVKSMVPTLKRLSYNFSIPCATAVISTESHEHTETSQER

SEQ ID NO: 41663 - protein, 62 aa, Homo sapiens
  MAP TO AL135744.2; EXPRESSED IN ADULT LIVER, SIGNAL = 3.3; EXPRESSED IN HEART, SIGNAL = 2.3; EXPRESSED IN BRAIN, SIGNAL =   3; EXPRESSED IN PLACENTA, SIGNAL = 3.4; EXPRESSED IN BONE MARROW, SIGNAL = 3.9; EXPRESSED IN LUNG, SIGNAL = 4.7; EXPRESSED IN FETAL LIVER, SIGNAL = 6.1; EXPRESSED IN HELA, SIGNAL = 3.9; SWISSPROT HIT: P07910, EVALUE 7.80e+00
TDLSFSSAVEMKNDKSEEEQSSSSVKKDETNVKMESEGGADDSAEEGDLLDDDDNEDRGDDQ

SEQ ID NO: 41664 - protein, 57 aa, Homo sapiens
  MAP TO AC002039.1; EXPRESSED IN HELA, SIGNAL = 5.3; EXPRESSED IN HEART, SIGNAL = 6.5; EXPRESSED IN LUNG, SIGNAL =  17; EXPRESSED IN BRAIN, SIGNAL =  11; EXPRESSED IN PLACENTA, SIGNAL = 4.1; EXPRESSED IN ADULT LIVER, SIGNAL = 3.5; EXPRESSED IN BONE MARROW, SIGNAL = 7.6; EXPRESSED IN FETAL LIVER, SIGNAL = 5.4; SWISSPROT HIT: P98161, EVALUE 3.00e-27; EST_HUMAN HIT: BF528554.1, EVALUE 1.00e-27
RGFFDKHIWLSIWDRPPRSCFTRIQRATCCVLLICLFLGANAVWYGAVGDSAYRWVP

SEQ ID NO: 41665 - protein, 29 aa, Homo sapiens
  MAP TO AC011467.3; EXPRESSED IN BRAIN, SIGNAL = 2.5; EXPRESSED IN PLACENTA, SIGNAL = 1.9; EXPRESSED IN FETAL LIVER, SIGNAL =   2; EXPRESSED IN HELA, SIGNAL = 2.1; EXPRESSED IN HEART, SIGNAL =   2; EXPRESSED IN BONE MARROW, SIGNAL = 1.9; EXPRESSED IN LUNG, SIGNAL = 2.5; EXPRESSED IN ADULT LIVER, SIGNAL = 2.7; EST_HUMAN HIT: BE926719.1, EVALUE 5.30e-01
EHQGCSSTDSFLSVEKKSRNSHEKSLQSH

SEQ ID NO: 41666 - protein, 36 aa, Homo sapiens
  MAP TO AL133211.1; EXPRESSED IN BRAIN, SIGNAL = 2.5; EXPRESSED IN HELA, SIGNAL = 2.6; EXPRESSED IN ADULT LIVER, SIGNAL = 1.8; EXPRESSED IN FETAL LIVER, SIGNAL = 2.2; EXPRESSED IN BONE MARROW, SIGNAL = 1.7; EXPRESSED IN HEART, SIGNAL = 2.6; EXPRESSED IN LUNG, SIGNAL = 2.9; EXPRESSED IN PLACENTA, SIGNAL = 1.9; SWISSPROT HIT: Q9UBD5, EVALUE 1.00e-15; EST_HUMAN HIT: AA194876.1, EVALUE 2.00e-14
NEALKSEEGCIPNIAPDICIAYKLHLECSRLINLVD

SEQ ID NO: 41667 - protein, 37 aa, Homo sapiens
  MAP TO AL157996.1; EXPRESSED IN HEART, SIGNAL = 3.7; EXPRESSED IN LUNG, SIGNAL = 4.6; EXPRESSED IN BONE MARROW, SIGNAL = 2.9; EXPRESSED IN PLACENTA, SIGNAL =   4; EXPRESSED IN BRAIN, SIGNAL = 4.2; EXPRESSED IN HELA, SIGNAL =   4; EXPRESSED IN ADULT LIVER, SIGNAL = 4.6; EXPRESSED IN FETAL LIVER, SIGNAL = 3.8; EST_HUMAN HIT: AA528300.1, EVALUE 6.00e-06; SWISSPROT HIT: P08547, EVALUE 3.00e-04
CPQKTCTRIFIEATSRIATIWIRCPLTGEWINKLWYI

SEQ ID NO: 41668 - protein, 46 aa, Homo sapiens
  MAP TO AC008102.16; EXPRESSED IN ADULT LIVER, SIGNAL = 1.6; EXPRESSED IN BONE MARROW, SIGNAL = 2.1; EXPRESSED IN HEART, SIGNAL = 2.7; EXPRESSED IN LUNG, SIGNAL = 6.2; EXPRESSED IN PLACENTA, SIGNAL = 3.7; EXPRESSED IN FETAL LIVER, SIGNAL = 3.9; EXPRESSED IN HELA, SIGNAL = 3.8; EXPRESSED IN BRAIN, SIGNAL = 2.9; EST_HUMAN HIT: BE311843.1, EVALUE 5.00e-03; SWISSPROT HIT: Q13435, EVALUE 4.00e-04
LTDDVKKEKEKEPEKLDKLENSAAPKKKGFEEEHKDSDDDSSDDEQ

SEQ ID NO: 41669 - protein, 30 aa, Homo sapiens
  MAP TO AC024006.2; EXPRESSED IN BRAIN, SIGNAL = 2.3; EXPRESSED IN BONE MARROW, SIGNAL = 1.9; EXPRESSED IN FETAL LIVER, SIGNAL = 2.7; EXPRESSED IN ADULT LIVER, SIGNAL = 2.3; EXPRESSED IN HELA, SIGNAL = 3.1; EXPRESSED IN LUNG, SIGNAL = 1.9; EXPRESSED IN HEART, SIGNAL = 2.9; EXPRESSED IN PLACENTA, SIGNAL = 1.5; EST_HUMAN HIT: AI870557.1, EVALUE 5.00e-03; SWISSPROT HIT: P06726, EVALUE 8.60e+00
ATRPTLPHSPPSQHEDKDEHLDDDPSPLNE

SEQ ID NO: 41670 - protein, 68 aa, Homo sapiens
  MAP TO AL034380.25; EXPRESSED IN BONE MARROW, SIGNAL = 1.8; EXPRESSED IN LUNG, SIGNAL = 2.5; EXPRESSED IN ADULT LIVER, SIGNAL = 1.4; EXPRESSED IN FETAL LIVER, SIGNAL = 1.6; EXPRESSED IN HELA, SIGNAL = 1.7; EXPRESSED IN HEART, SIGNAL = 1.7; EXPRESSED IN BRAIN, SIGNAL = 1.5; EST_HUMAN HIT: BE867776.1, EVALUE 9.00e-30; SWISSPROT HIT: P53739, EVALUE 1.30e-01
DDDRGEEWERHEALHEDVTGQERTTEQLFEEEIELKWEKGGSGLVFYTDAQFWQEEEGGNAGTQAKAG

SEQ ID NO: 41671 - protein, 72 aa, Homo sapiens
  MAP TO AC010620.3; EXPRESSED IN BRAIN, SIGNAL = 1.5; EXPRESSED IN PLACENTA, SIGNAL = 1.5; EXPRESSED IN FETAL LIVER, SIGNAL = 3.3; EXPRESSED IN HELA, SIGNAL =   4; EXPRESSED IN HEART, SIGNAL = 1.8; EST_HUMAN HIT: W00557.1, EVALUE 1.00e-30; SWISSPROT HIT: P03355, EVALUE 5.00e-06
HPPLVTLHLNPQVWDTSTPSLATDHAPLTIPLKPNHPYPTQCQYLIPQQALKGLKPVITRLLQHGLLKPTNS

SEQ ID NO: 41672 - protein, 43 aa, Homo sapiens
  MAP TO AC019205.2; EXPRESSED IN PLACENTA, SIGNAL = 2.4; EXPRESSED IN BRAIN, SIGNAL = 1.9; EXPRESSED IN BONE MARROW, SIGNAL = 1.6; EXPRESSED IN FETAL LIVER, SIGNAL =   2; EXPRESSED IN HELA, SIGNAL = 2.1; EXPRESSED IN ADULT LIVER, SIGNAL = 2.4; EXPRESSED IN LUNG, SIGNAL = 1.7; EXPRESSED IN HEART, SIGNAL = 2.3; SWISSPROT HIT: P49237, EVALUE 8.20e+00; EST_HUMAN HIT: BF377169.1, EVALUE 2.00e-17
IIQEQPESLVKIFGSKAMQTKAKAVIDNFVKKLEENYNSECGI

SEQ ID NO: 41673 - protein, 46 aa, Homo sapiens
  MAP TO AC009565.7; EXPRESSED IN BRAIN, SIGNAL = 4.4; EXPRESSED IN ADULT LIVER, SIGNAL = 5.2; EXPRESSED IN BONE MARROW, SIGNAL = 2.6; EXPRESSED IN HELA, SIGNAL = 3.5; EXPRESSED IN LUNG, SIGNAL = 2.7; EXPRESSED IN HEART, SIGNAL = 4.9; EXPRESSED IN PLACENTA, SIGNAL = 3.1; EXPRESSED IN FETAL LIVER, SIGNAL = 3.8
ETYLVEGCYEACLFLVMYGTFYPVFLLGTATNRKTVWCEFTVGSSM

SEQ ID NO: 41674 - protein, 46 aa, Homo sapiens
  MAP TO AL117694.3; EXPRESSED IN HELA, SIGNAL = 2.3; EXPRESSED IN BONE MARROW, SIGNAL = 3.5; EXPRESSED IN FETAL LIVER, SIGNAL = 1.7; EXPRESSED IN LUNG, SIGNAL = 4.2; EXPRESSED IN HEART, SIGNAL = 2.6; EST_HUMAN HIT: BE744124.1, EVALUE 3.00e-09; SWISSPROT HIT: Q99001, EVALUE 4.00e-10
ILSPLRPFLMCAAAVSVEIVDGNVKMTLGMIWTIILRFAIQDISVE

SEQ ID NO: 41675 - protein, 78 aa, Homo sapiens
  MAP TO AC007221.2; EXPRESSED IN PLACENTA, SIGNAL = 2.7; EXPRESSED IN FETAL LIVER, SIGNAL = 3.4; EXPRESSED IN ADULT LIVER, SIGNAL = 3.4; EXPRESSED IN HEART, SIGNAL = 3.7; EXPRESSED IN BRAIN, SIGNAL = 3.6; EXPRESSED IN LUNG, SIGNAL = 2.9; EXPRESSED IN HELA, SIGNAL = 3.5; EXPRESSED IN BONE MARROW, SIGNAL = 3.2; EST_HUMAN HIT: BE788578.1, EVALUE 2.90e+00
MGRFIAHHCDLKCIAVAGTRTSLEASINAQAFSSELLFVFLKAHRFRIPTGIVKLDVSSRSTPLTITVIILIPRGSKI

SEQ ID NO: 41676 - protein, 39 aa, Homo sapiens
  MAP TO AC022377.1; EXPRESSED IN BRAIN, SIGNAL =   2; EXPRESSED IN PLACENTA, SIGNAL = 1.7; EXPRESSED IN ADULT LIVER, SIGNAL =   2; EXPRESSED IN BONE MARROW, SIGNAL = 1.8; EXPRESSED IN FETAL LIVER, SIGNAL = 2.3; EXPRESSED IN HELA, SIGNAL = 2.2; EXPRESSED IN LUNG, SIGNAL = 1.8; EXPRESSED IN HEART, SIGNAL = 2.1; EST_HUMAN HIT: R86153.1, EVALUE 7.20e+00; SWISSPROT HIT: P10220, EVALUE 2.20e+00
FNNNAPQVNQPKNLPPSLPVGGPQAAMCSLVHSIHCLSQ

SEQ ID NO: 41677 - protein, 33 aa, Homo sapiens
  MAP TO AC025251.1; EXPRESSED IN BRAIN, SIGNAL = 5.2; EXPRESSED IN ADULT LIVER, SIGNAL = 3.9; EXPRESSED IN HELA, SIGNAL =   3; EXPRESSED IN BONE MARROW, SIGNAL = 3.4; EXPRESSED IN PLACENTA, SIGNAL = 3.7; EXPRESSED IN LUNG, SIGNAL = 3.8; EXPRESSED IN HEART, SIGNAL = 2.9; EXPRESSED IN FETAL LIVER, SIGNAL = 3.2
TPFLGVIEELTWLVCLIKQSYVLSQNLYLTISS

SEQ ID NO: 41678 - protein, 46 aa, Homo sapiens
  MAP TO AP001347.1; EXPRESSED IN HEART, SIGNAL = 1.7; EXPRESSED IN PLACENTA, SIGNAL = 1.4; EXPRESSED IN FETAL LIVER, SIGNAL = 1.9; EXPRESSED IN HELA, SIGNAL =   2; EXPRESSED IN LUNG, SIGNAL = 1.9
PSPSPITITTITITTIIFTTTIIIPSPLSLPPPPSSASPSHHHHHV

SEQ ID NO: 41679 - protein, 156 aa, Homo sapiens
  MAP TO AP001347.1; EXPRESSED IN HEART, SIGNAL = 1.7; EXPRESSED IN PLACENTA, SIGNAL = 1.4; EXPRESSED IN FETAL LIVER, SIGNAL = 1.9; EXPRESSED IN HELA, SIGNAL =   2; EXPRESSED IN LUNG, SIGNAL = 1.9
TITTIIINITITITTIITITITITTIIITITIITSPSTLSSPPSPSPSSHHHQHYHHHHHHCHYHYYHHHHYHRYHHHTTITIITITITTITNHHHHYHHHHHHHHNHQHHHHHPSPSPPSLSPPSSSPPPSSYHHHYHCHHHHHQHHHHIIITML

SEQ ID NO: 41680 - protein, 28 aa, Homo sapiens
  MAP TO AC023128.2; EXPRESSED IN ADULT LIVER, SIGNAL = 3.9; EXPRESSED IN BONE MARROW, SIGNAL = 3.1; EXPRESSED IN LUNG, SIGNAL = 3.3; EXPRESSED IN BRAIN, SIGNAL =   4; EXPRESSED IN PLACENTA, SIGNAL = 8.9; EXPRESSED IN FETAL LIVER, SIGNAL = 4.3; EXPRESSED IN HELA, SIGNAL = 4.6; EXPRESSED IN HEART, SIGNAL =   4
SIGLKVMMMIMMMMWRRSSWRRRKQVMS

SEQ ID NO: 41681 - protein, 40 aa, Homo sapiens
  MAP TO AC011475.2; EXPRESSED IN BRAIN, SIGNAL = 5.3; EXPRESSED IN PLACENTA, SIGNAL = 8.2; EXPRESSED IN HELA, SIGNAL = 5.9; EXPRESSED IN HEART, SIGNAL = 5.9; EXPRESSED IN BONE MARROW, SIGNAL = 8.4; EXPRESSED IN FETAL LIVER, SIGNAL =   6; EXPRESSED IN LUNG, SIGNAL =  13; EXPRESSED IN ADULT LIVER, SIGNAL = 7.7; EST_HUMAN HIT: BE733215.1, EVALUE 4.00e-09
GPEMLPAIHAYKGVLMVGNETTMRMGMAPGKTSQTWWRRQ

SEQ ID NO: 41682 - protein, 86 aa, Homo sapiens
  MAP TO AC009242.2; EXPRESSED IN BONE MARROW, SIGNAL = 2.4; EXPRESSED IN FETAL LIVER, SIGNAL =   3; EXPRESSED IN HEART, SIGNAL = 2.7; EXPRESSED IN LUNG, SIGNAL = 2.2; EXPRESSED IN BRAIN, SIGNAL = 3.8; EXPRESSED IN PLACENTA, SIGNAL = 2.5; EXPRESSED IN HELA, SIGNAL = 3.2; EXPRESSED IN ADULT LIVER, SIGNAL = 2.9; EST_HUMAN HIT: BE273201.1, EVALUE 1.00e-19; SWISSPROT HIT: Q04652, EVALUE 4.00e-12
KQLTASNCLGVLAMAEAMQCSELYHMAKAFALQIFPEVAAQEEILSISKDDFIAYVSNDSLNTKAEELVYETVIKWIKKDPATRTQ

SEQ ID NO: 41683 - protein, 53 aa, Homo sapiens
  MAP TO AC025289.1; EXPRESSED IN BRAIN, SIGNAL = 2.8; EXPRESSED IN PLACENTA, SIGNAL = 2.7; EXPRESSED IN HELA, SIGNAL = 4.8; EXPRESSED IN ADULT LIVER, SIGNAL = 2.5; EXPRESSED IN FETAL LIVER, SIGNAL = 4.8; EXPRESSED IN HEART, SIGNAL = 4.2; EXPRESSED IN BONE MARROW, SIGNAL = 2.3; EXPRESSED IN LUNG, SIGNAL =   3; EST_HUMAN HIT: AW886793.1, EVALUE 1.70e+00; SWISSPROT HIT: P38650, EVALUE 4.70e+00
VPRKVMNVKVDSSWSSTLRIWYLKLPALCQLIYFVQLPIREILLSYQHRSLRY

SEQ ID NO: 41684 - protein, 41 aa, Homo sapiens
  MAP TO AC010278.3; EXPRESSED IN BRAIN, SIGNAL =  14; EXPRESSED IN PLACENTA, SIGNAL = 8.3; EXPRESSED IN BONE MARROW, SIGNAL =  36; EXPRESSED IN FETAL LIVER, SIGNAL =  19; EXPRESSED IN LUNG, SIGNAL =  52; EXPRESSED IN ADULT LIVER, SIGNAL = 6.9; EXPRESSED IN HELA, SIGNAL =  18; EXPRESSED IN HEART, SIGNAL =  14; SWISSPROT HIT: P20342, EVALUE 2.00e-15; EST_HUMAN HIT: AA075852.1, EVALUE 2.00e-14
VEIKLEMIGHDLGEFSITYKPVKHGRPGIGSTHSSRFISLK

SEQ ID NO: 41685 - protein, 23 aa, Homo sapiens
  MAP TO AC010278.3; EXPRESSED IN BRAIN, SIGNAL =  14; EXPRESSED IN PLACENTA, SIGNAL = 8.3; EXPRESSED IN BONE MARROW, SIGNAL =  36; EXPRESSED IN FETAL LIVER, SIGNAL =  19; EXPRESSED IN LUNG, SIGNAL =  52; EXPRESSED IN ADULT LIVER, SIGNAL = 6.9; EXPRESSED IN HELA, SIGNAL =  18; EXPRESSED IN HEART, SIGNAL =  14; EST_HUMAN HIT: BF683125.1, EVALUE 3.00e-06
YLREMKREEWVDPMPGRPCFTGL

SEQ ID NO: 41686 - protein, 76 aa, Homo sapiens
  MAP TO AC010093.2; EXPRESSED IN ADULT LIVER, SIGNAL = 2.1; EXPRESSED IN FETAL LIVER, SIGNAL = 2.4; EXPRESSED IN HEART, SIGNAL = 2.2; EXPRESSED IN PLACENTA, SIGNAL = 2.1; EXPRESSED IN BONE MARROW, SIGNAL = 2.4; EXPRESSED IN LUNG, SIGNAL = 2.7; EXPRESSED IN BRAIN, SIGNAL = 2.4; EXPRESSED IN HELA, SIGNAL = 2.4; SWISSPROT HIT: P56501, EVALUE 8.00e+00
VRSNILLLRASVALCLLFALHNPLFRVSALTFCDILCKDCCLVFVDILSFPLGSTENRIQLYLQNPITFFILVMEH

SEQ ID NO: 41687 - protein, 57 aa, Homo sapiens
  MAP TO AC005323.1; EXPRESSED IN ADULT LIVER, SIGNAL = 3.7; EXPRESSED IN FETAL LIVER, SIGNAL = 4.1; EXPRESSED IN BRAIN, SIGNAL = 2.8; EXPRESSED IN PLACENTA, SIGNAL = 3.1; EXPRESSED IN BONE MARROW, SIGNAL = 5.5; EXPRESSED IN HELA, SIGNAL = 3.9; EXPRESSED IN HEART, SIGNAL =  49; EXPRESSED IN LUNG, SIGNAL = 2.6; SWISSPROT HIT: P13538, EVALUE 5.00e-25; EST_HUMAN HIT: AA180798.1, EVALUE 1.00e-24
AAMMAEELKKEQDTSAHLERMKKNMEQTVKDLQLRLDEAEQLALKGGKKQIQKLEAR

SEQ ID NO: 41688 - protein, 65 aa, Homo sapiens
  MAP TO AC011625.2; EXPRESSED IN BRAIN, SIGNAL = 5.3; EXPRESSED IN PLACENTA, SIGNAL = 4.3; EXPRESSED IN ADULT LIVER, SIGNAL = 5.8; EXPRESSED IN BONE MARROW, SIGNAL = 4.4; EXPRESSED IN FETAL LIVER, SIGNAL = 5.5; EXPRESSED IN HELA, SIGNAL =   6; EXPRESSED IN LUNG, SIGNAL = 7.4; EXPRESSED IN HEART, SIGNAL = 5.5; EST_HUMAN HIT: BE546422.1, EVALUE 8.20e-01; SWISSPROT HIT: P12545, EVALUE 1.50e+00
ALTGIRFGTPVLAFQALFWPQCAPSSRFHGFLATVVYPHCCPWGPAHLIHLGWHLCHACPSCPGW

SEQ ID NO: 41689 - protein, 17 aa, Homo sapiens
  MAP TO AC011625.2; EXPRESSED IN BRAIN, SIGNAL = 5.3; EXPRESSED IN PLACENTA, SIGNAL = 4.3; EXPRESSED IN ADULT LIVER, SIGNAL = 5.8; EXPRESSED IN BONE MARROW, SIGNAL = 4.4; EXPRESSED IN FETAL LIVER, SIGNAL = 5.5; EXPRESSED IN HELA, SIGNAL =   6; EXPRESSED IN LUNG, SIGNAL = 7.4; EXPRESSED IN HEART, SIGNAL = 5.5
PTLGSWDRHGRDANQDG

SEQ ID NO: 41690 - protein, 74 aa, Homo sapiens
  MAP TO AC008686.3; EXPRESSED IN BONE MARROW, SIGNAL = 2.1; EXPRESSED IN HEART, SIGNAL = 1.9; EXPRESSED IN LUNG, SIGNAL = 4.3; EXPRESSED IN BRAIN, SIGNAL =   3; EXPRESSED IN PLACENTA, SIGNAL = 2.2; EXPRESSED IN ADULT LIVER, SIGNAL = 2.2; EXPRESSED IN FETAL LIVER, SIGNAL = 2.3; EXPRESSED IN HELA, SIGNAL = 3.3; EST_HUMAN HIT: AI446455.1, EVALUE 3.00e-36; SWISSPROT HIT: Q9UZ16, EVALUE 3.00e-20
VVVGADRVVANGDTANKVGTYQLAIVAKHHGIPFYVAAPSSSCDLRLETGKEIIIEERPGQELTDVNGVRIAAP

SEQ ID NO: 41691 - protein, 63 aa, Homo sapiens
  MAP TO AC008686.3; EXPRESSED IN BONE MARROW, SIGNAL = 2.1; EXPRESSED IN HEART, SIGNAL = 1.9; EXPRESSED IN LUNG, SIGNAL = 4.3; EXPRESSED IN BRAIN, SIGNAL =   3; EXPRESSED IN PLACENTA, SIGNAL = 2.2; EXPRESSED IN ADULT LIVER, SIGNAL = 2.2; EXPRESSED IN FETAL LIVER, SIGNAL = 2.3; EXPRESSED IN HELA, SIGNAL = 3.3; EST_HUMAN HIT: AI446455.1, EVALUE 1.00e-33; SWISSPROT HIT: P33654, EVALUE 2.70e-01
LWSWELTAWLPTATQPTRWAPTSWPLSPSTMAFPSTWLPPALHVTSVWRPARRSLLKSDRARS

SEQ ID NO: 41692 - protein, 50 aa, Homo sapiens
  MAP TO AC017025.3; EXPRESSED IN BRAIN, SIGNAL = 1.5; EXPRESSED IN BONE MARROW, SIGNAL = 1.7; EXPRESSED IN HELA, SIGNAL = 1.7; EXPRESSED IN LUNG, SIGNAL = 1.8; EXPRESSED IN ADULT LIVER, SIGNAL = 1.8; EXPRESSED IN HEART, SIGNAL = 2.2; EXPRESSED IN PLACENTA, SIGNAL = 1.6; EST_HUMAN HIT: AW964917.1, EVALUE 6.60e+00
IILLPRMLSRKIKYNFICKIILCTASLKEQNNNITVINNRLKYRICLINI

SEQ ID NO: 41693 - protein, 34 aa, Homo sapiens
  MAP TO AC017067.2; EXPRESSED IN BRAIN, SIGNAL = 3.1; EXPRESSED IN HELA, SIGNAL =   3; EXPRESSED IN FETAL LIVER, SIGNAL = 3.8; EXPRESSED IN HEART, SIGNAL = 2.7; EXPRESSED IN PLACENTA, SIGNAL = 2.3; EXPRESSED IN LUNG, SIGNAL = 2.2; EXPRESSED IN BONE MARROW, SIGNAL = 2.3; EXPRESSED IN ADULT LIVER, SIGNAL = 5.1; EST_HUMAN HIT: AU122079.1, EVALUE 6.60e-01; SWISSPROT HIT: P11990, EVALUE 4.90e+00
WTSPRFTTWGHLSYSWRGQGVLCQNVWSRTLRRC

SEQ ID NO: 41694 - protein, 25 aa, Homo sapiens
  MAP TO AP001330.1; EXPRESSED IN PLACENTA, SIGNAL = 2.5; EXPRESSED IN BRAIN, SIGNAL = 2.6; EXPRESSED IN BONE MARROW, SIGNAL =   3; EXPRESSED IN FETAL LIVER, SIGNAL = 2.7; EXPRESSED IN HELA, SIGNAL = 2.4; EXPRESSED IN ADULT LIVER, SIGNAL = 2.5; EXPRESSED IN LUNG, SIGNAL = 4.5; EXPRESSED IN HEART, SIGNAL = 2.4
LTCRVGQCPLHAEEANILFSSRPQR

SEQ ID NO: 41695 - protein, 35 aa, Homo sapiens
  MAP TO AL135931.4; EXPRESSED IN PLACENTA, SIGNAL =   2; EXPRESSED IN BRAIN, SIGNAL =   2; EXPRESSED IN BONE MARROW, SIGNAL = 3.2; EXPRESSED IN HELA, SIGNAL = 2.9; EXPRESSED IN ADULT LIVER, SIGNAL = 3.3; EXPRESSED IN FETAL LIVER, SIGNAL = 2.8; EXPRESSED IN HEART, SIGNAL =   2
VEQKKQQSRRSRPSASSPPVACTPTHCWTCHASSE

SEQ ID NO: 41696 - protein, 34 aa, Homo sapiens
  MAP TO AC008395.3; EXPRESSED IN FETAL LIVER, SIGNAL = 3.4; EXPRESSED IN HEART, SIGNAL = 3.2; EXPRESSED IN BRAIN, SIGNAL = 2.7; EXPRESSED IN PLACENTA, SIGNAL = 2.6; EXPRESSED IN ADULT LIVER, SIGNAL = 2.9; EXPRESSED IN BONE MARROW, SIGNAL = 2.2; EXPRESSED IN HELA, SIGNAL = 3.7; EXPRESSED IN LUNG, SIGNAL = 4.6
ALVLPAHHKDIRLEVEQPFYEYEAKDGDLEQQRE

SEQ ID NO: 41697 - protein, 39 aa, Homo sapiens
  MAP TO AC008649.3; EXPRESSED IN FETAL LIVER, SIGNAL = 2.8; EXPRESSED IN HEART, SIGNAL =   2; EXPRESSED IN BRAIN, SIGNAL = 2.8; EXPRESSED IN PLACENTA, SIGNAL = 5.6; EXPRESSED IN ADULT LIVER, SIGNAL = 1.9; EXPRESSED IN BONE MARROW, SIGNAL = 3.4; EXPRESSED IN HELA, SIGNAL = 3.5; EXPRESSED IN LUNG, SIGNAL =  10; SWISSPROT HIT: Q90734, EVALUE 4.00e-15; EST_HUMAN HIT: BF207324.1, EVALUE 5.00e-15
ERLPKPERGKMRVHKINNVNKALDFIASKGVKLVSIGAE

SEQ ID NO: 41698 - protein, 90 aa, Homo sapiens
  MAP TO AC009144.4; EXPRESSED IN BRAIN, SIGNAL = 2.8; EXPRESSED IN PLACENTA, SIGNAL = 1.8; EXPRESSED IN FETAL LIVER, SIGNAL = 2.8; EXPRESSED IN ADULT LIVER, SIGNAL = 3.4; EXPRESSED IN BONE MARROW, SIGNAL = 1.7; EXPRESSED IN HELA, SIGNAL = 2.9; EXPRESSED IN HEART, SIGNAL = 2.3; SWISSPROT HIT: P05093, EVALUE 5.00e-47; EST_HUMAN HIT: AV710015.1, EVALUE 5.00e-46
RFLNPAGTQLISPSVSYLPFGAGPRSCIGEILARQELFLIMAWLLQRFDLEVPDDGQLPSLEGIPKVVFLIDSFKVKIKVRQAWREAQAE

SEQ ID NO: 41699 - protein, 41 aa, Homo sapiens
  MAP TO AC009144.4; EXPRESSED IN BRAIN, SIGNAL = 2.8; EXPRESSED IN PLACENTA, SIGNAL = 1.8; EXPRESSED IN FETAL LIVER, SIGNAL = 2.8; EXPRESSED IN ADULT LIVER, SIGNAL = 3.4; EXPRESSED IN BONE MARROW, SIGNAL = 1.7; EXPRESSED IN HELA, SIGNAL = 2.9; EXPRESSED IN HEART, SIGNAL = 2.3; EST_HUMAN HIT: AA328852.1, EVALUE 6.00e-08
VRSWPARSSSSSWPGCCRGSTWRCQMMGSCPPWKASPRWSF

SEQ ID NO: 41700 - protein, 28 aa, Homo sapiens
  MAP TO AL110505.3; EXPRESSED IN PLACENTA, SIGNAL =   2; EXPRESSED IN HELA, SIGNAL = 2.6; EXPRESSED IN HEART, SIGNAL = 3.2; EXPRESSED IN BRAIN, SIGNAL = 3.1; EXPRESSED IN LUNG, SIGNAL = 3.2; EXPRESSED IN FETAL LIVER, SIGNAL = 2.4; EXPRESSED IN BONE MARROW, SIGNAL = 2.1; EXPRESSED IN ADULT LIVER, SIGNAL = 3.4
VHLFIFSFRSMTLWDNLINFLIMVPVKV

SEQ ID NO: 41701 - protein, 94 aa, Homo sapiens [sequence omitted]

SEQ ID NO: 41702 - protein, 44 aa, Homo sapiens
  MAP TO AC025289.1; EXPRESSED IN PLACENTA, SIGNAL = 2.7; EXPRESSED IN BONE MARROW, SIGNAL = 3.3; EXPRESSED IN FETAL LIVER, SIGNAL = 3.9; EXPRESSED IN ADULT LIVER, SIGNAL = 2.1; EXPRESSED IN HEART, SIGNAL = 3.1; EXPRESSED IN BRAIN, SIGNAL = 1.4; EXPRESSED IN LUNG, SIGNAL =  11; EXPRESSED IN HELA, SIGNAL = 4.9; EST_HUMAN HIT: W21182.1, EVALUE 1.00e-17; SWISSPROT HIT: P39027, EVALUE 1.00e-18
MVRMNVLADALKSINNAEKRGKRQVLIRPCSKVIVRFLTVMMKH

SEQ ID NO: 41703 - protein, 46 aa, Homo sapiens
  MAP TO AC002041.1; EXPRESSED IN ADULT LIVER, SIGNAL = 5.6; EXPRESSED IN FETAL LIVER, SIGNAL =   2; EXPRESSED IN PLACENTA, SIGNAL = 1.7; EXPRESSED IN BONE MARROW, SIGNAL = 1.6; EXPRESSED IN LUNG, SIGNAL = 3.2; EXPRESSED IN HEART, SIGNAL =   2; EXPRESSED IN BRAIN, SIGNAL = 1.8; EXPRESSED IN HELA, SIGNAL = 2.1; EST_HUMAN HIT: BF091131.1, EVALUE 6.80e+00
SVPCESGPGAAAPHGAVLPFPQCLQKSCVKFIDGVRGGKIVHPVAH

SEQ ID NO: 41704 - protein, 29 aa, Homo sapiens
  MAP TO AC012566.3; EXPRESSED IN ADULT LIVER, SIGNAL =   2; EXPRESSED IN FETAL LIVER, SIGNAL =   2; EXPRESSED IN HEART, SIGNAL = 2.2; EXPRESSED IN BRAIN, SIGNAL = 2.5; EXPRESSED IN PLACENTA, SIGNAL = 1.4; EXPRESSED IN HELA, SIGNAL =   2
SSCDSQFRIHADSLQEKFSITEINFNINK

SEQ ID NO: 41705 - protein, 23 aa, Homo sapiens
  MAP TO AC012566.3; EXPRESSED IN ADULT LIVER, SIGNAL =   2; EXPRESSED IN FETAL LIVER, SIGNAL =   2; EXPRESSED IN HEART, SIGNAL = 2.2; EXPRESSED IN BRAIN, SIGNAL = 2.5; EXPRESSED IN PLACENTA, SIGNAL = 1.4; EXPRESSED IN HELA, SIGNAL =   2
IPVVTHNSEFMLIAYRKNSPLLR

SEQ ID NO: 41706 - protein, 91 aa, Homo sapiens
  MAP TO AL121985.13; EXPRESSED IN BONE MARROW, SIGNAL = 6.1; EXPRESSED IN HELA, SIGNAL = 7.8; EXPRESSED IN LUNG, SIGNAL = 5.9; EXPRESSED IN BRAIN, SIGNAL =   7; EXPRESSED IN PLACENTA, SIGNAL = 5.5; EXPRESSED IN ADULT LIVER, SIGNAL = 6.5; EXPRESSED IN FETAL LIVER, SIGNAL = 7.5; EXPRESSED IN HEART, SIGNAL = 6.4; EST_HUMAN HIT: AW963563.1, EVALUE 1.00e-33
GAVTFPLKSKVKQVDSIVWTFNTTPLVTIQPEGGTIIVTQNRNRERVDFPDGGYSLKLSKLKKNDSGIYYVGIYSSSLQQPSTQEYVLHVY

SEQ ID NO: 41707 - protein, 52 aa, Homo sapiens
  MAP TO AC018552.2; EXPRESSED IN PLACENTA, SIGNAL = 2.3; EXPRESSED IN BRAIN, SIGNAL = 1.6; EXPRESSED IN HEART, SIGNAL = 2.1; EXPRESSED IN HELA, SIGNAL = 1.8; EXPRESSED IN BONE MARROW, SIGNAL = 1.9; EXPRESSED IN FETAL LIVER, SIGNAL = 1.8; EXPRESSED IN ADULT LIVER, SIGNAL = 2.9; EST_HUMAN HIT: AW818630.1, EVALUE 2.00e-16
QLAAVVMSGSFALSLKLFHISLSLFATSPIEMPGFVDLSSGQNSEQNRKNPD

SEQ ID NO: 41708 - protein, 30 aa, Homo sapiens
  MAP TO AC018552.2; EXPRESSED IN PLACENTA, SIGNAL = 2.3; EXPRESSED IN BRAIN, SIGNAL = 1.6; EXPRESSED IN HEART, SIGNAL = 2.1; EXPRESSED IN HELA, SIGNAL = 1.8; EXPRESSED IN BONE MARROW, SIGNAL = 1.9; EXPRESSED IN FETAL LIVER, SIGNAL = 1.8; EXPRESSED IN ADULT LIVER, SIGNAL = 2.9; EST_HUMAN HIT: BF196800.1, EVALUE 5.00e-08
HLDSSCSVQNSAPRTNPQTLASLLEMWQKG

SEQ ID NO: 41709 - protein, 41 aa, Homo sapiens
  MAP TO AL133124.2; EXPRESSED IN BRAIN, SIGNAL = 1.6; EXPRESSED IN PLACENTA, SIGNAL = 1.9; EXPRESSED IN HEART, SIGNAL = 2.2; EXPRESSED IN ADULT LIVER, SIGNAL = 2.2; EXPRESSED IN BONE MARROW, SIGNAL = 7.6; EXPRESSED IN HELA, SIGNAL = 2.1; EXPRESSED IN LUNG, SIGNAL = 2.7; EXPRESSED IN FETAL LIVER, SIGNAL = 3.6; SWISSPROT HIT: P10720, EVALUE 6.00e-19; EST_HUMAN HIT: AI078445.1, EVALUE 8.00e-18
EAEEDGDLQCLCVKTTSQVRPRHITSLEVIKAGPHCPTAQL

SEQ ID NO: 41710 - protein, 40 aa, Homo sapiens
  MAP TO AC022377.1; EXPRESSED IN PLACENTA, SIGNAL =   2; EXPRESSED IN HEART, SIGNAL = 2.7; EXPRESSED IN BRAIN, SIGNAL = 2.3; EXPRESSED IN LUNG, SIGNAL = 1.7; EXPRESSED IN HELA, SIGNAL = 2.9; EXPRESSED IN FETAL LIVER, SIGNAL = 2.9; EXPRESSED IN BONE MARROW, SIGNAL =   2; EXPRESSED IN ADULT LIVER, SIGNAL = 2.5; SWISSPROT HIT: Q64691, EVALUE 6.30e+00
LFDLHFHRNSQFYHIITVIMFAQYCDYYKVLALERLVLCD

SEQ ID NO: 41711 - protein, 50 aa, Homo sapiens
  MAP TO AC016372.2; EXPRESSED IN BRAIN, SIGNAL = 5.2; EXPRESSED IN HELA, SIGNAL =   2; EXPRESSED IN FETAL LIVER, SIGNAL = 2.6; EXPRESSED IN LUNG, SIGNAL = 4.3; EXPRESSED IN PLACENTA, SIGNAL = 4.9; EXPRESSED IN HEART, SIGNAL = 7.4; EXPRESSED IN BONE MARROW, SIGNAL = 1.7; EXPRESSED IN ADULT LIVER, SIGNAL = 3.3; SWISSPROT HIT: P37913, EVALUE 9.30e-01; EST_HUMAN HIT: R17222.1, EVALUE 5.00e-23
FLSDTKDRGPPVQSQIWRSGEKVPFVQTYSLRAFEKPPQVQTQALRDFEK

SEQ ID NO: 41712 - protein, 31 aa, Homo sapiens
  MAP TO AC016372.2; EXPRESSED IN BRAIN, SIGNAL = 5.2; EXPRESSED IN HELA, SIGNAL =   2; EXPRESSED IN FETAL LIVER, SIGNAL = 2.6; EXPRESSED IN LUNG, SIGNAL = 4.3; EXPRESSED IN PLACENTA, SIGNAL = 4.9; EXPRESSED IN HEART, SIGNAL = 7.4; EXPRESSED IN BONE MARROW, SIGNAL = 1.7; EXPRESSED IN ADULT LIVER, SIGNAL = 3.3; EST_HUMAN HIT: BE799630.1, EVALUE 1.00e-10
LFLVTLKIEALQCSHRSGEVVKRSRLCRHIP

SEQ ID NO: 41713 - protein, 25 aa, Homo sapiens
  MAP TO AC005411.1; EXPRESSED IN BRAIN, SIGNAL = 2.6; EXPRESSED IN PLACENTA, SIGNAL = 1.7; EXPRESSED IN BONE MARROW, SIGNAL =   2; EXPRESSED IN LUNG, SIGNAL = 2.1; EXPRESSED IN ADULT LIVER, SIGNAL = 2.4; EXPRESSED IN HELA, SIGNAL = 2.3; EXPRESSED IN FETAL LIVER, SIGNAL = 2.2; EXPRESSED IN HEART, SIGNAL = 2.5
MFSWGVATAATEEGSVALSGSRRQA

SEQ ID NO: 41714 - protein, 48 aa, Homo sapiens
  MAP TO AC012664.3; EXPRESSED IN BRAIN, SIGNAL = 2.2; EXPRESSED IN ADULT LIVER, SIGNAL = 2.3; EXPRESSED IN BONE MARROW, SIGNAL =   2; EXPRESSED IN LUNG, SIGNAL = 4.2; EXPRESSED IN PLACENTA, SIGNAL =   2; EXPRESSED IN HEART, SIGNAL = 2.1; EXPRESSED IN HELA, SIGNAL = 2.2; EXPRESSED IN FETAL LIVER, SIGNAL = 2.3; SWISSPROT HIT: Q14191, EVALUE 6.20e+00; EST_HUMAN HIT: BF334664.1, EVALUE 1.00e-08
LNHFEEQLKVLSFAGNVVFVFLAAPCSAMAYHHDSRRIFVGQDNGAVM

SEQ ID NO: 41715 - protein, 26 aa, Homo sapiens
  MAP TO AC011483.2; EXPRESSED IN ADULT LIVER, SIGNAL = 3.2; EXPRESSED IN FETAL LIVER, SIGNAL = 3.3; EXPRESSED IN LUNG, SIGNAL = 2.9; EXPRESSED IN PLACENTA, SIGNAL = 2.3; EXPRESSED IN BRAIN, SIGNAL =   3; EXPRESSED IN BONE MARROW, SIGNAL = 2.7; EXPRESSED IN HELA, SIGNAL = 3.5; EXPRESSED IN HEART, SIGNAL = 3.1
MVFIRALVVPVTRCGTDEADAGTVLV

SEQ ID NO: 41716 - protein, 25 aa, Homo sapiens
  MAP TO AC011483.2; EXPRESSED IN ADULT LIVER, SIGNAL = 3.2; EXPRESSED IN FETAL LIVER, SIGNAL = 3.3; EXPRESSED IN LUNG, SIGNAL = 2.9; EXPRESSED IN PLACENTA, SIGNAL = 2.3; EXPRESSED IN BRAIN, SIGNAL =   3; EXPRESSED IN BONE MARROW, SIGNAL = 2.7; EXPRESSED IN HELA, SIGNAL = 3.5; EXPRESSED IN HEART, SIGNAL = 3.1
TRTVPASASSVPHLVTGTTRALMNT

SEQ ID NO: 41717 - protein, 41 aa, Homo sapiens
  MAP TO AC021097.3; EXPRESSED IN BRAIN, SIGNAL =   2; EXPRESSED IN PLACENTA, SIGNAL = 1.5; EXPRESSED IN HELA, SIGNAL = 1.7; EXPRESSED IN LUNG, SIGNAL = 2.9; EXPRESSED IN HEART, SIGNAL = 2.8; SWISSPROT HIT: Q61466, EVALUE 8.00e-07; EST_HUMAN HIT: AA035796.1, EVALUE 4.00e-16
IHETIESINQLKIQRDFMLSFSRDPKGYVQDLLRSQSRDLK

SEQ ID NO: 41718 - protein, 59 aa, Homo sapiens
  MAP TO AC011298.2; EXPRESSED IN BRAIN, SIGNAL = 3.3; EXPRESSED IN ADULT LIVER, SIGNAL =   3; EXPRESSED IN HELA, SIGNAL = 3.1; EXPRESSED IN BONE MARROW, SIGNAL = 2.6; EXPRESSED IN LUNG, SIGNAL = 2.9; EXPRESSED IN PLACENTA, SIGNAL = 2.3; EXPRESSED IN HEART, SIGNAL = 2.7; EXPRESSED IN FETAL LIVER, SIGNAL = 2.7
DPETGGYSLEVSQRCQDLDTGSTAQLVKGGLAEAAPAQTQRAASSETAVQAWTRDLMPQ

SEQ ID NO: 41719 - protein, 98 aa, Homo sapiens
  MAP TO AC005212.1; EXPRESSED IN BRAIN, SIGNAL = 3.2; EXPRESSED IN PLACENTA, SIGNAL = 2.5; EXPRESSED IN BONE MARROW, SIGNAL = 1.8; EXPRESSED IN FETAL LIVER, SIGNAL = 1.9; EXPRESSED IN HELA, SIGNAL = 2.4; EXPRESSED IN HEART, SIGNAL = 2.5; EXPRESSED IN LUNG, SIGNAL = 9.9; EXPRESSED IN ADULT LIVER, SIGNAL = 2.3; SWISSPROT HIT: Q99758, EVALUE 5.00e-38; EST_HUMAN HIT: H78721.1, EVALUE 1.50e+00
HHRALLYLFQKRKVLVTVLELFLPLLFSGILIWLRLKIQSENVPNATIYPGQSIQELPLFFTFPPPGDTWELAYIPSHSDAAKTVTETVRRALVINMR

SEQ ID NO: 41720 - protein, 61 aa, Homo sapiens
  MAP TO AC005212.1; EXPRESSED IN BRAIN, SIGNAL = 3.2; EXPRESSED IN PLACENTA, SIGNAL = 2.5; EXPRESSED IN BONE MARROW, SIGNAL = 1.8; EXPRESSED IN FETAL LIVER, SIGNAL = 1.9; EXPRESSED IN HELA, SIGNAL = 2.4; EXPRESSED IN HEART, SIGNAL = 2.5; EXPRESSED IN LUNG, SIGNAL = 9.9; EXPRESSED IN ADULT LIVER, SIGNAL = 2.3; SWISSPROT HIT: Q90270, EVALUE 4.00e-01; EST_HUMAN HIT: BF220030.1, EVALUE 1.00e-01
PGTLPAIAVFWDPHLAPLEDSVGKCAQRHHLPGPVHPGAASVLHLPSARRHLGACLHPFSQ

SEQ ID NO: 41721 - protein, 46 aa, Homo sapiens
  MAP TO AC015971.2; EXPRESSED IN BRAIN, SIGNAL =   2; EXPRESSED IN PLACENTA, SIGNAL = 1.5; EXPRESSED IN BONE MARROW, SIGNAL = 1.8; EXPRESSED IN HEART, SIGNAL =   2; EXPRESSED IN LUNG, SIGNAL = 4.3; EST_HUMAN HIT: BF310134.1, EVALUE 2.00e-15; SWISSPROT HIT: Q56815, EVALUE 2.80e+00
SFSAGPAQAAARDLPGRGELKAGRGKTGSVRHGAVWKDPGEAAQRT

SEQ ID NO: 41722 - protein, 42 aa, Homo sapiens
  MAP TO AC008469.4; EXPRESSED IN BRAIN, SIGNAL = 2.7; EXPRESSED IN PLACENTA, SIGNAL = 2.8; EXPRESSED IN FETAL LIVER, SIGNAL = 3.7; EXPRESSED IN LUNG, SIGNAL = 4.3; EXPRESSED IN ADULT LIVER, SIGNAL = 3.1; EXPRESSED IN BONE MARROW, SIGNAL = 2.9; EXPRESSED IN HELA, SIGNAL = 4.2; EXPRESSED IN HEART, SIGNAL = 3.7; EST_HUMAN HIT: BE266187.1, EVALUE 1.00e-05
HPRLPEVLQQLPRLTVTLCFLGFFYRQNWRFLSLDSWDLIQA

SEQ ID NO: 41723 - protein, 148 aa, Homo sapiens
  MAP TO AL049829.3; EXPRESSED IN ADULT LIVER, SIGNAL = 1.9; EXPRESSED IN BONE MARROW, SIGNAL = 1.8; EXPRESSED IN LUNG, SIGNAL = 2.4; EXPRESSED IN PLACENTA, SIGNAL = 1.7; EXPRESSED IN FETAL LIVER, SIGNAL = 1.8; EXPRESSED IN HELA, SIGNAL = 2.2; EXPRESSED IN HEART, SIGNAL =   2; EXPRESSED IN BRAIN, SIGNAL = 2.1; SWISSPROT HIT: P48002, EVALUE 1.40e-02; EST_HUMAN HIT: AW057621.1, EVALUE 2.00e-72
ISEGHKSEGTMPPNKEASGLSSSPAGLICLPPISEELQLVWTQAAQTSELDSNEHLLKTFSYFPYPSLADIALLCLRYGLQMEKVKTWFMAQRLRCGISWSSEEIEETRARVVYRRDQLHFKSLLSFTHHAGRPPEEVPPPPVPAPEQ

SEQ ID NO: 41724 - protein, 29 aa, Homo sapiens
  MAP TO AL133380.3; EXPRESSED IN FETAL LIVER, SIGNAL = 1.7; EXPRESSED IN HEART, SIGNAL =  22; EXPRESSED IN PLACENTA, SIGNAL =   2; EXPRESSED IN BRAIN, SIGNAL = 1.8; EXPRESSED IN HELA, SIGNAL = 1.9; EXPRESSED IN ADULT LIVER, SIGNAL = 1.9; EXPRESSED IN BONE MARROW, SIGNAL = 1.6; EXPRESSED IN LUNG, SIGNAL = 2.7
AASLFAKETEFYIDAAEAPLQGSPVALYN

SEQ ID NO: 41725 - protein, 29 aa, Homo sapiens
  MAP TO AL133380.3; EXPRESSED IN FETAL LIVER, SIGNAL = 1.7; EXPRESSED IN HEART, SIGNAL =  22; EXPRESSED IN PLACENTA, SIGNAL =   2; EXPRESSED IN BRAIN, SIGNAL = 1.8; EXPRESSED IN HELA, SIGNAL = 1.9; EXPRESSED IN ADULT LIVER, SIGNAL = 1.9; EXPRESSED IN BONE MARROW, SIGNAL = 1.6; EXPRESSED IN LUNG, SIGNAL = 2.7; EST_HUMAN HIT: AW961577.1, EVALUE 2.00e-03
LLLCLPRRLSSTLMQLKLLCRVPLWPYTI

SEQ ID NO: 41726 - protein, 48 aa, Homo sapiens
  MAP TO AL133246.1; EXPRESSED IN BRAIN, SIGNAL = 4.8; EXPRESSED IN PLACENTA, SIGNAL = 4.3; EXPRESSED IN HEART, SIGNAL = 6.4; EXPRESSED IN BONE MARROW, SIGNAL = 4.1; EXPRESSED IN ADULT LIVER, SIGNAL = 5.3; EXPRESSED IN HELA, SIGNAL = 8.5; EXPRESSED IN LUNG, SIGNAL =   5; EXPRESSED IN FETAL LIVER, SIGNAL = 7.3; EST_HUMAN HIT: AV726712.1, EVALUE 2.30e-02
VKNANDANSAARARRLAQEAVTLSTSLPLSSSSSVFVRCDEERLDIMK

SEQ ID NO: 41727 - protein, 33 aa, Homo sapiens
  MAP TO AC024006.2; EXPRESSED IN BRAIN, SIGNAL = 3.9; EXPRESSED IN HELA, SIGNAL = 3.5; EXPRESSED IN FETAL LIVER, SIGNAL = 3.3; EXPRESSED IN PLACENTA, SIGNAL = 3.1; EXPRESSED IN LUNG, SIGNAL =   6; EXPRESSED IN HEART, SIGNAL = 2.7; EXPRESSED IN BONE MARROW, SIGNAL =   3; EXPRESSED IN ADULT LIVER, SIGNAL = 3.3
VNIRPAHSITIYLQSNGEKDKIKLSNTASLLIP

SEQ ID NO: 41728 - protein, 90 aa, Homo sapiens
  MAP TO AL136418.1; EXPRESSED IN BRAIN, SIGNAL = 1.6; EXPRESSED IN FETAL LIVER, SIGNAL = 2.3; EXPRESSED IN HELA, SIGNAL = 2.1; EXPRESSED IN ADULT LIVER, SIGNAL = 1.8; EXPRESSED IN BONE MARROW, SIGNAL =   2; EXPRESSED IN HEART, SIGNAL = 1.9; EXPRESSED IN LUNG, SIGNAL = 2.8; EXPRESSED IN PLACENTA, SIGNAL = 8.6; EST_HUMAN HIT: BE243270.1, EVALUE 7.00e-35
DLLRSELPDSIESALQGDERCVLDTMRLVDLLLVLLFEGRKALPKSSAGSTGRIPGLRRLDSSGERSHRQLIDCIRSKDTDALIDAIDTG

SEQ ID NO: 41729 - protein, 96 aa, Homo sapiens
  MAP TO AC019205.2; EXPRESSED IN BRAIN, SIGNAL = 2.8; EXPRESSED IN HEART, SIGNAL = 4.9; EXPRESSED IN ADULT LIVER, SIGNAL = 3.2; EXPRESSED IN BONE MARROW, SIGNAL = 2.5; EXPRESSED IN FETAL LIVER, SIGNAL = 2.7; EXPRESSED IN HELA, SIGNAL = 5.6; EXPRESSED IN PLACENTA, SIGNAL = 2.7; EST_HUMAN HIT: AI652239.1, EVALUE 8.00e-43; SWISSPROT HIT: P41777, EVALUE 4.20e-01
SGKALAQDVATQKAETQRSSIEVREAGTQRSVEVREAGTQRSVEVQEVGTQGSPVEVQEAGTQQSLQAANKSGTQRSPEAASKAVTQRFREDARDP

SEQ ID NO: 41730 - protein, 21 aa, Homo sapiens
  MAP TO AC019205.2; EXPRESSED IN BRAIN, SIGNAL = 2.8; EXPRESSED IN HEART, SIGNAL = 4.9; EXPRESSED IN ADULT LIVER, SIGNAL = 3.2; EXPRESSED IN BONE MARROW, SIGNAL = 2.5; EXPRESSED IN FETAL LIVER, SIGNAL = 2.7; EXPRESSED IN HELA, SIGNAL = 5.6; EXPRESSED IN PLACENTA, SIGNAL = 2.7
AQERPSPRMSPLRRPRPSGLQ

SEQ ID NO: 41731 - protein, 55 aa, Homo sapiens [sequence omitted]

SEQ ID NO: 41732 - protein, 37 aa, Homo sapiens
  MAP TO AC017024.3; EXPRESSED IN BRAIN, SIGNAL = 3.3; EXPRESSED IN PLACENTA, SIGNAL = 2.2; EXPRESSED IN FETAL LIVER, SIGNAL = 2.9; EXPRESSED IN HELA, SIGNAL = 2.7; EXPRESSED IN ADULT LIVER, SIGNAL = 2.6; EXPRESSED IN BONE MARROW, SIGNAL =   3; EXPRESSED IN HEART, SIGNAL = 2.5; EXPRESSED IN LUNG, SIGNAL = 3.3
KYKSKFQITNSSEMMAKADIYPVNVFRVKKKDTYYLL

SEQ ID NO: 41733 - protein, 29 aa, Homo sapiens
  MAP TO AL158148.1; EXPRESSED IN BRAIN, SIGNAL = 7.3; EXPRESSED IN PLACENTA, SIGNAL =   5; EXPRESSED IN ADULT LIVER, SIGNAL = 5.9; EXPRESSED IN BONE MARROW, SIGNAL = 4.6; EXPRESSED IN FETAL LIVER, SIGNAL = 7.5; EXPRESSED IN HELA, SIGNAL = 7.4; EXPRESSED IN HEART, SIGNAL = 6.6; EXPRESSED IN LUNG, SIGNAL =   6
MVKPNSNSKLLRRFLTLVRFLSALDTRQE

SEQ ID NO: 41734 - protein, 38 aa, Homo sapiens; identical to SEQ ID NO: 40194
  MAP TO AC013707.2; EXPRESSED IN ADULT LIVER, SIGNAL = 2.9; EXPRESSED IN LUNG, SIGNAL = 3.4; EXPRESSED IN HEART, SIGNAL = 3.3; EXPRESSED IN BRAIN, SIGNAL = 2.4; EXPRESSED IN PLACENTA, SIGNAL = 4.1; EXPRESSED IN HELA, SIGNAL =   4; EXPRESSED IN BONE MARROW, SIGNAL = 2.3; EXPRESSED IN FETAL LIVER, SIGNAL = 3.2

SEQ ID NO: 41735 - protein, 25 aa, Homo sapiens
  MAP TO AC013707.2; EXPRESSED IN ADULT LIVER, SIGNAL = 2.9; EXPRESSED IN LUNG, SIGNAL = 3.4; EXPRESSED IN HEART, SIGNAL = 3.3; EXPRESSED IN BRAIN, SIGNAL = 2.4; EXPRESSED IN PLACENTA, SIGNAL = 4.1; EXPRESSED IN HELA, SIGNAL =   4; EXPRESSED IN BONE MARROW, SIGNAL = 2.3; EXPRESSED IN FETAL LIVER, SIGNAL = 3.2
CTAHSAYLLNSPITIMHSICQIILL

SEQ ID NO: 41736 - protein, 22 aa, Homo sapiens
  MAP TO AC008786.6; EXPRESSED IN HEART, SIGNAL = 9.1; EXPRESSED IN PLACENTA, SIGNAL = 9.5; EXPRESSED IN BRAIN, SIGNAL = 8.8; EXPRESSED IN LUNG, SIGNAL = 8.8; EXPRESSED IN ADULT LIVER, SIGNAL = 7.9; EXPRESSED IN BONE MARROW, SIGNAL = 8.2; EXPRESSED IN FETAL LIVER, SIGNAL = 9.2; EXPRESSED IN HELA, SIGNAL = 9.8
YAWSSVRHWAYKKSWSSGDSQF

SEQ ID NO: 41737 - protein, 155 aa, Homo sapiens
  MAP TO AC007608.2; EXPRESSED IN BRAIN, SIGNAL = 5.1; EXPRESSED IN PLACENTA, SIGNAL = 3.6; EXPRESSED IN FETAL LIVER, SIGNAL = 4.3; EXPRESSED IN HELA, SIGNAL = 4.3; EXPRESSED IN BONE MARROW, SIGNAL = 3.8; EXPRESSED IN LUNG, SIGNAL = 4.7; EXPRESSED IN ADULT LIVER, SIGNAL = 4.3; EXPRESSED IN HEART, SIGNAL = 2.9; EST_HUMAN HIT: AW845499.1, EVALUE 4.00e-28; SWISSPROT HIT: P43527, EVALUE 4.20e-01
CEMCSQEAFQAQRSQLVELLVSGSLEGFESVLDWLLSWEVLSWEDYEGFHLLGQPLSHLARRLLDTVWNKGTWACQKLIAAAQEAQADSQSPKLHGCWDPHSLHPARDLQSHRPAIVRRLHSHVENMLDLAWERGFVSQYECDEIRLPIFTPSQR

SEQ ID NO: 41738 - protein, 146 aa, Homo sapiens
  MAP TO AC007608.2; EXPRESSED IN BRAIN, SIGNAL = 5.1; EXPRESSED IN PLACENTA, SIGNAL = 3.6; EXPRESSED IN FETAL LIVER, SIGNAL = 4.3; EXPRESSED IN HELA, SIGNAL = 4.3; EXPRESSED IN BONE MARROW, SIGNAL = 3.8; EXPRESSED IN LUNG, SIGNAL = 4.7; EXPRESSED IN ADULT LIVER, SIGNAL = 4.3; EXPRESSED IN HEART, SIGNAL = 2.9; SWISSPROT HIT: P14728, EVALUE 2.00e-02; EST_HUMAN HIT: AW845499.1, EVALUE 2.00e-26
VVKCARRRLFRHRGASWSSCWSQGPWKASRVSWTGCCPGRSSPGRTTRASTSWASLSPTWPGAFWTPSGIRVLGPVRSSSRLPKKPRPTASPPSCMAAGTPTRSTQPETCRVTGQPLSGGSTAMWRTCWTWHGSGVSSASMNVMKS

SEQ ID NO: 41739 - protein, 53 aa, Homo sapiens
  MAP TO AC011489.3; EXPRESSED IN BRAIN, SIGNAL = 3.2; EXPRESSED IN PLACENTA, SIGNAL =   3; EXPRESSED IN FETAL LIVER, SIGNAL = 3.8; EXPRESSED IN HELA, SIGNAL = 3.5; EXPRESSED IN ADULT LIVER, SIGNAL = 2.9; EXPRESSED IN BONE MARROW, SIGNAL = 2.5; EXPRESSED IN HEART, SIGNAL = 3.2; EXPRESSED IN LUNG, SIGNAL =   4; SWISSPROT HIT: O18303, EVALUE 4.70e+00
MGGLQSLRISMIKDERSEVRGWVPVPGADVRPEPHPADAVGAVFPHEAVGVDS

SEQ ID NO: 41740 - protein, 72 aa, Homo sapiens
  MAP TO AC010198.8; EXPRESSED IN BRAIN, SIGNAL = 1.5; EXPRESSED IN PLACENTA, SIGNAL = 1.9; EXPRESSED IN HELA, SIGNAL = 3.3; EXPRESSED IN FETAL LIVER, SIGNAL = 3.6; EXPRESSED IN HEART, SIGNAL = 2.3; EXPRESSED IN LUNG, SIGNAL = 1.9; EST_HUMAN HIT: AI251752.1, EVALUE 2.00e-25; SWISSPROT HIT: Q02004, EVALUE 4.00e+00
KGYTRQQFCQESTLNKGDRVIYNLTRPPYCCVQFPIAGMGPHILYLSRLASNLELFKRGKGRGEQKKEEVTC

SEQ ID NO: 41741 - protein, 21 aa, Homo sapiens
  MAP TO AC010198.8; EXPRESSED IN BRAIN, SIGNAL = 1.5; EXPRESSED IN PLACENTA, SIGNAL = 1.9; EXPRESSED IN HELA, SIGNAL = 3.3; EXPRESSED IN FETAL LIVER, SIGNAL = 3.6; EXPRESSED IN HEART, SIGNAL = 2.3; EXPRESSED IN LUNG, SIGNAL = 1.9; EST_HUMAN HIT: AI251752.1, EVALUE 3.00e-04
RVHSPAVLPGEYTEQRRQGHL

SEQ ID NO: 41742 - protein, 47 aa, Homo sapiens
  MAP TO AC005323.1; EXPRESSED IN BRAIN, SIGNAL =  18; EXPRESSED IN BONE MARROW, SIGNAL =  15; EXPRESSED IN FETAL LIVER, SIGNAL = 8.2; EXPRESSED IN LUNG, SIGNAL =  22; EXPRESSED IN HEART, SIGNAL = 8.7; EXPRESSED IN PLACENTA, SIGNAL =  11; EXPRESSED IN HELA, SIGNAL = 8.7; EXPRESSED IN ADULT LIVER, SIGNAL =  16; EST_HUMAN HIT: AU117776.1, EVALUE 5.00e-11; SWISSPROT HIT: P13535, EVALUE 2.00e-21
TVTVKDDQVFPMNPPKYDKIEDMAMMTHLHEPAVLYNLKERYAAWMI

SEQ ID NO: 41743 - protein, 59 aa, Homo sapiens
  MAP TO AC015755.4; EXPRESSED IN BRAIN, SIGNAL = 3.5; EXPRESSED IN PLACENTA, SIGNAL =   3; EXPRESSED IN ADULT LIVER, SIGNAL = 3.7; EXPRESSED IN BONE MARROW, SIGNAL = 2.9; EXPRESSED IN FETAL LIVER, SIGNAL = 4.3; EXPRESSED IN HELA, SIGNAL = 4.8; EXPRESSED IN HEART, SIGNAL =   4; EXPRESSED IN LUNG, SIGNAL = 2.2
ETTTITTTTTTKTNKTLPVTGQSFKEFMKIFTRDLPAPKALSCVITMMQGVFLTPSRDS

SEQ ID NO: 41744 - protein, 73 aa, Homo sapiens
  MAP TO AL133243.1; EXPRESSED IN FETAL LIVER, SIGNAL = 3.9; EXPRESSED IN PLACENTA, SIGNAL = 2.4; EXPRESSED IN BRAIN, SIGNAL = 2.4; EXPRESSED IN HEART, SIGNAL = 3.7; EXPRESSED IN ADULT LIVER, SIGNAL =   3; EXPRESSED IN BONE MARROW, SIGNAL = 2.4; EXPRESSED IN HELA, SIGNAL = 4.2; EST_HUMAN HIT: BF335849.1, EVALUE 2.00e-32; SWISSPROT HIT: P54676, EVALUE 5.70e-01
NSWDEHVFELVLPKACMVGHVDFKFVLNSNITNIPQIQVTLLKNKAPGLGKVNGKNVSKFIFEDFILWLISEN

SEQ ID NO: 41745 - protein, 25 aa, Homo sapiens
  MAP TO AC017025.3; EXPRESSED IN BRAIN, SIGNAL = 2.4; EXPRESSED IN PLACENTA, SIGNAL = 1.5; EXPRESSED IN HELA, SIGNAL = 2.3; EXPRESSED IN ADULT LIVER, SIGNAL = 2.2; EXPRESSED IN BONE MARROW, SIGNAL = 1.8; EXPRESSED IN FETAL LIVER, SIGNAL = 1.8; EXPRESSED IN HEART, SIGNAL =   3; EST_HUMAN HIT: BE378480.1, EVALUE 9.00e-08
GDIPCSAFSYGVVTEDASVRHVPEN

SEQ ID NO: 41746 - protein, 18 aa, Homo sapiens
  MAP TO AC007340.3; EXPRESSED IN BRAIN, SIGNAL = 3.4; EXPRESSED IN PLACENTA, SIGNAL = 3.3; EXPRESSED IN ADULT LIVER, SIGNAL =   4; EXPRESSED IN BONE MARROW, SIGNAL = 2.8; EXPRESSED IN FETAL LIVER, SIGNAL = 4.1; EXPRESSED IN HELA, SIGNAL = 4.3; EXPRESSED IN HEART, SIGNAL = 3.3; EXPRESSED IN LUNG, SIGNAL = 2.5; EST_HUMAN HIT: AW901484.1, EVALUE 6.00e-03
RVQSFFLLVGSWSRWLQE

SEQ ID NO: 41747 - protein, 45 aa, Homo sapiens
  MAP TO AL137852.2; EXPRESSED IN BRAIN, SIGNAL = 3.2; EXPRESSED IN ADULT LIVER, SIGNAL = 1.6; EXPRESSED IN PLACENTA, SIGNAL = 4.4; EXPRESSED IN LUNG, SIGNAL = 6.1; EXPRESSED IN HEART, SIGNAL = 2.3; EXPRESSED IN HELA, SIGNAL = 2.8; EXPRESSED IN FETAL LIVER, SIGNAL = 3.7; EXPRESSED IN BONE MARROW, SIGNAL = 3.4; EST_HUMAN HIT: BE166667.1, EVALUE 3.00e-07; SWISSPROT HIT: P54727, EVALUE 2.00e-08
GIPGDRESQAVVDPPQAASTGAPQSSAVAAAAATTTATTTTTSSG

SEQ ID NO: 41748 - protein, 36 aa, Homo sapiens
  MAP TO AC008394.3; EXPRESSED IN BRAIN, SIGNAL = 2.2; EXPRESSED IN PLACENTA, SIGNAL = 1.9; EXPRESSED IN BONE MARROW, SIGNAL = 1.7; EXPRESSED IN ADULT LIVER, SIGNAL = 1.9; EXPRESSED IN FETAL LIVER, SIGNAL = 3.2; EXPRESSED IN HELA, SIGNAL = 3.3; EXPRESSED IN HEART, SIGNAL = 2.9; EST_HUMAN HIT: AA723404.1, EVALUE 1.00e-07
FHMAGEDSGNLQSWLKVKEKQGITYMAAAERESNTG

SEQ ID NO: 41749 - protein, 106 aa, Homo sapiens
  MAP TO AP001243.1; EXPRESSED IN PLACENTA, SIGNAL = 1.5; EXPRESSED IN BRAIN, SIGNAL =   2; EXPRESSED IN HELA, SIGNAL = 2.4; EXPRESSED IN ADULT LIVER, SIGNAL =   2; EXPRESSED IN BONE MARROW, SIGNAL = 5.3; EXPRESSED IN LUNG, SIGNAL = 5.4; EXPRESSED IN FETAL LIVER, SIGNAL =   2; EXPRESSED IN HEART, SIGNAL =   2; EST_HUMAN HIT: AW404795.1, EVALUE 5.00e-54; SWISSPROT HIT: P06310, EVALUE 9.00e-47
SSGDIVMTQTPLSSPVTLGQPASISCRSSQSLVHSDGNTYLSWLQQRPGQPPRLLIYKISNRFSGVPDRFSGSGAGTDFTLKISRVEAEDVGVYYCTQATQFPHTV

SEQ ID NO: 41750 - protein, 25 aa, Homo sapiens
  MAP TO AC021881.2; EXPRESSED IN FETAL LIVER, SIGNAL = 5.5; EXPRESSED IN HEART, SIGNAL =  21; EXPRESSED IN LUNG, SIGNAL = 2.5; EXPRESSED IN BRAIN, SIGNAL =   3; EXPRESSED IN ADULT LIVER, SIGNAL = 2.2; EXPRESSED IN BONE MARROW, SIGNAL = 2.1; EXPRESSED IN HELA, SIGNAL = 6.5; EXPRESSED IN PLACENTA, SIGNAL = 2.2; EST_HUMAN HIT: BF575796.1, EVALUE 1.00e-05
RQVRPLDTLTQTPIRTKASPGERIH

SEQ ID NO: 41751 - protein, 33 aa, Homo sapiens
  MAP TO AC008843.4; EXPRESSED IN FETAL LIVER, SIGNAL = 1.9; EXPRESSED IN HEART, SIGNAL = 1.8; EXPRESSED IN PLACENTA, SIGNAL = 1.9; EXPRESSED IN BRAIN, SIGNAL =   2; EXPRESSED IN BONE MARROW, SIGNAL = 1.5; EXPRESSED IN LUNG, SIGNAL = 1.9; EXPRESSED IN ADULT LIVER, SIGNAL = 2.5; EXPRESSED IN HELA, SIGNAL = 2.7
RMTAWTTKNGLHLVMAKGGVPVEDYRDEEMKIG

SEQ ID NO: 41752 - protein, 26 aa, Homo sapiens
  MAP TO AC008752.3; EXPRESSED IN BRAIN, SIGNAL = 3.2; EXPRESSED IN PLACENTA, SIGNAL = 2.9; EXPRESSED IN FETAL LIVER, SIGNAL = 5.9; EXPRESSED IN ADULT LIVER, SIGNAL = 3.7; EXPRESSED IN BONE MARROW, SIGNAL = 2.7; EXPRESSED IN HELA, SIGNAL = 5.7; EXPRESSED IN HEART, SIGNAL = 4.8; EST_HUMAN HIT: BE090935.1, EVALUE 5.00e-04
QEATVDGNSVRIVKRSSGSCFSLRHT

SEQ ID NO: 41753 - protein, 114 aa, Homo sapiens
  MAP TO AL138827.2; EXPRESSED IN BRAIN, SIGNAL = 7.5; EXPRESSED IN PLACENTA, SIGNAL = 8.4; EXPRESSED IN HELA, SIGNAL =  10; EXPRESSED IN ADULT LIVER, SIGNAL = 8.6; EXPRESSED IN BONE MARROW, SIGNAL = 7.3; EXPRESSED IN HEART, SIGNAL = 9.2; EXPRESSED IN LUNG, SIGNAL = 7.1; EXPRESSED IN FETAL LIVER, SIGNAL =  10; EST_HUMAN HIT: BF196846.1, EVALUE 1.00e-21; SWISSPROT HIT: P28566, EVALUE 4.00e-62
PTTEFEKFHASIRIPPFDNDLDHPGERQQISSTRERKAARILGLILGAFILSWLPFFIKELIVGLSIYTVSSEVADFLTWLGYVNSLINPLLYTSFNEDFKLAFKKLIRCREHT

SEQ ID NO: 41754 - protein, 21 aa, Homo sapiens
  MAP TO AL138827.2; EXPRESSED IN BRAIN, SIGNAL = 7.5; EXPRESSED IN PLACENTA, SIGNAL = 8.4; EXPRESSED IN HELA, SIGNAL =  10; EXPRESSED IN ADULT LIVER, SIGNAL = 8.6; EXPRESSED IN BONE MARROW, SIGNAL = 7.3; EXPRESSED IN HEART, SIGNAL = 9.2; EXPRESSED IN LUNG, SIGNAL = 7.1; EXPRESSED IN FETAL LIVER, SIGNAL =  10
TLPQSLKSSMPPSGSPPSTMI

SEQ ID NO: 41755 - protein, 76 aa, Homo sapiens
  MAP TO AL135931.4; EXPRESSED IN BRAIN, SIGNAL = 3.7; EXPRESSED IN HELA, SIGNAL = 2.8; EXPRESSED IN PLACENTA, SIGNAL = 2.7; EXPRESSED IN LUNG, SIGNAL = 2.6; EXPRESSED IN HEART, SIGNAL = 2.7; EXPRESSED IN FETAL LIVER, SIGNAL = 2.9; EXPRESSED IN BONE MARROW, SIGNAL = 2.7; EXPRESSED IN ADULT LIVER, SIGNAL = 3.5; EST_HUMAN HIT: AW877042.1, EVALUE 6.00e-38; SWISSPROT HIT: P56121, EVALUE 2.40e+00
VFILNLVCRDLGLKDSVLAGLKAVFPLLYVRRIEGEVNEILFCQLHPEQKLATPELLETAQALERTLRKPGRGWDD

SEQ ID NO: 41756 - protein, 65 aa, Homo sapiens
  MAP TO AC016026.12; EXPRESSED IN BRAIN, SIGNAL = 3.2; EXPRESSED IN PLACENTA, SIGNAL =   3; EXPRESSED IN ADULT LIVER, SIGNAL = 3.3; EXPRESSED IN BONE MARROW, SIGNAL = 2.9; EXPRESSED IN HELA, SIGNAL = 3.8; EXPRESSED IN HEART, SIGNAL = 2.7; EXPRESSED IN FETAL LIVER, SIGNAL = 3.4; EST_HUMAN HIT: AI392850.1, EVALUE 8.00e-31; SWISSPROT HIT: P05095, EVALUE 4.00e-08
DFDSLDEQNVEKNNQLAFDIAEKELGISPIMTGKEMASVGEPDKLSMVMYLTQFYEMFKDSLPSS

SEQ ID NO: 41757 - protein, 80 aa, Homo sapiens
  MAP TO AC023490.4; EXPRESSED IN PLACENTA, SIGNAL = 2.8; EXPRESSED IN BONE MARROW, SIGNAL = 3.1; EXPRESSED IN HELA, SIGNAL = 4.3; EXPRESSED IN ADULT LIVER, SIGNAL = 3.9; EXPRESSED IN BRAIN, SIGNAL = 3.4; EXPRESSED IN LUNG, SIGNAL = 2.3; EXPRESSED IN HEART, SIGNAL = 3.4; EXPRESSED IN FETAL LIVER, SIGNAL = 4.1; EST_HUMAN HIT: BE531263.1, EVALUE 2.00e-04; SWISSPROT HIT: P29400, EVALUE 1.60e-01
RAVRLHSLPSGTPGWPPQCPGPRNRHCLNLAPMGQSLQFPPPPRGQSQQQDHRQPTQAAPCAWWAWQQAWRRGIPLPPLR

SEQ ID NO: 41758 - protein, 53 aa, Homo sapiens
  MAP TO AC023490.4; EXPRESSED IN PLACENTA, SIGNAL = 2.8; EXPRESSED IN BONE MARROW, SIGNAL = 3.1; EXPRESSED IN HELA, SIGNAL = 4.3; EXPRESSED IN ADULT LIVER, SIGNAL = 3.9; EXPRESSED IN BRAIN, SIGNAL = 3.4; EXPRESSED IN LUNG, SIGNAL = 2.3; EXPRESSED IN HEART, SIGNAL = 3.4; EXPRESSED IN FETAL LIVER, SIGNAL = 4.1
AAKPTMHKELPALAACGLVADFDPVGEEETADFGPLVLDSDSDDSVDRDIEEA

SEQ ID NO: 41759 - protein, 21 aa, Homo sapiens
  MAP TO AF233390.1; EXPRESSED IN BRAIN, SIGNAL = 4.5; EXPRESSED IN PLACENTA, SIGNAL = 3.2; EXPRESSED IN ADULT LIVER, SIGNAL =   2; EXPRESSED IN BONE MARROW, SIGNAL = 1.6; EXPRESSED IN FETAL LIVER, SIGNAL = 2.6; EXPRESSED IN HELA, SIGNAL =   3; EXPRESSED IN HEART, SIGNAL =   3; EXPRESSED IN LUNG, SIGNAL = 5.4
SPWGRLPSGSTGSSGRQTRRP

SEQ ID NO: 41760 - protein, 21 aa, Homo sapiens
  MAP TO AC008403.3; EXPRESSED IN ADULT LIVER, SIGNAL = 3.2; EXPRESSED IN HELA, SIGNAL = 5.1; EXPRESSED IN HEART, SIGNAL = 5.9; EXPRESSED IN BRAIN, SIGNAL = 3.5; EXPRESSED IN PLACENTA, SIGNAL = 3.5; EXPRESSED IN BONE MARROW, SIGNAL = 3.4; EXPRESSED IN FETAL LIVER, SIGNAL = 5.5; EXPRESSED IN LUNG, SIGNAL = 2.7; EST_HUMAN HIT: BE703354.1, EVALUE 1.00e-05
MRSRCWSGCGSLGSATMTKSR

SEQ ID NO: 41761 - protein, 42 aa, Homo sapiens
  MAP TO AC018711.2; EXPRESSED IN ADULT LIVER, SIGNAL = 7.8; EXPRESSED IN FETAL LIVER, SIGNAL =  16; EXPRESSED IN HELA, SIGNAL =  14; EXPRESSED IN PLACENTA, SIGNAL = 6.1; EXPRESSED IN BONE MARROW, SIGNAL =  21; EXPRESSED IN HEART, SIGNAL =  11; EXPRESSED IN LUNG, SIGNAL =  21; EXPRESSED IN BRAIN, SIGNAL = 8.2; EST_HUMAN HIT: BE891630.1, EVALUE 1.00e-12
WLRWLVCPGQAVGLDKVSGPKSLLNFCYTCLKMQRVMLNLRV

SEQ ID NO: 41762 - protein, 102 aa, Homo sapiens
  MAP TO AC005323.1; EXPRESSED IN BRAIN, SIGNAL = 1.7; EXPRESSED IN FETAL LIVER, SIGNAL = 2.4; EXPRESSED IN HELA, SIGNAL = 1.9; EXPRESSED IN BONE MARROW, SIGNAL = 4.6; EXPRESSED IN LUNG, SIGNAL = 1.7; EXPRESSED IN PLACENTA, SIGNAL = 1.6; EXPRESSED IN HEART, SIGNAL =  22; EXPRESSED IN ADULT LIVER, SIGNAL = 2.4; EST_HUMAN HIT: F00185.1, EVALUE 5.00e-26; SWISSPROT HIT: P13535, EVALUE 4.00e-50
PMGIFSILEEECMFPKATDTSFKNKLYDQHLGKSANFQKPKVVKGKAEAHFALIHYAGVVDYNITGWLEKNKDPLNETVVGLYQKSAMKTLAQLFSGAQTAE

SEQ ID NO: 41763 - protein, 52 aa, Homo sapiens
  MAP TO AC005323.1; EXPRESSED IN BRAIN, SIGNAL = 1.7; EXPRESSED IN FETAL LIVER, SIGNAL = 2.4; EXPRESSED IN HELA, SIGNAL = 1.9; EXPRESSED IN BONE MARROW, SIGNAL = 4.6; EXPRESSED IN LUNG, SIGNAL = 1.7; EXPRESSED IN PLACENTA, SIGNAL = 1.6; EXPRESSED IN HEART, SIGNAL =  22; EXPRESSED IN ADULT LIVER, SIGNAL = 2.4; EST_HUMAN HIT: AI382389.1, EVALUE 1.00e-16; SWISSPROT HIT: P03291, EVALUE 5.40e-01
LWASSPSWKRSACSLRQQTPPSRTSCMTSTWASLPTSRSPRWSKARPRPTSL

SEQ ID NO: 41764 - protein, 58 aa, Homo sapiens
  MAP TO AL049872.3; EXPRESSED IN BRAIN, SIGNAL = 1.3; EXPRESSED IN PLACENTA, SIGNAL = 1.6; EXPRESSED IN HEART, SIGNAL = 2.4; EXPRESSED IN LUNG, SIGNAL = 6.4; EXPRESSED IN ADULT LIVER, SIGNAL = 1.6; EXPRESSED IN HELA, SIGNAL = 1.8; EXPRESSED IN FETAL LIVER, SIGNAL = 1.8; EST_HUMAN HIT: H17726.1, EVALUE 6.00e-07; SWISSPROT HIT: Q9WVH9, EVALUE 1.00e-17
IDECRTIPEACRGDMMCVNQNGGYLCIPRTNPVYRGPYSNPYSTPYSGPYPAAAPPLS

SEQ ID NO: 41765 - protein, 38 aa, Homo sapiens
  MAP TO AC021097.3; EXPRESSED IN BRAIN, SIGNAL = 2.4; EXPRESSED IN ADULT LIVER, SIGNAL = 2.5; EXPRESSED IN BONE MARROW, SIGNAL = 1.5; EXPRESSED IN FETAL LIVER, SIGNAL = 1.7; EXPRESSED IN HEART, SIGNAL = 2.9; EXPRESSED IN LUNG, SIGNAL = 2.1
  unsure 29
VLERWSTCPRTIEVLMNTYSVVQLPEEAXGLVTPETLQ

SEQ ID NO: 41766 - protein, 27 aa, Homo sapiens
  MAP TO AC008752.3; EXPRESSED IN BRAIN, SIGNAL =   3; EXPRESSED IN PLACENTA, SIGNAL =   2; EXPRESSED IN FETAL LIVER, SIGNAL = 3.1; EXPRESSED IN LUNG, SIGNAL = 5.7; EXPRESSED IN BONE MARROW, SIGNAL = 1.7; EXPRESSED IN HELA, SIGNAL = 1.9; EXPRESSED IN HEART, SIGNAL = 4.1; EST_HUMAN HIT: T64927.1, EVALUE 2.00e-07
TDDTIGDLKKLIAAQTGTRWNKIVLKK

SEQ ID NO: 41767 - protein, 70 aa, Homo sapiens
  MAP TO AC008860.5; EXPRESSED IN BRAIN, SIGNAL = 7.6; EXPRESSED IN ADULT LIVER, SIGNAL = 3.7; EXPRESSED IN BONE MARROW, SIGNAL = 3.4; EXPRESSED IN FETAL LIVER, SIGNAL = 3.8; EXPRESSED IN LUNG, SIGNAL = 4.5; EXPRESSED IN HEART, SIGNAL = 3.5; EXPRESSED IN PLACENTA, SIGNAL = 4.2; EXPRESSED IN HELA, SIGNAL = 3.5; SWISSPROT HIT: P10463, EVALUE 2.00e-21; EST_HUMAN HIT: AA885514.1, EVALUE 2.00e-36
PPMSRARKEVIMQAFRKLDKTGDGVITIEDLREVYNAKHHPKYQNGEWSEEQVFRKFLDNFDSPYDKDGL

SEQ ID NO: 41768 - protein, 27 aa, Homo sapiens
  MAP TO AC008917.3; EXPRESSED IN BRAIN, SIGNAL = 3.2; EXPRESSED IN PLACENTA, SIGNAL = 3.5; EXPRESSED IN HELA, SIGNAL = 8.5; EXPRESSED IN ADULT LIVER, SIGNAL = 3.8; EXPRESSED IN BONE MARROW, SIGNAL = 3.9; EXPRESSED IN FETAL LIVER, SIGNAL = 5.1; EXPRESSED IN LUNG, SIGNAL = 3.8; EXPRESSED IN HEART, SIGNAL = 3.9; EST_HUMAN HIT: AV698081.1, EVALUE 1.00e-08
CRTNKFTIRTNTMTRSLSIDMSCCPRT

SEQ ID NO: 41769 - protein, 65 aa, Homo sapiens
  MAP TO AC007845.12; EXPRESSED IN BONE MARROW, SIGNAL = 3.3; EXPRESSED IN FETAL LIVER, SIGNAL = 4.2; EXPRESSED IN HEART, SIGNAL = 3.7; EXPRESSED IN BRAIN, SIGNAL = 3.9; EXPRESSED IN ADULT LIVER, SIGNAL = 3.8; EXPRESSED IN HELA, SIGNAL = 4.5; EXPRESSED IN LUNG, SIGNAL = 3.9; EXPRESSED IN PLACENTA, SIGNAL = 3.1; EST_HUMAN HIT: BF508823.1, EVALUE 1.00e-20; SWISSPROT HIT: P55957, EVALUE 9.00e-22
CPSVQDRNRDLATALEQLLQAYPRDMEKEKTMLVLALLLAKKVASHTPSLLRDVFHTTVNFINQN

SEQ ID NO: 41770 - protein, 47 aa, Homo sapiens
  MAP TO AC008873.4; EXPRESSED IN BRAIN, SIGNAL = 3.1; EXPRESSED IN PLACENTA, SIGNAL = 3.3; EXPRESSED IN BONE MARROW, SIGNAL = 2.9; EXPRESSED IN HEART, SIGNAL = 2.7; EXPRESSED IN ADULT LIVER, SIGNAL = 2.4; EXPRESSED IN FETAL LIVER, SIGNAL = 2.9; EXPRESSED IN HELA, SIGNAL = 2.7; EXPRESSED IN LUNG, SIGNAL = 3.2; EST_HUMAN HIT: AW838109.1, EVALUE 6.80e+00; SWISSPROT HIT: P76115, EVALUE 3.60e+00
GRNYDLDIVVSSTVFDTIHASYVCWTEYQPCPGNSMPGLAGLEHPGW

SEQ ID NO: 41771 - protein, 39 aa, Homo sapiens
  MAP TO AC008873.4; EXPRESSED IN BRAIN, SIGNAL = 3.1; EXPRESSED IN PLACENTA, SIGNAL = 3.3; EXPRESSED IN BONE MARROW, SIGNAL = 2.9; EXPRESSED IN HEART, SIGNAL = 2.7; EXPRESSED IN ADULT LIVER, SIGNAL = 2.4; EXPRESSED IN FETAL LIVER, SIGNAL = 2.9; EXPRESSED IN HELA, SIGNAL = 2.7; EXPRESSED IN LUNG, SIGNAL = 3.2; EST_HUMAN HIT: AA732926.1, EVALUE 4.90e-01; SWISSPROT HIT: Q52883, EVALUE 2.20e+00
RAGTMTWTLSCPPQYLTPYMPHTFAGLNTNPVQGTACQA

SEQ ID NO: 41772 - protein, 99 aa, Homo sapiens
  MAP TO AC015971.2; EXPRESSED IN BRAIN, SIGNAL = 2.5; EXPRESSED IN PLACENTA, SIGNAL =   2; EXPRESSED IN FETAL LIVER, SIGNAL = 2.9; EXPRESSED IN ADULT LIVER, SIGNAL = 2.4; EXPRESSED IN BONE MARROW, SIGNAL = 2.2; EXPRESSED IN HELA, SIGNAL = 2.6; EXPRESSED IN HEART, SIGNAL =   3; EXPRESSED IN LUNG, SIGNAL = 3.2; EST_HUMAN HIT: BF218030.1, EVALUE 1.00e-02; SWISSPROT HIT: Q05793, EVALUE 6.40e+00
EDGEQTAPPADATRPAPNNASGRRRFSGWSAAGLEGWGLRWEKVPGGSYQRAQGEEVSEARTVSLPTRSVARWRNSSSTLGYLFESHGTRSSRVPQPTP

SEQ ID NO: 41773 - protein, 65 aa, Homo sapiens
  MAP TO AC021036.3; EXPRESSED IN PLACENTA, SIGNAL =   2; EXPRESSED IN ADULT LIVER, SIGNAL = 1.9; EXPRESSED IN FETAL LIVER, SIGNAL = 2.2; EXPRESSED IN HELA, SIGNAL = 2.3; EXPRESSED IN HEART, SIGNAL = 2.4; EXPRESSED IN BRAIN, SIGNAL = 2.5; EXPRESSED IN LUNG, SIGNAL = 4.9; EXPRESSED IN BONE MARROW, SIGNAL = 1.7; EST_HUMAN HIT: BE011659.1, EVALUE 3.00e-29; SWISSPROT HIT: P36894, EVALUE 3.00e-30
DTNEVDVPLNTRVGTKRYMAPEVLDESLNKNHFQPYIMADIYSFGLIIWEMARRCITGGGSLSSF

SEQ ID NO: 41774 - protein, 39 aa, Homo sapiens
  MAP TO AC020714.2; EXPRESSED IN BRAIN, SIGNAL = 2.8; EXPRESSED IN PLACENTA, SIGNAL = 3.2; EXPRESSED IN ADULT LIVER, SIGNAL = 2.7; EXPRESSED IN BONE MARROW, SIGNAL =  11; EXPRESSED IN FETAL LIVER, SIGNAL =  12; EXPRESSED IN HELA, SIGNAL =  25; EXPRESSED IN HEART, SIGNAL = 6.2; EXPRESSED IN LUNG, SIGNAL = 4.5
SSSSNSSSSSSSSSAAASFTFFFGTLLPPPGVDCFPDIL

SEQ ID NO: 41775 - protein, 68 aa, Homo sapiens
  MAP TO AC010369.3; EXPRESSED IN ADULT LIVER, SIGNAL = 3.3; EXPRESSED IN HELA, SIGNAL =  12; EXPRESSED IN PLACENTA, SIGNAL =  22; EXPRESSED IN BRAIN, SIGNAL = 1.3; EXPRESSED IN FETAL LIVER, SIGNAL = 6.9; EXPRESSED IN HEART, SIGNAL = 1.9; EXPRESSED IN LUNG, SIGNAL =  13; EST_HUMAN HIT: AU136338.1, EVALUE 2.00e-10; SWISSPROT HIT: Q9TTA1, EVALUE 3.20e-02
GPRSPTRCPPLAPGPSAATPTQVGPVPTSAPQASPKWAAAAFGVAWAAAVVGPAAWEASPRSQSTRAC

SEQ ID NO: 41776 - protein, 26 aa, Homo sapiens
  MAP TO AL121913.4; EXPRESSED IN ADULT LIVER, SIGNAL = 4.8; EXPRESSED IN HELA, SIGNAL = 6.2; EXPRESSED IN PLACENTA, SIGNAL = 3.9; EXPRESSED IN BONE MARROW, SIGNAL = 3.4; EXPRESSED IN FETAL LIVER, SIGNAL = 6.3; EXPRESSED IN HEART, SIGNAL = 5.4; EXPRESSED IN LUNG, SIGNAL = 3.6; EXPRESSED IN BRAIN, SIGNAL = 4.9
TVGGSMLLEAIGFWEFVTAAQETHAE

SEQ ID NO: 41777 - protein, 66 aa, Homo sapiens
  MAP TO AC002041.1; EXPRESSED IN BRAIN, SIGNAL = 1.6; EXPRESSED IN PLACENTA, SIGNAL = 2.1; EXPRESSED IN BONE MARROW, SIGNAL = 1.8; EXPRESSED IN HEART, SIGNAL = 2.1; EXPRESSED IN LUNG, SIGNAL = 5.8; EXPRESSED IN FETAL LIVER, SIGNAL = 2.8; EST_HUMAN HIT: AI224931.1, EVALUE 2.00e-28; SWISSPROT HIT: Q09463, EVALUE 1.90e+00
NPEVGGLMAVLAVIGGIDGRLCLGGQIVHDEFGEGTVTGITPKGKITVQFSDMRTCHICPLNQLKP

SEQ ID NO: 41778 - protein, 98 aa, Homo sapiens
  MAP TO AC020559.2; EXPRESSED IN BRAIN, SIGNAL = 3.6; EXPRESSED IN PLACENTA, SIGNAL = 9.5; EXPRESSED IN HELA, SIGNAL = 7.3; EXPRESSED IN LUNG, SIGNAL = 5.6; EXPRESSED IN ADULT LIVER, SIGNAL = 4.8; EXPRESSED IN BONE MARROW, SIGNAL =   4; EXPRESSED IN FETAL LIVER, SIGNAL = 3.5; EXPRESSED IN HEART, SIGNAL = 3.1; EST_HUMAN HIT: AI792759.1, EVALUE 3.00e-36; SWISSPROT HIT: Q10677, EVALUE 2.60e-01
APKAYPSFIKGPAPQSQHKNTKSLIGLITMKNPKNGKRRGQGKRPAHGTEPGHRVRWYCSCYEVGGTVIVLSHHSPGSRTLTSSGVCSASACPGSCPA

SEQ ID NO: 41779 - protein, 50 aa, Homo sapiens
  MAP TO AL137858.1; EXPRESSED IN ADULT LIVER, SIGNAL = 3.7; EXPRESSED IN HELA, SIGNAL = 3.5; EXPRESSED IN HEART, SIGNAL =   3; EXPRESSED IN LUNG, SIGNAL = 2.3; EXPRESSED IN BRAIN, SIGNAL = 2.8; EXPRESSED IN BONE MARROW, SIGNAL = 2.5; EXPRESSED IN PLACENTA, SIGNAL = 2.6; EXPRESSED IN FETAL LIVER, SIGNAL =   4
SAAAAAAVVGKAQLTSGYLLSSLLSESSSHQSPFDSCSSPKICLPGGCQL

SEQ ID NO: 41780 - protein, 47 aa, Homo sapiens
  MAP TO AC018720.2; EXPRESSED IN PLACENTA, SIGNAL = 1.7; EXPRESSED IN BONE MARROW, SIGNAL = 4.1; EXPRESSED IN FETAL LIVER, SIGNAL =   2; EXPRESSED IN HELA, SIGNAL =   2; EXPRESSED IN ADULT LIVER, SIGNAL = 2.1; EXPRESSED IN HEART, SIGNAL = 1.9; EXPRESSED IN BRAIN, SIGNAL = 2.6; EXPRESSED IN LUNG, SIGNAL = 5.4; EST_HUMAN HIT: AW119175.1, EVALUE 5.00e-19
NPPNFLRASALSEHISPVVVIPAEASSPDSEPVLEKDDLMDMDASQQ

SEQ ID NO: 41781 - protein, 19 aa, Homo sapiens
  MAP TO AC018720.2; EXPRESSED IN PLACENTA, SIGNAL = 1.7; EXPRESSED IN BONE MARROW, SIGNAL = 4.1; EXPRESSED IN FETAL LIVER, SIGNAL =   2; EXPRESSED IN HELA, SIGNAL =   2; EXPRESSED IN ADULT LIVER, SIGNAL = 2.1; EXPRESSED IN HEART, SIGNAL = 1.9; EXPRESSED IN BRAIN, SIGNAL = 2.6; EXPRESSED IN LUNG, SIGNAL = 5.4; EST_HUMAN HIT: BF478268.1, EVALUE 4.00e-06
THPTSCEPQPCQNISALWW

SEQ ID NO: 41782 - protein, 29 aa, Homo sapiens
  MAP TO AL138770.1; EXPRESSED IN BONE MARROW, SIGNAL = 5.1; EXPRESSED IN HELA, SIGNAL = 4.6; EXPRESSED IN LUNG, SIGNAL = 4.9; EXPRESSED IN BRAIN, SIGNAL = 5.7; EXPRESSED IN PLACENTA, SIGNAL = 4.4; EXPRESSED IN ADULT LIVER, SIGNAL = 5.5; EXPRESSED IN FETAL LIVER, SIGNAL = 4.5; EXPRESSED IN HEART, SIGNAL = 3.9
NAIEIIFFDPFIGAKRWCFLVAIIATDKK

SEQ ID NO: 41783 - protein, 40 aa, Homo sapiens
  MAP TO AL159141.1; EXPRESSED IN FETAL LIVER, SIGNAL = 1.7; EXPRESSED IN PLACENTA, SIGNAL = 1.4; EXPRESSED IN ADULT LIVER, SIGNAL = 1.7; EXPRESSED IN BONE MARROW, SIGNAL = 1.9; EXPRESSED IN HELA, SIGNAL =   2; EXPRESSED IN HEART, SIGNAL = 2.1; EST_HUMAN HIT: AU119105.1, EVALUE 8.00e-06
GRVYSPTDTVERNQSEDVLKHKSRAFQVQYWGDTRRALGE

SEQ ID NO: 41784 - protein, 28 aa, Homo sapiens
  MAP TO AC022432.2; EXPRESSED IN BRAIN, SIGNAL =   4; EXPRESSED IN FETAL LIVER, SIGNAL = 5.2; EXPRESSED IN PLACENTA, SIGNAL = 3.3; EXPRESSED IN LUNG, SIGNAL = 2.9; EXPRESSED IN HEART, SIGNAL = 4.8; EXPRESSED IN HELA, SIGNAL = 6.7; EXPRESSED IN BONE MARROW, SIGNAL = 3.4; EXPRESSED IN ADULT LIVER, SIGNAL = 3.6; EST_HUMAN HIT: AA813481.1, EVALUE 2.70e+00
MLPSPWEKPTLASQRIRYHGKEKKSCPC

SEQ ID NO: 41785 - protein, 65 aa, Homo sapiens
  MAP TO AC011467.3; EXPRESSED IN BRAIN, SIGNAL = 2.5; EXPRESSED IN BONE MARROW, SIGNAL = 2.4; EXPRESSED IN FETAL LIVER, SIGNAL = 2.5; EXPRESSED IN LUNG, SIGNAL =   2; EXPRESSED IN HEART, SIGNAL = 4.5; EXPRESSED IN PLACENTA, SIGNAL = 5.5; EXPRESSED IN HELA, SIGNAL = 2.6; EXPRESSED IN ADULT LIVER, SIGNAL = 2.5; EST_HUMAN HIT: BE299334.1, EVALUE 3.40e+00; SWISSPROT HIT: P14282, EVALUE 8.90e-01
MAEMAHQELRGTQVWELLRAGPKGDDLAASVPSTLFPRPLGAPGSCQPENQQLQAQLSLMALPEE

SEQ ID NO: 41786 - protein, 45 aa, Homo sapiens
  MAP TO AP001208.1; EXPRESSED IN BRAIN, SIGNAL =  22; EXPRESSED IN ADULT LIVER, SIGNAL =  14; EXPRESSED IN BONE MARROW, SIGNAL =  18; EXPRESSED IN PLACENTA, SIGNAL =  16; EXPRESSED IN LUNG, SIGNAL =  29; EXPRESSED IN HEART, SIGNAL =  11; EXPRESSED IN HELA, SIGNAL =  12; EXPRESSED IN FETAL LIVER, SIGNAL =  20; EST_HUMAN HIT: BF669093.1, EVALUE 9.00e-17; SWISSPROT HIT: P10166, EVALUE 5.50e-01
MPGEATETVPAIEQQLLQPQAETGSGTESDSDESVPELEEQDSTQ

SEQ ID NO: 41787 - protein, 37 aa, Homo sapiens
  MAP TO AC016372.2; EXPRESSED IN BRAIN, SIGNAL = 1.7; EXPRESSED IN PLACENTA, SIGNAL = 2.6; EXPRESSED IN LUNG, SIGNAL = 2.2; EXPRESSED IN HEART, SIGNAL =  11; EST_HUMAN HIT: BF238965.1, EVALUE 2.00e-14; SWISSPROT HIT: P54623, EVALUE 1.30e-02
HLNDLKKENFSLKLRIYFLEERMQQKYEASREDIYKR

SEQ ID NO: 41788 - protein, 54 aa, Homo sapiens
  MAP TO AL121981.8; EXPRESSED IN BRAIN, SIGNAL = 7.2; EXPRESSED IN HELA, SIGNAL = 7.1; EXPRESSED IN BONE MARROW, SIGNAL = 5.3; EXPRESSED IN HEART, SIGNAL = 6.5; EXPRESSED IN PLACENTA, SIGNAL = 5.3; EXPRESSED IN FETAL LIVER, SIGNAL = 7.3; EXPRESSED IN ADULT LIVER, SIGNAL = 6.9; EXPRESSED IN LUNG, SIGNAL = 7.9; EST_HUMAN HIT: AW818189.1, EVALUE 5.60e-01
SRWLLSMTSSNAVPISPGSAGPRSCLWSFGKIVHLLCLQLTSGQKKSIKSLRKT

SEQ ID NO: 41789 - protein, 30 aa, Homo sapiens [sequence omitted]

SEQ ID NO: 41790 - protein, 20 aa, Homo sapiens
  MAP TO AC011428.2; EXPRESSED IN PLACENTA, SIGNAL = 1.9; EXPRESSED IN HEART, SIGNAL = 2.3; EXPRESSED IN BRAIN, SIGNAL = 2.4; EXPRESSED IN LUNG, SIGNAL = 3.3; EXPRESSED IN HELA, SIGNAL = 2.3; EXPRESSED IN FETAL LIVER, SIGNAL = 2.3; EXPRESSED IN BONE MARROW, SIGNAL = 1.9; EXPRESSED IN ADULT LIVER, SIGNAL = 2.6
APTQPSRESRLQSSTPKRPR

SEQ ID NO: 41791 - protein, 20 aa, Homo sapiens
  MAP TO AC018702.2; EXPRESSED IN BONE MARROW, SIGNAL = 1.6; EXPRESSED IN HEART, SIGNAL = 2.2; EXPRESSED IN PLACENTA, SIGNAL = 1.6; EXPRESSED IN BRAIN, SIGNAL = 1.7; EXPRESSED IN ADULT LIVER, SIGNAL = 1.7; EXPRESSED IN FETAL LIVER, SIGNAL =   2; EXPRESSED IN HELA, SIGNAL = 2.3; EST_HUMAN HIT: AI554125.1, EVALUE 4.20e-01
STQFDNYLHKKSTFMGTKNL

SEQ ID NO: 41792 - protein, 39 aa, Homo sapiens
  MAP TO AL132655.5; EXPRESSED IN PLACENTA, SIGNAL = 2.5; EXPRESSED IN FETAL LIVER, SIGNAL = 2.4; EXPRESSED IN BRAIN, SIGNAL = 2.3; EXPRESSED IN BONE MARROW, SIGNAL = 1.9; EXPRESSED IN ADULT LIVER, SIGNAL = 1.7; EXPRESSED IN HELA, SIGNAL = 2.6; EXPRESSED IN HEART, SIGNAL = 2.6; EST_HUMAN HIT: AA346973.1, EVALUE 3.00e-08
MSPFQVAGFCSFPINALTLTVDTWRGCASTFLCGSATRI

SEQ ID NO: 41793 - protein, 25 aa, Homo sapiens
  MAP TO AC008585.4; EXPRESSED IN BRAIN, SIGNAL = 6.4; EXPRESSED IN PLACENTA, SIGNAL =  11; EXPRESSED IN BONE MARROW, SIGNAL =  14; EXPRESSED IN HELA, SIGNAL =  28; EXPRESSED IN LUNG, SIGNAL =  26; EXPRESSED IN ADULT LIVER, SIGNAL =   7; EXPRESSED IN FETAL LIVER, SIGNAL =  23; EXPRESSED IN HEART, SIGNAL =  13; EST_HUMAN HIT: AA079031.1, EVALUE 9.30e-01
PGAALPSWATSSWSFFMPSLRSTAG

SEQ ID NO: 41794 - protein, 67 aa, Homo sapiens
  MAP TO AC000134.14; EXPRESSED IN BRAIN, SIGNAL = 3.6; EXPRESSED IN PLACENTA, SIGNAL = 3.2; EXPRESSED IN ADULT LIVER, SIGNAL = 3.4; EXPRESSED IN FETAL LIVER, SIGNAL = 3.9; EXPRESSED IN BONE MARROW, SIGNAL = 2.8; EXPRESSED IN HELA, SIGNAL = 4.2; EXPRESSED IN LUNG, SIGNAL = 4.8; EXPRESSED IN HEART, SIGNAL = 3.7; EST_HUMAN HIT: BE778908.1, EVALUE 3.00e-27; SWISSPROT HIT: Q09013, EVALUE 2.00e-22
VDSSVAVGTPDYISPEILQAMEEGKGHYGPQCDWWSLGVCAYELLFGETPFYAESLVETYGKIMNHE

SEQ ID NO: 41795 - protein, 25 aa, Homo sapiens
  MAP TO AC018760.4; EXPRESSED IN BRAIN, SIGNAL = 3.1; EXPRESSED IN PLACENTA, SIGNAL = 2.4; EXPRESSED IN HELA, SIGNAL = 4.3; EXPRESSED IN LUNG, SIGNAL = 3.2; EXPRESSED IN ADULT LIVER, SIGNAL = 2.4; EXPRESSED IN BONE MARROW, SIGNAL = 2.3; EXPRESSED IN FETAL LIVER, SIGNAL =   4; EXPRESSED IN HEART, SIGNAL = 3.7; EST_HUMAN HIT: R75639.1, EVALUE 2.40e-01
EFRSQQRPPGDHRTGPPEAKLPTSG

SEQ ID NO: 41796 - protein, 34 aa, Homo sapiens [sequence omitted]

SEQ ID NO: 41797 - protein, 176 aa, Homo sapiens
  MAP TO AC016939.8; EXPRESSED IN BRAIN, SIGNAL = 5.5; EXPRESSED IN PLACENTA, SIGNAL = 4.5; EXPRESSED IN HELA, SIGNAL = 6.6; EXPRESSED IN HEART, SIGNAL = 4.7; EXPRESSED IN ADULT LIVER, SIGNAL = 5.7; EXPRESSED IN BONE MARROW, SIGNAL = 4.2; EXPRESSED IN LUNG, SIGNAL = 4.8; EXPRESSED IN FETAL LIVER, SIGNAL = 5.4; EST_HUMAN HIT: BE793498.1, EVALUE 6.00e-25; SWISSPROT HIT: P43362, EVALUE 4.00e-22
SRDRLTRRTGAPRGPRAALTKTCKSAFVRTSKVRFSAEVSHTLPLSPGLWVSIAQLLPTLLTAALTRVIMSLEQRSPHCKPDEDLEAQGEDLGLMGAQEPTGEEEETTSSSDSKEEEVSAAGSSSPPQSPQGGASSSISVYYTLWSQFDEGSSSQEEEEPSSSVDPAQLEFMFQEA

SEQ ID NO: 41798 - protein, 98 aa, Homo sapiens
  MAP TO AC020557.2; EXPRESSED IN HELA, SIGNAL = 1.9; EXPRESSED IN BRAIN, SIGNAL = 1.4; EXPRESSED IN FETAL LIVER, SIGNAL = 1.6; EXPRESSED IN HEART, SIGNAL = 1.8; EST_HUMAN HIT: D54392.1, EVALUE 4.60e+00; SWISSPROT HIT: Q98910, EVALUE 1.10e+00
KGLSLLGYQLCSHRVTHTVQKVEAVQTSYTSYVSCGGWIPWRRCPKMVYRTQYLVVEVPESRNVTDCCEGYEQLGLYCVLRESRAAGLVRGHPCRRDA

SEQ ID NO: 41799 - protein, 30 aa, Homo sapiens
  MAP TO AL157957.1; EXPRESSED IN BRAIN, SIGNAL = 2.1; EXPRESSED IN BONE MARROW, SIGNAL = 1.9; EXPRESSED IN PLACENTA, SIGNAL = 2.2; EXPRESSED IN LUNG, SIGNAL = 2.5; EXPRESSED IN HEART, SIGNAL = 1.8; EXPRESSED IN HELA, SIGNAL = 2.1; EXPRESSED IN FETAL LIVER, SIGNAL = 2.1; EXPRESSED IN ADULT LIVER, SIGNAL =   3
CHVSRTAGSGVRLYLCLNPPLPSRAMCSQQ

SEQ ID NO: 41800 - protein, 46 aa, Homo sapiens
  MAP TO AC002400.1; EXPRESSED IN BONE MARROW, SIGNAL = 1.5; EXPRESSED IN HEART, SIGNAL = 4.1; EXPRESSED IN LUNG, SIGNAL = 2.4; SWISSPROT HIT: P46825, EVALUE 8.20e+00; EST_HUMAN HIT: AW500361.1, EVALUE 1.00e-18
EQEKSEKVSKRVSAVEEVRSHVKVLQEMLSMYRRPGQAPPDQEALQ

SEQ ID NO: 41801 - protein, 55 aa, Homo sapiens
  MAP TO AC024496.2; EXPRESSED IN PLACENTA, SIGNAL =  23; EXPRESSED IN BRAIN, SIGNAL = 7.6; EXPRESSED IN BONE MARROW, SIGNAL =  28; EXPRESSED IN LUNG, SIGNAL =  37; EXPRESSED IN ADULT LIVER, SIGNAL =  16; EXPRESSED IN FETAL LIVER, SIGNAL =  23; EXPRESSED IN HELA, SIGNAL =  21; EXPRESSED IN HEART, SIGNAL = 9.5; EST_HUMAN HIT: AI381459.1, EVALUE 6.00e-22; SWISSPROT HIT: P30847, EVALUE 3.50e+00
MFPEVLIVFFFKLSISLNISPFTSCIVFWISLHWALPFSGASLISLITKLLNSFS

SEQ ID NO: 41802 - protein, 44 aa, Homo sapiens
  MAP TO AL121955.4; EXPRESSED IN BRAIN, SIGNAL = 8.7; EXPRESSED IN FETAL LIVER, SIGNAL = 7.8; EXPRESSED IN HELA, SIGNAL = 9.3; EXPRESSED IN PLACENTA, SIGNAL = 8.7; EXPRESSED IN LUNG, SIGNAL =  11; EXPRESSED IN HEART, SIGNAL = 6.8; EXPRESSED IN BONE MARROW, SIGNAL = 8.4; EXPRESSED IN ADULT LIVER, SIGNAL = 3.6; EST_HUMAN HIT: AI961087.1, EVALUE 2.00e-13; SWISSPROT HIT: Q08325, EVALUE 3.20e-01
WRAAGSEPRSAGRQLRPAEISSAALVGWHCWRTQYTLRSCWPGC

SEQ ID NO: 41803 - protein, 81 aa, Homo sapiens
  MAP TO AC018506.3; EXPRESSED IN BRAIN, SIGNAL = 6.3; EXPRESSED IN PLACENTA, SIGNAL = 6.6; EXPRESSED IN BONE MARROW, SIGNAL = 7.5; EXPRESSED IN HELA, SIGNAL = 6.7; EXPRESSED IN LUNG, SIGNAL = 6.5; EXPRESSED IN ADULT LIVER, SIGNAL =   7; EXPRESSED IN FETAL LIVER, SIGNAL = 7.3; EXPRESSED IN HEART, SIGNAL = 5.2; EST_HUMAN HIT: BF327292.1, EVALUE 2.00e-30; SWISSPROT HIT: P35251, EVALUE 8.00e-02
NSPSEAQNLDENTTEGWENRIRLWTDQYEEAFTNQYSADVQNALEQHLHSSKEFVGKPTILDTINKTELACNNTVIGSQMQ

SEQ ID NO: 41804 - protein, 56 aa, Homo sapiens
  MAP TO AC010582.6; EXPRESSED IN BRAIN, SIGNAL = 4.9; EXPRESSED IN PLACENTA, SIGNAL = 4.7; EXPRESSED IN BONE MARROW, SIGNAL = 4.7; EXPRESSED IN HELA, SIGNAL =   7; EXPRESSED IN LUNG, SIGNAL = 2.4; EXPRESSED IN ADULT LIVER, SIGNAL = 6.1; EXPRESSED IN FETAL LIVER, SIGNAL =   7; EXPRESSED IN HEART, SIGNAL = 5.9; EST_HUMAN HIT: AW873461.1, EVALUE 3.00e-18; SWISSPROT HIT: P16473, EVALUE 1.00e-27
VTALPSKGLEHLKELIARNTWTLKKLPLSLSFLHLTRADLSYPSHCCAFKNQKKIR

SEQ ID NO: 41805 - protein, 81 aa, Homo sapiens; identical to SEQ ID NO: 34804
  MAP TO AL138806.5; EXPRESSED IN BRAIN, SIGNAL =  34; EXPRESSED IN PLACENTA, SIGNAL =  12; EXPRESSED IN BONE MARROW, SIGNAL =  16; EXPRESSED IN FETAL LIVER, SIGNAL =  19; EXPRESSED IN LUNG, SIGNAL =  32; EXPRESSED IN ADULT LIVER, SIGNAL =  19; EXPRESSED IN HELA, SIGNAL =  25; EXPRESSED IN HEART, SIGNAL = 6.8; EST_HUMAN HIT: AA314411.1, EVALUE 5.00e-32; SWISSPROT HIT: P77770, EVALUE 2.10e+00

SEQ ID NO: 41806 - protein, 38 aa, Homo sapiens
  MAP TO AL138806.5; EXPRESSED IN BRAIN, SIGNAL =  34; EXPRESSED IN PLACENTA, SIGNAL =  12; EXPRESSED IN BONE MARROW, SIGNAL =  16; EXPRESSED IN FETAL LIVER, SIGNAL =  19; EXPRESSED IN LUNG, SIGNAL =  32; EXPRESSED IN ADULT LIVER, SIGNAL =  19; EXPRESSED IN HELA, SIGNAL =  25; EXPRESSED IN HEART, SIGNAL = 6.8; EST_HUMAN HIT: AW327344.1, EVALUE 2.00e-10; SWISSPROT HIT: Q14687, EVALUE 1.30e+00
WSTPLCPSTLLSTPSPWAVSPLSCLQTRFQRRQKIFML

SEQ ID NO: 41807 - protein, 41 aa, Homo sapiens
  MAP TO AC006549.28; EXPRESSED IN PLACENTA, SIGNAL = 2.2; EXPRESSED IN BONE MARROW, SIGNAL = 3.7; EXPRESSED IN FETAL LIVER, SIGNAL = 2.4; EXPRESSED IN HELA, SIGNAL = 2.9; EXPRESSED IN ADULT LIVER, SIGNAL = 2.3; EXPRESSED IN HEART, SIGNAL = 2.8; EXPRESSED IN BRAIN, SIGNAL = 3.7; EXPRESSED IN LUNG, SIGNAL = 4.1; SWISSPROT HIT: Q9X3X1, EVALUE 2.80e+00; EST_HUMAN HIT: BF568063.1, EVALUE 6.00e-16
RLPLAVSLKPPFLRPELLDRAAPLKVKLSDNGLKAGLGRSK

SEQ ID NO: 41808 - protein, 29 aa, Homo sapiens
  MAP TO AL158823.1; EXPRESSED IN ADULT LIVER, SIGNAL = 5.3; EXPRESSED IN LUNG, SIGNAL = 7.3; EXPRESSED IN PLACENTA, SIGNAL = 4.5; EXPRESSED IN BONE MARROW, SIGNAL = 4.9; EXPRESSED IN FETAL LIVER, SIGNAL = 5.1; EXPRESSED IN HEART, SIGNAL = 5.5; EXPRESSED IN BRAIN, SIGNAL = 5.3; EXPRESSED IN HELA, SIGNAL = 5.4; EST_HUMAN HIT: AW863007.1, EVALUE 1.00e-10
FEHNSRDPTIAESCHSVLAMDPSPTCRAE

SEQ ID NO: 41809 - protein, 57 aa, Homo sapiens
  MAP TO AL132986.2; EXPRESSED IN BRAIN, SIGNAL = 2.7; EXPRESSED IN PLACENTA, SIGNAL = 3.3; EXPRESSED IN ADULT LIVER, SIGNAL =   2; EXPRESSED IN BONE MARROW, SIGNAL = 5.3; EXPRESSED IN FETAL LIVER, SIGNAL = 2.9; EXPRESSED IN HEART, SIGNAL = 5.7; EXPRESSED IN HELA, SIGNAL = 4.3; EXPRESSED IN LUNG, SIGNAL =  10; EST_HUMAN HIT: BE701589.1, EVALUE 2.00e-27; SWISSPROT HIT: P12814, EVALUE 2.00e-28
MHAMQQKLEDFRDYRRLHKPPKVQEKCQLEINFNTLQTKLRLSNRPAFMPSEGRMVS

SEQ ID NO: 41810 - protein, 44 aa, Homo sapiens
  MAP TO AL132986.2; EXPRESSED IN BRAIN, SIGNAL = 2.7; EXPRESSED IN PLACENTA, SIGNAL = 3.3; EXPRESSED IN ADULT LIVER, SIGNAL =   2; EXPRESSED IN BONE MARROW, SIGNAL = 5.3; EXPRESSED IN FETAL LIVER, SIGNAL = 2.9; EXPRESSED IN HEART, SIGNAL = 5.7; EXPRESSED IN HELA, SIGNAL = 4.3; EXPRESSED IN LUNG, SIGNAL =  10
AGGLPGLPAPAQAAQGAGEVPAGDQLQHAADQAAAQQPACLHAL

SEQ ID NO: 41811 - protein, 35 aa, Homo sapiens
  MAP TO AL135905.2; EXPRESSED IN BRAIN, SIGNAL = 1.6; EXPRESSED IN PLACENTA, SIGNAL = 2.1; EXPRESSED IN BONE MARROW, SIGNAL = 1.8; EXPRESSED IN ADULT LIVER, SIGNAL = 1.9; EXPRESSED IN FETAL LIVER, SIGNAL =  10; EXPRESSED IN LUNG, SIGNAL = 3.4; EXPRESSED IN HEART, SIGNAL = 1.8; EXPRESSED IN HELA, SIGNAL =  16; EST_HUMAN HIT: BE910184.1, EVALUE 1.00e-13
MARMNRPAPVEVTYKNMRFLITHNPTNATLNKFIE

SEQ ID NO: 41812 - protein, 46 aa, Homo sapiens
  MAP TO AL133262.2; EXPRESSED IN BRAIN, SIGNAL = 1.4; EXPRESSED IN PLACENTA, SIGNAL =   2; EXPRESSED IN ADULT LIVER, SIGNAL = 1.8; EXPRESSED IN BONE MARROW, SIGNAL =   2; EXPRESSED IN HEART, SIGNAL = 1.9; EXPRESSED IN LUNG, SIGNAL = 5.7; EST_HUMAN HIT: BF106822.1, EVALUE 6.80e+00; SWISSPROT HIT: Q54873, EVALUE 2.10e+00
ETAVVSTTECTTVMERPPEAQRTVDQLIQRIEKAVPNRHTFPLVPD

SEQ ID NO: 41813 - protein, 36 aa, Homo sapiens
  MAP TO AF233390.1; EXPRESSED IN ADULT LIVER, SIGNAL = 2.6; EXPRESSED IN BONE MARROW, SIGNAL = 2.7; EXPRESSED IN HEART, SIGNAL = 3.6; EXPRESSED IN PLACENTA, SIGNAL = 2.1; EXPRESSED IN FETAL LIVER, SIGNAL = 3.3; EXPRESSED IN LUNG, SIGNAL = 2.7; EXPRESSED IN BRAIN, SIGNAL = 4.6; EXPRESSED IN HELA, SIGNAL = 3.3; EST_HUMAN HIT: AW241373.1, EVALUE 2.20e-01
VTTCIMLFVGVVLMFIDISINIYSYTHIYSYTHICI

SEQ ID NO: 41814 - protein, 52 aa, Homo sapiens
  MAP TO AC008929.3; EXPRESSED IN BONE MARROW, SIGNAL = 3.9; EXPRESSED IN LUNG, SIGNAL = 4.3; EXPRESSED IN PLACENTA, SIGNAL = 4.1; EXPRESSED IN ADULT LIVER, SIGNAL = 4.6; EXPRESSED IN FETAL LIVER, SIGNAL =   5; EXPRESSED IN HELA, SIGNAL =   5; EXPRESSED IN HEART, SIGNAL = 4.6; EXPRESSED IN BRAIN, SIGNAL = 4.2; EST_HUMAN HIT: AI081006.1, EVALUE 9.00e-04; SWISSPROT HIT: P18091, EVALUE 4.70e+00
HCPAGIGAQRTSTNAHTLATAIALSNKLSYLGTRNLTFSASILEEIGQLTCL

SEQ ID NO: 41815 - protein, 41 aa, Homo sapiens
  MAP TO AC018720.2; EXPRESSED IN PLACENTA, SIGNAL = 4.7; EXPRESSED IN BRAIN, SIGNAL =   6; EXPRESSED IN HELA, SIGNAL = 9.7; EXPRESSED IN LUNG, SIGNAL = 5.2; EXPRESSED IN HEART, SIGNAL = 7.6; EXPRESSED IN FETAL LIVER, SIGNAL = 7.9; EXPRESSED IN BONE MARROW, SIGNAL = 4.5; EXPRESSED IN ADULT LIVER, SIGNAL = 4.9; EST_HUMAN HIT: BE388493.1, EVALUE 9.00e-19; SWISSPROT HIT: O13816, EVALUE 2.00e-06
DVLPEIRAICIEEIGCWMQSYSTSFLTDSYLKYIGWTLHDK

SEQ ID NO: 41816 - protein, 30 aa, Homo sapiens
  MAP TO AC018720.2; EXPRESSED IN PLACENTA, SIGNAL = 4.7; EXPRESSED IN BRAIN, SIGNAL =   6; EXPRESSED IN HELA, SIGNAL = 9.7; EXPRESSED IN LUNG, SIGNAL = 5.2; EXPRESSED IN HEART, SIGNAL = 7.6; EXPRESSED IN FETAL LIVER, SIGNAL = 7.9; EXPRESSED IN BONE MARROW, SIGNAL = 4.5; EXPRESSED IN ADULT LIVER, SIGNAL = 4.9; EST_HUMAN HIT: AL045791.2, EVALUE 1.00e-08
MSFLRSVLSALRKLGVGCKATARLSSPTAI

SEQ ID NO: 41817 - protein, 76 aa, Homo sapiens
  MAP TO AC025289.1; EXPRESSED IN ADULT LIVER, SIGNAL = 1.5; EXPRESSED IN BONE MARROW, SIGNAL =   2; EXPRESSED IN HEART, SIGNAL = 1.9; EXPRESSED IN LUNG, SIGNAL = 1.6; EST_HUMAN HIT: AV726847.1, EVALUE 7.00e-38; SWISSPROT HIT: P39055, EVALUE 8.60e-01
DTGLEHPIGSSEWLLSAHKQLTQDMSTQRAIQTEKEQQIETVCETIQNLVDNIKTVLTGHNRQLGDVKHLLKAMAK

SEQ ID NO: 41818 - protein, 20 aa, Homo sapiens
  MAP TO AC025289.1; EXPRESSED IN ADULT LIVER, SIGNAL = 1.5; EXPRESSED IN BONE MARROW, SIGNAL =   2; EXPRESSED IN HEART, SIGNAL = 1.9; EXPRESSED IN LUNG, SIGNAL = 1.6; EST_HUMAN HIT: AW131202.1, EVALUE 5.00e-04
TLVLNILLAALNGFCQHTNS

SEQ ID NO: 41819 - protein, 29 aa, Homo sapiens
  MAP TO AC012578.5; EXPRESSED IN BONE MARROW, SIGNAL =   3; EXPRESSED IN HEART, SIGNAL =   3; EXPRESSED IN BRAIN, SIGNAL = 3.8; EXPRESSED IN PLACENTA, SIGNAL =   3; EXPRESSED IN HELA, SIGNAL = 3.2; EXPRESSED IN ADULT LIVER, SIGNAL =   3; EXPRESSED IN FETAL LIVER, SIGNAL = 2.8; EXPRESSED IN LUNG, SIGNAL = 3.4
MDCRVAFVDGHSALLQVCIEPSDVLGSTG

SEQ ID NO: 41820 - protein, 40 aa, Homo sapiens
  MAP TO AC007955.4; EXPRESSED IN BRAIN, SIGNAL =   3; EXPRESSED IN PLACENTA, SIGNAL = 2.9; EXPRESSED IN HELA, SIGNAL = 2.9; EXPRESSED IN ADULT LIVER, SIGNAL = 3.2; EXPRESSED IN BONE MARROW, SIGNAL = 2.3; EXPRESSED IN FETAL LIVER, SIGNAL = 2.8; EXPRESSED IN HEART, SIGNAL =   3; EXPRESSED IN LUNG, SIGNAL = 3.8
SSFMDTHAHNNIRHSPRSLLMAIITKTPVQIEGGRSQQEA

SEQ ID NO: 41821 - protein, 31 aa, Homo sapiens
  MAP TO AC007955.4; EXPRESSED IN BRAIN, SIGNAL =   3; EXPRESSED IN PLACENTA, SIGNAL = 2.9; EXPRESSED IN HELA, SIGNAL = 2.9; EXPRESSED IN ADULT LIVER, SIGNAL = 3.2; EXPRESSED IN BONE MARROW, SIGNAL = 2.3; EXPRESSED IN FETAL LIVER, SIGNAL = 2.8; EXPRESSED IN HEART, SIGNAL =   3; EXPRESSED IN LUNG, SIGNAL = 3.8; SWISSPROT HIT: P28639, EVALUE 5.00e+00
FILHGHSCTQQHQAFSQITTHGNHYKDPCAN

SEQ ID NO: 41822 - protein, 66 aa, Homo sapiens
  MAP TO AL139392.1; EXPRESSED IN PLACENTA, SIGNAL = 1.8; EXPRESSED IN BRAIN, SIGNAL = 1.7; EXPRESSED IN ADULT LIVER, SIGNAL = 2.2; EXPRESSED IN BONE MARROW, SIGNAL = 2.4; EXPRESSED IN FETAL LIVER, SIGNAL = 2.7; EXPRESSED IN LUNG, SIGNAL = 3.6; EXPRESSED IN HEART, SIGNAL = 2.9; SWISSPROT HIT: Q99808, EVALUE 2.00e-17; EST_HUMAN HIT: AW961266.1, EVALUE 2.00e-16
PGKDSRWLPSLVLARLVFVPLLLLCNIKPRRYLTVVFEHDAWFIFFMAAFAFSNGYLASLCMCFGP

SEQ ID NO: 41823 - protein, 32 aa, Homo sapiens
  MAP TO AL139392.1; EXPRESSED IN PLACENTA, SIGNAL = 1.8; EXPRESSED IN BRAIN, SIGNAL = 1.7; EXPRESSED IN ADULT LIVER, SIGNAL = 2.2; EXPRESSED IN BONE MARROW, SIGNAL = 2.4; EXPRESSED IN FETAL LIVER, SIGNAL = 2.7; EXPRESSED IN LUNG, SIGNAL = 3.6; EXPRESSED IN HEART, SIGNAL = 2.9
LGRTAAGCQAWCWPGWCLCHCCCCATLSPAAT

SEQ ID NO: 41824 - protein, 33 aa, Homo sapiens
  MAP TO AC011447.2; EXPRESSED IN ADULT LIVER, SIGNAL =  24; EXPRESSED IN FETAL LIVER, SIGNAL =  18; EXPRESSED IN HEART, SIGNAL =  18; EXPRESSED IN BRAIN, SIGNAL = 9.6; EXPRESSED IN PLACENTA, SIGNAL =  12; EXPRESSED IN BONE MARROW, SIGNAL =  24; EXPRESSED IN HELA, SIGNAL =  19; EXPRESSED IN LUNG, SIGNAL =  58; EST_HUMAN HIT: AW516055.1, EVALUE 2.00e-09
CRPRARCNRCKSSDARRQPQLWRTADAAMVSSR

SEQ ID NO: 41825 - protein, 88 aa, Homo sapiens
  MAP TO AC005678.1; EXPRESSED IN BONE MARROW, SIGNAL = 1.9; EXPRESSED IN HEART, SIGNAL = 4.4; EXPRESSED IN LUNG, SIGNAL = 3.3; EXPRESSED IN PLACENTA, SIGNAL = 3.5; EXPRESSED IN FETAL LIVER, SIGNAL = 3.5; EXPRESSED IN HELA, SIGNAL = 3.2; EXPRESSED IN BRAIN, SIGNAL = 2.9; EXPRESSED IN ADULT LIVER, SIGNAL = 2.4; EST_HUMAN HIT: BE882783.1, EVALUE 6.00e-42
WGRPTLPFPFIGSIARLLDLEDQQFQVMPQTRLKTWCLLRIESLKLTLMQMCMQVFSGTLDFSKQKYMWCQETLHWGFTELRILLTNH

SEQ ID NO: 41826 - protein, 59 aa, Homo sapiens
  MAP TO AL136226.2; EXPRESSED IN PLACENTA, SIGNAL = 9.4; EXPRESSED IN HEART, SIGNAL =  13; EXPRESSED IN BRAIN, SIGNAL = 8.5; EXPRESSED IN HELA, SIGNAL =  26; EXPRESSED IN LUNG, SIGNAL =  25; EXPRESSED IN FETAL LIVER, SIGNAL =  22; EXPRESSED IN BONE MARROW, SIGNAL =  10; EXPRESSED IN ADULT LIVER, SIGNAL = 2.9; EST_HUMAN HIT: AI611737.1, EVALUE 3.00e-25
LTRKTKALWLNWWKLSGPIMMTDTMRSTVTGEAMSWVTSLWLMSPSSKRQRLENLPLNW

SEQ ID NO: 41827 - protein, 49 aa, Homo sapiens
  MAP TO AC016911.2; EXPRESSED IN PLACENTA, SIGNAL =  17; EXPRESSED IN FETAL LIVER, SIGNAL = 3.5; EXPRESSED IN LUNG, SIGNAL =  64; EXPRESSED IN BRAIN, SIGNAL = 2.9; EXPRESSED IN HEART, SIGNAL = 4.2; EXPRESSED IN HELA, SIGNAL = 2.7; EXPRESSED IN BONE MARROW, SIGNAL = 2.9; EXPRESSED IN ADULT LIVER, SIGNAL = 2.9; EST_HUMAN HIT: AL046650.1, EVALUE 2.00e-24; SWISSPROT HIT: Q99814, EVALUE 2.00e-25
LCGYKEPLLSCLIIMCEPIQHPSHMDIPLDSKTFLSRHSMDMKFTYCDD

SEQ ID NO: 41828 - protein, 31 aa, Homo sapiens
  MAP TO AP001208.1; EXPRESSED IN BRAIN, SIGNAL = 4.9; EXPRESSED IN FETAL LIVER, SIGNAL = 4.6; EXPRESSED IN HELA, SIGNAL = 5.4; EXPRESSED IN ADULT LIVER, SIGNAL = 4.3; EXPRESSED IN BONE MARROW, SIGNAL = 3.9; EXPRESSED IN HEART, SIGNAL = 4.8; EXPRESSED IN PLACENTA, SIGNAL = 3.6; EXPRESSED IN LUNG, SIGNAL = 6.6; EST_HUMAN HIT: BE045590.1, EVALUE 2.00e-04
AEKSKVEGLHLVMAFLLVGTLKHPEVGRASH

SEQ ID NO: 41829 - protein, 35 aa, Homo sapiens [sequence omitted]

SEQ ID NO: 41830 - protein, 58 aa, Homo sapiens
  MAP TO AC018801.2; EXPRESSED IN BRAIN, SIGNAL = 2.2; EXPRESSED IN HELA, SIGNAL = 2.2; EXPRESSED IN HEART, SIGNAL = 2.2; EXPRESSED IN LUNG, SIGNAL = 2.6; EXPRESSED IN PLACENTA, SIGNAL = 2.4; EXPRESSED IN FETAL LIVER, SIGNAL = 2.4; EXPRESSED IN BONE MARROW, SIGNAL = 1.7; EXPRESSED IN ADULT LIVER, SIGNAL =   2; EST_HUMAN HIT: BE969579.1, EVALUE 5.40e-01; SWISSPROT HIT: P08640, EVALUE 2.10e-02
AVLEVPTPAVGAKRSAVAPEPTPVTFAASLRASGTCTLFSGHRENGSCPGNTQPGSIG

SEQ ID NO: 41831 - protein, 72 aa, Homo sapiens
  MAP TO AC025488.1; EXPRESSED IN BRAIN, SIGNAL = 1.3; EXPRESSED IN PLACENTA, SIGNAL = 1.9; EXPRESSED IN ADULT LIVER, SIGNAL =  14; EXPRESSED IN BONE MARROW, SIGNAL = 1.5; EXPRESSED IN FETAL LIVER, SIGNAL = 4.2; EXPRESSED IN HELA, SIGNAL = 2.2; EXPRESSED IN HEART, SIGNAL = 2.3; EST_HUMAN HIT: BF689099.1, EVALUE 7.00e-34; SWISSPROT HIT: P06133, EVALUE 1.00e-37
HPKTRAFITHGGANGIYEAIYHGIPMVGVPLFADQPDNIAHMKAKGAAVSLDFHTMSSTDLLNALKTVINDP

SEQ ID NO: 41832 - protein, 135 aa, Homo sapiens
  MAP TO AL133375.3; EXPRESSED IN PLACENTA, SIGNAL = 2.6; EXPRESSED IN BRAIN, SIGNAL = 3.4; EXPRESSED IN FETAL LIVER, SIGNAL = 2.9; EXPRESSED IN HELA, SIGNAL = 3.1; EXPRESSED IN BONE MARROW, SIGNAL = 3.4; EXPRESSED IN HEART, SIGNAL = 3.5; EXPRESSED IN LUNG, SIGNAL =   5; EXPRESSED IN ADULT LIVER, SIGNAL = 3.1; EST_HUMAN HIT: AA256874.1, EVALUE 1.00e-21; SWISSPROT HIT: Q14999, EVALUE 1.00e-04
TLGEKALGEISVSVEMAESLLQVLSSRFEGSTLNDLLNSQIYTKYGLLSNEPSSSSTSRNHSCTPDPEEESKSEASFSEEETESLKAKAEAPKTEAEPTKTRTETPMAQSDSQLFNQLLVTEGMTLPTEMKEAAS

SEQ ID NO: 41833 - protein, 36 aa, Homo sapiens
  MAP TO AL133375.3; EXPRESSED IN PLACENTA, SIGNAL = 2.6; EXPRESSED IN BRAIN, SIGNAL = 3.4; EXPRESSED IN FETAL LIVER, SIGNAL = 2.9; EXPRESSED IN HELA, SIGNAL = 3.1; EXPRESSED IN BONE MARROW, SIGNAL = 3.4; EXPRESSED IN HEART, SIGNAL = 3.5; EXPRESSED IN LUNG, SIGNAL =   5; EXPRESSED IN ADULT LIVER, SIGNAL = 3.1; EST_HUMAN HIT: BF375485.1, EVALUE 5.00e-16
VRSLCPWKWPRVCCRFSVVDLRAALSMTCSTPRSTP

SEQ ID NO: 41834 - protein, 54 aa, Homo sapiens
  MAP TO AL133375.3; EXPRESSED IN PLACENTA, SIGNAL = 2.6; EXPRESSED IN BRAIN, SIGNAL = 3.4; EXPRESSED IN FETAL LIVER, SIGNAL = 2.9; EXPRESSED IN HELA, SIGNAL = 3.1; EXPRESSED IN BONE MARROW, SIGNAL = 3.4; EXPRESSED IN HEART, SIGNAL = 3.5; EXPRESSED IN LUNG, SIGNAL =   5; EXPRESSED IN ADULT LIVER, SIGNAL = 3.1; EST_HUMAN HIT: AW593333.1, EVALUE 6.00e-05
IQKRSPSRRPASQRKRLSPSKQRPRPLRQRPSPPRQGPRPPWHRVILSCLTSFW

SEQ ID NO: 41835 - protein, 42 aa, Homo sapiens
  MAP TO AC024166.1; EXPRESSED IN HEART, SIGNAL = 1.8; EXPRESSED IN LUNG, SIGNAL = 1.8; EXPRESSED IN ADULT LIVER, SIGNAL = 1.9; EXPRESSED IN BRAIN, SIGNAL = 1.9; EXPRESSED IN PLACENTA, SIGNAL = 1.7; EXPRESSED IN FETAL LIVER, SIGNAL =   2; EXPRESSED IN BONE MARROW, SIGNAL = 1.7; EXPRESSED IN HELA, SIGNAL = 1.8; SWISSPROT HIT: P35367, EVALUE 9.00e-18
DKMCEGNKTTMASPQLMPLVVVLSTICLVTVGLNLLVLYAVR

SEQ ID NO: 41836 - protein, 129 aa, Homo sapiens
  MAP TO AC007954.6; EXPRESSED IN PLACENTA, SIGNAL = 2.8; EXPRESSED IN ADULT LIVER, SIGNAL = 3.1; EXPRESSED IN BRAIN, SIGNAL =   3; EXPRESSED IN LUNG, SIGNAL = 2.8; EXPRESSED IN HEART, SIGNAL = 2.8; EXPRESSED IN HELA, SIGNAL = 3.2; EXPRESSED IN FETAL LIVER, SIGNAL = 3.2; EXPRESSED IN BONE MARROW, SIGNAL = 2.5; SWISSPROT HIT: P33523, EVALUE 6.90e-01; EST_HUMAN HIT: F13069.1, EVALUE 4.00e-41
SSHLCHQNTHRGVRGSAKKGKKKRKKEATGDEGTPRSPFLEEKPLLLQLDSRILRPSPAPSPLQCGQGDKDQDAGKLGEPGLQQIQANRQTQMDGGCRAGSPLTRHPSLDSWPALRPRRVGSRQPVWLV

SEQ ID NO: 41837 - protein, 65 aa, Homo sapiens
  MAP TO AC009399.5; EXPRESSED IN BRAIN, SIGNAL = 2.6; EXPRESSED IN FETAL LIVER, SIGNAL = 5.1; EXPRESSED IN ADULT LIVER, SIGNAL = 3.2; EXPRESSED IN LUNG, SIGNAL = 2.4; EXPRESSED IN PLACENTA, SIGNAL = 3.1; EXPRESSED IN HEART, SIGNAL = 3.6; EXPRESSED IN HELA, SIGNAL = 5.1; EXPRESSED IN BONE MARROW, SIGNAL = 3.1; SWISSPROT HIT: P25444, EVALUE 2.00e-08; EST_HUMAN HIT: BE789161.1, EVALUE 2.00e-09
DRRCAQGPHHRAHRSKTKYKECVTIRMLGCLDKNMKIKSLEQISLFSLPIKESEIIDISGDTLSQ

SEQ ID NO: 41838 - protein, 46 aa, Homo sapiens
  MAP TO AL133312.2; EXPRESSED IN ADULT LIVER, SIGNAL = 2.5; EXPRESSED IN BONE MARROW, SIGNAL = 2.2; EXPRESSED IN HEART, SIGNAL = 7.4; EXPRESSED IN PLACENTA, SIGNAL = 2.6; EXPRESSED IN BRAIN, SIGNAL = 2.3; EXPRESSED IN HELA, SIGNAL = 3.7; EXPRESSED IN FETAL LIVER, SIGNAL = 3.7
FQASTPALSRAFAQIARHNAVGTEEKKPEGVWEQASVDSTSATSSS

SEQ ID NO: 41839 - protein, 26 aa, Homo sapiens
  MAP TO AC016663.2; EXPRESSED IN BONE MARROW, SIGNAL = 3.4; EXPRESSED IN HELA, SIGNAL = 3.8; EXPRESSED IN HEART, SIGNAL = 2.7; EXPRESSED IN LUNG, SIGNAL = 2.7; EXPRESSED IN PLACENTA, SIGNAL = 8.1; EXPRESSED IN BRAIN, SIGNAL = 2.5; EXPRESSED IN FETAL LIVER, SIGNAL = 3.4; EXPRESSED IN ADULT LIVER, SIGNAL = 1.8; EST_HUMAN HIT: AA035707.1, EVALUE 2.70e+00
AADTLPDPEGWKSAAVSATTAISSGG

SEQ ID NO: 41840 - protein, 33 aa, Homo sapiens
  MAP TO AL133163.2; EXPRESSED IN BONE MARROW, SIGNAL =  11; EXPRESSED IN HEART, SIGNAL = 3.7; EXPRESSED IN PLACENTA, SIGNAL = 2.9; EXPRESSED IN FETAL LIVER, SIGNAL = 4.1; EXPRESSED IN HELA, SIGNAL = 5.5; EXPRESSED IN LUNG, SIGNAL =  14; EXPRESSED IN BRAIN, SIGNAL = 2.2; EXPRESSED IN ADULT LIVER, SIGNAL = 2.9; EST_HUMAN HIT: AU154288.1, EVALUE 1.00e-11; SWISSPROT HIT: Q9QUM9, EVALUE 8.00e-13
KATAAGVKQTESTSFLEKKVKKKFDWTFEQTVE

SEQ ID NO: 41841 - protein, 140 aa, Homo sapiens
  MAP TO AL132641.2; EXPRESSED IN PLACENTA, SIGNAL = 2.3; EXPRESSED IN HELA, SIGNAL =   2; EXPRESSED IN LUNG, SIGNAL =   5; EXPRESSED IN FETAL LIVER, SIGNAL = 3.9; EXPRESSED IN HEART, SIGNAL = 2.1; EXPRESSED IN BRAIN, SIGNAL = 1.8; EST_HUMAN HIT: BE150340.1, EVALUE 2.00e-56; SWISSPROT HIT: P10272, EVALUE 9.00e-29
EVTALPPSTTSQQAKLVALTQALTLAKGLCINIYSDSKYAFHILHHHAVIQAERGFLTTQGSSIINASLIKALLKATLLPKEAGVIHCKGHQKASDPIALDNAYADKVARQAGSFPTSVPHSQFFSFTSVTPTYPPAPPL

SEQ ID NO: 41842 - protein, 95 aa, Homo sapiens
  MAP TO AC008865.3; EXPRESSED IN BRAIN, SIGNAL = 4.3; EXPRESSED IN PLACENTA, SIGNAL = 2.9; EXPRESSED IN FETAL LIVER, SIGNAL = 4.9; EXPRESSED IN HELA, SIGNAL = 5.4; EXPRESSED IN ADULT LIVER, SIGNAL = 3.7; EXPRESSED IN BONE MARROW, SIGNAL =   3; EXPRESSED IN HEART, SIGNAL = 4.2; EXPRESSED IN LUNG, SIGNAL = 2.2; SWISSPROT HIT: O15553, EVALUE 7.20e+00; EST_HUMAN HIT: AI824829.1, EVALUE 2.00e-26
EVISYYSQYSLDEKMRSHMALDWIMKERDSPGIVSQELRMALRQLEEARKAGQELRFYKEKKEILSLALTQICSDPDTSSPSDDQLSLTALCGYH

SEQ ID NO: 41843 - protein, 22 aa, Homo sapiens
  MAP TO AC008567.3; EXPRESSED IN PLACENTA, SIGNAL =  13; EXPRESSED IN BONE MARROW, SIGNAL =  26; EXPRESSED IN HELA, SIGNAL =  21; EXPRESSED IN LUNG, SIGNAL =  17; EXPRESSED IN HEART, SIGNAL =  28; EXPRESSED IN BRAIN, SIGNAL =  18; EXPRESSED IN FETAL LIVER, SIGNAL =  29; EXPRESSED IN ADULT LIVER, SIGNAL = 8.9; EST_HUMAN HIT: AA827617.1, EVALUE 2.00e-03
TPPCTLVLLTGWRRRSPPWLPA

SEQ ID NO: 41844 - protein, 57 aa, Homo sapiens
  MAP TO AL133454.2; EXPRESSED IN HELA, SIGNAL = 5.3; EXPRESSED IN LUNG, SIGNAL =   2; EXPRESSED IN BONE MARROW, SIGNAL = 3.3; EXPRESSED IN FETAL LIVER, SIGNAL = 5.2; EXPRESSED IN ADULT LIVER, SIGNAL = 3.5; EXPRESSED IN HEART, SIGNAL = 4.5; EXPRESSED IN BRAIN, SIGNAL = 3.2; EXPRESSED IN PLACENTA, SIGNAL = 2.9; EST_HUMAN HIT: BE538812.1, EVALUE 2.00e-26; SWISSPROT HIT: Q63450, EVALUE 6.00e-13
LHTFLVMELLNGGELFERIKKKKHFSETEASYIMRKLVSAVSHMHDVGVVHRDLKPE

SEQ ID NO: 41845 - protein, 64 aa, Homo sapiens
  MAP TO AC008444.3; EXPRESSED IN BRAIN, SIGNAL = 2.6; EXPRESSED IN HELA, SIGNAL = 3.2; EXPRESSED IN HEART, SIGNAL = 2.5; EXPRESSED IN ADULT LIVER, SIGNAL = 2.4; EXPRESSED IN FETAL LIVER, SIGNAL = 2.6; EXPRESSED IN PLACENTA, SIGNAL = 2.1; EXPRESSED IN LUNG, SIGNAL = 3.6; EXPRESSED IN BONE MARROW, SIGNAL = 2.5; EST_HUMAN HIT: BE464777.1, EVALUE 5.80e+00; SWISSPROT HIT: P24504, EVALUE 2.00e+00
DLASVSEEKQSSSDRESGEMVLTHFKGDKSQPTYEGYSDPQQGKKQAFFPDKICLLAMGVSLAK

SEQ ID NO: 41846 - protein, 39 aa, Homo sapiens
  MAP TO AC010305.3; EXPRESSED IN BRAIN, SIGNAL =  16; EXPRESSED IN ADULT LIVER, SIGNAL =  15; EXPRESSED IN HELA, SIGNAL =  25; EXPRESSED IN HEART, SIGNAL =  14; EXPRESSED IN PLACENTA, SIGNAL =  20; EXPRESSED IN LUNG, SIGNAL =  26; EXPRESSED IN FETAL LIVER, SIGNAL =  36; EXPRESSED IN BONE MARROW, SIGNAL =  32; EST_HUMAN HIT: AA330948.1, EVALUE 8.00e-10
RRVACSSSLRSMARSELTKPTLLDSWMSSALTRWERIFV

SEQ ID NO: 41847 - protein, 26 aa, Homo sapiens
  MAP TO AC021881.2; EXPRESSED IN PLACENTA, SIGNAL = 2.4; EXPRESSED IN HELA, SIGNAL = 2.7; EXPRESSED IN BRAIN, SIGNAL = 2.2; EXPRESSED IN LUNG, SIGNAL = 2.7; EXPRESSED IN HEART, SIGNAL = 2.1; EXPRESSED IN FETAL LIVER, SIGNAL = 2.3; EXPRESSED IN BONE MARROW, SIGNAL = 1.8; EXPRESSED IN ADULT LIVER, SIGNAL =   2; SWISSPROT HIT: Q48960, EVALUE 8.70e+00; EST_HUMAN HIT: BF331829.1, EVALUE 2.00e-08
LGGIKYELQRIKKLGHLFNKHWLSTI

SEQ ID NO: 41848 - protein, 118 aa, Homo sapiens
  MAP TO AC023074.2; EXPRESSED IN PLACENTA, SIGNAL = 1.7; EXPRESSED IN BONE MARROW, SIGNAL = 2.2; EXPRESSED IN LUNG, SIGNAL = 1.8; EXPRESSED IN BRAIN, SIGNAL =   2; EXPRESSED IN HEART, SIGNAL = 2.5; EXPRESSED IN HELA, SIGNAL = 2.4; EXPRESSED IN FETAL LIVER, SIGNAL =   2; EXPRESSED IN ADULT LIVER, SIGNAL = 2.4; SWISSPROT HIT: Q10335, EVALUE 2.20e-02
PCAILQNPLSSHMQFLQYLLELKNLTESGNLKRDLTHFEKDSSTVSDSVFQLLDGLITFYRNPKLPFSRFWTEAVGTLASLISDYNLSSHILKKCSKKLEEFEKTLLHAILGNNHINQ

SEQ ID NO: 41849 - protein, 21 aa, Homo sapiens
  MAP TO AC023074.2; EXPRESSED IN PLACENTA, SIGNAL = 1.7; EXPRESSED IN BONE MARROW, SIGNAL = 2.2; EXPRESSED IN LUNG, SIGNAL = 1.8; EXPRESSED IN BRAIN, SIGNAL =   2; EXPRESSED IN HEART, SIGNAL = 2.5; EXPRESSED IN HELA, SIGNAL = 2.4; EXPRESSED IN FETAL LIVER, SIGNAL =   2; EXPRESSED IN ADULT LIVER, SIGNAL = 2.4
LVLSCKILCLLTCNSCNIYLN

SEQ ID NO: 41850 - protein, 28 aa, Homo sapiens
  MAP TO AC022035.2; EXPRESSED IN BRAIN, SIGNAL = 1.6; EXPRESSED IN PLACENTA, SIGNAL =   2; EXPRESSED IN FETAL LIVER, SIGNAL = 2.3; EXPRESSED IN HELA, SIGNAL = 2.2; EXPRESSED IN ADULT LIVER, SIGNAL = 1.6; EXPRESSED IN BONE MARROW, SIGNAL = 4.9; EXPRESSED IN LUNG, SIGNAL = 1.7; EXPRESSED IN HEART, SIGNAL = 1.8
GCIHNLALASWKQSTLPQFNKLVLSSGI

SEQ ID NO: 41851 - protein, 28 aa, Homo sapiens
  MAP TO AC022035.2; EXPRESSED IN BRAIN, SIGNAL = 1.6; EXPRESSED IN PLACENTA, SIGNAL =   2; EXPRESSED IN FETAL LIVER, SIGNAL = 2.3; EXPRESSED IN HELA, SIGNAL = 2.2; EXPRESSED IN ADULT LIVER, SIGNAL = 1.6; EXPRESSED IN BONE MARROW, SIGNAL = 4.9; EXPRESSED IN LUNG, SIGNAL = 1.7; EXPRESSED IN HEART, SIGNAL = 1.8
EDASTTLPWRHGSRVHFPNSINLSYPVE

SEQ ID NO: 41852 - protein, 70 aa, Homo sapiens
  MAP TO AC022274.3; EXPRESSED IN BRAIN, SIGNAL = 2.2; EXPRESSED IN PLACENTA, SIGNAL = 2.3; EXPRESSED IN HELA, SIGNAL = 4.1; EXPRESSED IN ADULT LIVER, SIGNAL = 2.1; EXPRESSED IN BONE MARROW, SIGNAL = 1.5; EXPRESSED IN FETAL LIVER, SIGNAL = 3.9; EXPRESSED IN LUNG, SIGNAL = 2.5; EXPRESSED IN HEART, SIGNAL = 3.9; SWISSPROT HIT: Q04544, EVALUE 2.00e+00; EST_HUMAN HIT: AW813783.1, EVALUE 2.00e-27
NMDNEVQVEVVSDGDEELLGNWSKSHSCYALAKRLVALCPCHRDMWNFETERDYLEYLAEEISKQQSIQE

SEQ ID NO: 41853 - protein, 30 aa, Homo sapiens
  MAP TO AC022274.3; EXPRESSED IN BRAIN, SIGNAL = 2.2; EXPRESSED IN PLACENTA, SIGNAL = 2.3; EXPRESSED IN HELA, SIGNAL = 4.1; EXPRESSED IN ADULT LIVER, SIGNAL = 2.1; EXPRESSED IN BONE MARROW, SIGNAL = 1.5; EXPRESSED IN FETAL LIVER, SIGNAL = 3.9; EXPRESSED IN LUNG, SIGNAL = 2.5; EXPRESSED IN HEART, SIGNAL = 3.9; EST_HUMAN HIT: AI921003.1, EVALUE 4.00e-07
IWTMKSRLRWSQMEMRNFLGTGAKATLAML

SEQ ID NO: 41854 - protein, 46 aa, Homo sapiens
  MAP TO AL121769.2; EXPRESSED IN BRAIN, SIGNAL =  13; EXPRESSED IN FETAL LIVER, SIGNAL = 5.5; EXPRESSED IN ADULT LIVER, SIGNAL = 2.6; EXPRESSED IN PLACENTA, SIGNAL = 3.3; EXPRESSED IN LUNG, SIGNAL =  11; EXPRESSED IN HEART, SIGNAL = 3.2; EXPRESSED IN HELA, SIGNAL =   6; EXPRESSED IN BONE MARROW, SIGNAL =   8; EST_HUMAN HIT: BF676527.1, EVALUE 1.00e-07
RLRSALHRVLLRLFRHVRIFDHGLLVAHGYPWRRGLADCNGLLGRC

SEQ ID NO: 41855 - protein, 46 aa, Homo sapiens
  MAP TO AL121769.2; EXPRESSED IN BRAIN, SIGNAL =  13; EXPRESSED IN FETAL LIVER, SIGNAL = 5.5; EXPRESSED IN ADULT LIVER, SIGNAL = 2.6; EXPRESSED IN PLACENTA, SIGNAL = 3.3; EXPRESSED IN LUNG, SIGNAL =  11; EXPRESSED IN HEART, SIGNAL = 3.2; EXPRESSED IN HELA, SIGNAL =   6; EXPRESSED IN BONE MARROW, SIGNAL =   8; SWISSPROT HIT: Q15701, EVALUE 4.00e-07; EST_HUMAN HIT: BF699866.1, EVALUE 2.00e-12
LAPPQETVAVSQPPSPWVTMCDQKAVIKNADMSEETQQNSVECAPQ

SEQ ID NO: 41856 - protein, 130 aa, Homo sapiens
  MAP TO AL122127.3; EXPRESSED IN BRAIN, SIGNAL = 2.1; EXPRESSED IN PLACENTA, SIGNAL = 1.7; EXPRESSED IN FETAL LIVER, SIGNAL = 3.6; EXPRESSED IN ADULT LIVER, SIGNAL = 3.1; EXPRESSED IN BONE MARROW, SIGNAL =  40; EXPRESSED IN HELA, SIGNAL = 2.7; EXPRESSED IN HEART, SIGNAL = 2.9; EXPRESSED IN LUNG, SIGNAL =  30; SWISSPROT HIT: P01871, EVALUE 1.00e-73; EST_HUMAN HIT: AW406524.1, EVALUE 1.00e-72
VALHRPDVYLLPPAREQLNLRESATITCLVTGFSPADVFVQWMQRGQPLSPEKYVTSAPMPEPQAPGRYFAHSILTVSEEEWNTGETYTCVVAHEALPNRVTERTVDKSTGKPTLYNVSLVMSDTAGTCY

SEQ ID NO: 41857 - protein, 72 aa, Homo sapiens
  MAP TO AL049781.4; EXPRESSED IN ADULT LIVER, SIGNAL = 4.4; EXPRESSED IN HEART, SIGNAL = 5.6; EXPRESSED IN BRAIN, SIGNAL = 4.6; EXPRESSED IN PLACENTA, SIGNAL = 3.8; EXPRESSED IN BONE MARROW, SIGNAL = 3.5; EXPRESSED IN FETAL LIVER, SIGNAL = 5.8; EXPRESSED IN HELA, SIGNAL = 5.9; EXPRESSED IN LUNG, SIGNAL = 1.8; SWISSPROT HIT: P53692, EVALUE 7.50e+00; EST_HUMAN HIT: AW451230.1, EVALUE 3.00e-36
SLCREIKQRRRGVASILRLCQHLLDDRETCNLNADHQPMQLIIVNLERRWEAIVMQAVQWQTRLQKKMGKES

SEQ ID NO: 41858 - protein, 19 aa, Homo sapiens
  MAP TO AL049781.4; EXPRESSED IN ADULT LIVER, SIGNAL = 4.4; EXPRESSED IN HEART, SIGNAL = 5.6; EXPRESSED IN BRAIN, SIGNAL = 4.6; EXPRESSED IN PLACENTA, SIGNAL = 3.8; EXPRESSED IN BONE MARROW, SIGNAL = 3.5; EXPRESSED IN FETAL LIVER, SIGNAL = 5.8; EXPRESSED IN HELA, SIGNAL = 5.9; EXPRESSED IN LUNG, SIGNAL = 1.8; EST_HUMAN HIT: AW451230.1, EVALUE 6.00e-05
GDLQSECRPPAHAADHCKS

SEQ ID NO: 41859 - protein, 38 aa, Homo sapiens
  MAP TO AC023392.2; EXPRESSED IN BONE MARROW, SIGNAL = 4.2; EXPRESSED IN LUNG, SIGNAL = 3.1; EXPRESSED IN BRAIN, SIGNAL = 3.6; EXPRESSED IN PLACENTA, SIGNAL =   3; EXPRESSED IN ADULT LIVER, SIGNAL = 3.1; EXPRESSED IN FETAL LIVER, SIGNAL = 6.9; EXPRESSED IN HELA, SIGNAL = 6.9; EXPRESSED IN HEART, SIGNAL = 6.8; EST_HUMAN HIT: AA890162.1, EVALUE 2.00e-03; SWISSPROT HIT: Q92539, EVALUE 6.40e+00
NLQSWRKTKLEWDISHGWSWRKREKWEVLHTFKTTRSA

SEQ ID NO: 41860 - protein, 97 aa, Homo sapiens
  MAP TO AC018836.2; EXPRESSED IN PLACENTA, SIGNAL = 1.8; EXPRESSED IN ADULT LIVER, SIGNAL = 1.7; EXPRESSED IN FETAL LIVER, SIGNAL = 2.2; EXPRESSED IN HELA, SIGNAL = 2.2; EXPRESSED IN LUNG, SIGNAL = 2.3; EXPRESSED IN HEART, SIGNAL =   2; EXPRESSED IN BRAIN, SIGNAL = 2.5; EST_HUMAN HIT: AW503445.1, EVALUE 1.00e-21; SWISSPROT HIT: Q92973, EVALUE 6.30e+00
SEDEYSDDDDMSWKVRRAAAKCIAALISSRPDLLPDFHCTLAPVLIRRFKEREENVKADVFTAYIVLLRQTQPPKGWLEAMEEPTQTGSNLHMLRGQ

SEQ ID NO: 41861 - protein, 40 aa, Homo sapiens
  MAP TO AC004808.1; EXPRESSED IN BRAIN, SIGNAL = 3.1; EXPRESSED IN PLACENTA, SIGNAL = 2.6; EXPRESSED IN LUNG, SIGNAL = 1.9; EXPRESSED IN HEART, SIGNAL = 4.1; EXPRESSED IN HELA, SIGNAL = 4.3; EXPRESSED IN FETAL LIVER, SIGNAL = 3.6; EXPRESSED IN BONE MARROW, SIGNAL = 2.3; EXPRESSED IN ADULT LIVER, SIGNAL = 3.3
KWNHIINTKADFEKYVFGGFLYEAEKMVVKGMIISNLSVT

SEQ ID NO: 41862 - protein, 83 aa, Homo sapiens
  MAP TO AC011989.3; EXPRESSED IN BRAIN, SIGNAL = 7.3; EXPRESSED IN PLACENTA, SIGNAL = 4.5; EXPRESSED IN HELA, SIGNAL = 6.5; EXPRESSED IN FETAL LIVER, SIGNAL = 5.5; EXPRESSED IN HEART, SIGNAL = 5.2; EXPRESSED IN LUNG, SIGNAL = 4.2; EXPRESSED IN ADULT LIVER, SIGNAL = 5.4; EXPRESSED IN BONE MARROW, SIGNAL = 4.4; SWISSPROT HIT: Q58361, EVALUE 7.90e+00
KFLYDLVPTNLSDLTHAMFPFSKIQPSAATLSYENTAHSFLLLTFTLLCVLPGTHLSRLFQACVVFILPVSAYNVTFSVTIVL

SEQ ID NO: 41863 - protein, 42 aa, Homo sapiens
  MAP TO AC011989.3; EXPRESSED IN BRAIN, SIGNAL = 7.3; EXPRESSED IN PLACENTA, SIGNAL = 4.5; EXPRESSED IN HELA, SIGNAL = 6.5; EXPRESSED IN FETAL LIVER, SIGNAL = 5.5; EXPRESSED IN HEART, SIGNAL = 5.2; EXPRESSED IN LUNG, SIGNAL = 4.2; EXPRESSED IN ADULT LIVER, SIGNAL = 5.4; EXPRESSED IN BONE MARROW, SIGNAL = 4.4; EST_HUMAN HIT: BF664917.1, EVALUE 5.40e+00
NFCMTWSLPTSLTSLMPCSPFLRSSHQQLLLVMKTQHTLSCF

SEQ ID NO: 41864 - protein, 57 aa, Homo sapiens
  MAP TO AC003692.1; EXPRESSED IN BRAIN, SIGNAL = 2.2; EXPRESSED IN ADULT LIVER, SIGNAL = 2.9; EXPRESSED IN BONE MARROW, SIGNAL = 2.5; EXPRESSED IN LUNG, SIGNAL = 1.9; EXPRESSED IN PLACENTA, SIGNAL = 1.9; EXPRESSED IN HEART, SIGNAL =   3; EXPRESSED IN HELA, SIGNAL = 2.2; EXPRESSED IN FETAL LIVER, SIGNAL = 2.1; SWISSPROT HIT: P80303, EVALUE 7.00e-14; EST_HUMAN HIT: AI634206.1, EVALUE 3.00e-13
TLDEQQFFTEEELKEYENIIALQENELKKKADELQKQKEELQRQHDQLEAQKLEYHQ

SEQ ID NO: 41865 - protein, 63 aa, Homo sapiens
  MAP TO AC011683.3; EXPRESSED IN BONE MARROW, SIGNAL = 2.2; EXPRESSED IN FETAL LIVER, SIGNAL = 3.5; EXPRESSED IN HEART, SIGNAL = 3.4; EXPRESSED IN PLACENTA, SIGNAL = 2.4; EXPRESSED IN BRAIN, SIGNAL = 2.6; EXPRESSED IN HELA, SIGNAL = 3.3; EXPRESSED IN ADULT LIVER, SIGNAL = 2.5; EXPRESSED IN LUNG, SIGNAL = 2.4; SWISSPROT HIT: P25601, EVALUE 5.90e+00
FQCHLQQQGSRISINDRRHNARGLGGQVLVLTAGTCNSSDLKSWERSASLLLLQLWSPQLLSI

SEQ ID NO: 41866 - protein, 101 aa, Homo sapiens; identical to SEQ ID NO: 40700
  MAP TO AL122021.3; EXPRESSED IN ADULT LIVER, SIGNAL = 2.2; EXPRESSED IN FETAL LIVER, SIGNAL = 4.7; EXPRESSED IN BRAIN, SIGNAL = 2.4; EXPRESSED IN PLACENTA, SIGNAL = 1.9; EXPRESSED IN BONE MARROW, SIGNAL = 2.9; EXPRESSED IN HELA, SIGNAL = 4.9; EXPRESSED IN HEART, SIGNAL = 3.9; EST_HUMAN HIT: BE408611.1, EVALUE 4.00e-22

SEQ ID NO: 41867 - protein, 31 aa, Homo sapiens
  MAP TO AL122010.2; EXPRESSED IN ADULT LIVER, SIGNAL = 2.5; EXPRESSED IN HEART, SIGNAL = 2.4; EXPRESSED IN BRAIN, SIGNAL = 2.4; EXPRESSED IN PLACENTA, SIGNAL = 1.8; EXPRESSED IN BONE MARROW, SIGNAL = 2.2; EXPRESSED IN HELA, SIGNAL =   3; EXPRESSED IN LUNG, SIGNAL = 2.8; EXPRESSED IN FETAL LIVER, SIGNAL = 2.9; SWISSPROT HIT: Q65399, EVALUE 1.70e+00
KFEENGEIEETATMYNSRETKAEFVRWHRAP

SEQ ID NO: 41868 - protein, 31 aa, Homo sapiens
  MAP TO AL122010.2; EXPRESSED IN ADULT LIVER, SIGNAL = 2.5; EXPRESSED IN HEART, SIGNAL = 2.4; EXPRESSED IN BRAIN, SIGNAL = 2.4; EXPRESSED IN PLACENTA, SIGNAL = 1.8; EXPRESSED IN BONE MARROW, SIGNAL = 2.2; EXPRESSED IN HELA, SIGNAL =   3; EXPRESSED IN LUNG, SIGNAL = 2.8; EXPRESSED IN FETAL LIVER, SIGNAL = 2.9
SLRRMEKLRKLPPCTTAERPKQNSSGGTERP

SEQ ID NO: 41869 - protein, 44 aa, Homo sapiens
  MAP TO AC002401.1; EXPRESSED IN BONE MARROW, SIGNAL = 2.3; EXPRESSED IN FETAL LIVER, SIGNAL = 2.5; EXPRESSED IN LUNG, SIGNAL = 3.5; EXPRESSED IN BRAIN, SIGNAL = 2.6; EXPRESSED IN PLACENTA, SIGNAL = 2.2; EXPRESSED IN ADULT LIVER, SIGNAL = 1.8; EXPRESSED IN HELA, SIGNAL = 2.3; EXPRESSED IN HEART, SIGNAL = 1.8; EST_HUMAN HIT: AW410698.1, EVALUE 7.00e-19; SWISSPROT HIT: Q01738, EVALUE 2.80e+00
CSALTPTRITIVATRMWIPWQPLLSTSWRSVWRGWSCSLWSWRR

SEQ ID NO: 41870 - protein, 18 aa, Homo sapiens
  MAP TO AC002401.1; EXPRESSED IN BONE MARROW, SIGNAL = 2.3; EXPRESSED IN FETAL LIVER, SIGNAL = 2.5; EXPRESSED IN LUNG, SIGNAL = 3.5; EXPRESSED IN BRAIN, SIGNAL = 2.6; EXPRESSED IN PLACENTA, SIGNAL = 2.2; EXPRESSED IN ADULT LIVER, SIGNAL = 1.8; EXPRESSED IN HELA, SIGNAL = 2.3; EXPRESSED IN HEART, SIGNAL = 1.8; EST_HUMAN HIT: AW410698.1, EVALUE 1.00e-03
QRGLRSSQRGCGSHGSLC

SEQ ID NO: 41871 - protein, 25 aa, Homo sapiens
  MAP TO AC009680.5; EXPRESSED IN FETAL LIVER, SIGNAL = 5.8; EXPRESSED IN HEART, SIGNAL = 5.5; EXPRESSED IN BRAIN, SIGNAL = 5.2; EXPRESSED IN PLACENTA, SIGNAL = 5.9; EXPRESSED IN LUNG, SIGNAL = 7.3; EXPRESSED IN ADULT LIVER, SIGNAL =   6; EXPRESSED IN BONE MARROW, SIGNAL = 4.6; EXPRESSED IN HELA, SIGNAL = 6.2
NMYVITLKVILITLKIKDRVDVNLN

SEQ ID NO: 41872 - protein, 39 aa, Homo sapiens
  MAP TO AL050303.2; EXPRESSED IN ADULT LIVER, SIGNAL =   5; EXPRESSED IN BONE MARROW, SIGNAL = 4.6; EXPRESSED IN HEART, SIGNAL = 5.4; EXPRESSED IN BRAIN, SIGNAL = 6.4; EXPRESSED IN PLACENTA, SIGNAL = 4.2; EXPRESSED IN HELA, SIGNAL = 5.8; EXPRESSED IN FETAL LIVER, SIGNAL = 5.9; EXPRESSED IN LUNG, SIGNAL = 7.5
LVQVIVLQLQQGGNPLLSPISAAAQSPAPAQSPEPAQPA

SEQ ID NO: 41873 - protein, 38 aa, Homo sapiens
  MAP TO AL050303.2; EXPRESSED IN ADULT LIVER, SIGNAL =   5; EXPRESSED IN BONE MARROW, SIGNAL = 4.6; EXPRESSED IN HEART, SIGNAL = 5.4; EXPRESSED IN BRAIN, SIGNAL = 6.4; EXPRESSED IN PLACENTA, SIGNAL = 4.2; EXPRESSED IN HELA, SIGNAL = 5.8; EXPRESSED IN FETAL LIVER, SIGNAL = 5.9; EXPRESSED IN LUNG, SIGNAL = 7.5
AGCAGSGLCAGAGLCAAAEMGLSSGFPPCCSWRTITCT

SEQ ID NO: 41874 - protein, 154 aa, Homo sapiens
  MAP TO AC007227.3; EXPRESSED IN BRAIN, SIGNAL =   2; EXPRESSED IN PLACENTA, SIGNAL = 1.9; EXPRESSED IN ADULT LIVER, SIGNAL = 1.7; EXPRESSED IN BONE MARROW, SIGNAL = 2.1; EXPRESSED IN FETAL LIVER, SIGNAL = 2.3; EXPRESSED IN HELA, SIGNAL = 2.8; EXPRESSED IN LUNG, SIGNAL = 2.9; EXPRESSED IN HEART, SIGNAL = 2.3; EST_HUMAN HIT: BE298449.1, EVALUE 1.00e-78; SWISSPROT HIT: P35269, EVALUE 3.00e-04
PPKVGDDSDLSEGFESDSSHDSARASEGSDSGSDKSLEGGGTAFDAETDSEMNSQESRSDLEDMEEEEGTRSPTLEPPRGRSEAPDSLNGPLGPSEASIASNLQAMSTQMFQTKRCFRLAPTFSNLLLQPTTNPHTSASHRPCVNGDVDKPSEP

SEQ ID NO: 41875 - protein, 36 aa, Homo sapiens
  MAP TO AL121819.1; EXPRESSED IN BRAIN, SIGNAL = 1.4; EXPRESSED IN PLACENTA, SIGNAL =   2; EXPRESSED IN BONE MARROW, SIGNAL = 1.8; EXPRESSED IN FETAL LIVER, SIGNAL = 2.9; EXPRESSED IN HELA, SIGNAL = 2.7; EXPRESSED IN HEART, SIGNAL =   2; EXPRESSED IN ADULT LIVER, SIGNAL = 2.2; EST_HUMAN HIT: AW997696.1, EVALUE 9.70e+00
TYSHEGVASKAADMIPFQGLGLLVQIPTAKPIKARE

SEQ ID NO: 41876 - protein, 32 aa, Homo sapiens [sequence omitted]

SEQ ID NO: 41877 - protein, 59 aa, Homo sapiens
  MAP TO AL133380.3; EXPRESSED IN PLACENTA, SIGNAL =  40; EXPRESSED IN BONE MARROW, SIGNAL =  40; EXPRESSED IN FETAL LIVER, SIGNAL =  45; EXPRESSED IN HELA, SIGNAL =  50; EXPRESSED IN LUNG, SIGNAL =  50; EXPRESSED IN HEART, SIGNAL = 1.6e+02; EXPRESSED IN BRAIN, SIGNAL =  80; EXPRESSED IN ADULT LIVER, SIGNAL =  80; EST_HUMAN HIT: BF207423.1, EVALUE 8.00e+00; SWISSPROT HIT: Q02779, EVALUE 6.90e-01
EEAASANAATVSIEMTPTNSLSRSPQRKKTESALYGCTVLLASVALGLDLRELHKAQAA

SEQ ID NO: 41878 - protein, 105 aa, Homo sapiens
  MAP TO AC012578.5; EXPRESSED IN ADULT LIVER, SIGNAL = 2.8; EXPRESSED IN FETAL LIVER, SIGNAL = 2.8; EXPRESSED IN BRAIN, SIGNAL = 1.6; EXPRESSED IN PLACENTA, SIGNAL = 2.1; EXPRESSED IN HEART, SIGNAL = 2.7; EXPRESSED IN BONE MARROW, SIGNAL = 2.2; EXPRESSED IN HELA, SIGNAL =   3; SWISSPROT HIT: O66403, EVALUE 5.20e+00
AVPAQAILLRIELSNIKALGAKSAFRIPLRLFSSFQQMTGEEMKHLQDLSEETPAVNDTQVLCFLPTYRSPKCPWNTQLLATGCSAPPFQEAKVNMTVKYKKYEV

SEQ ID NO: 41879 - protein, 38 aa, Homo sapiens
  MAP TO AC012578.5; EXPRESSED IN ADULT LIVER, SIGNAL = 2.8; EXPRESSED IN FETAL LIVER, SIGNAL = 2.8; EXPRESSED IN BRAIN, SIGNAL = 1.6; EXPRESSED IN PLACENTA, SIGNAL = 2.1; EXPRESSED IN HEART, SIGNAL = 2.7; EXPRESSED IN BONE MARROW, SIGNAL = 2.2; EXPRESSED IN HELA, SIGNAL =   3; EST_HUMAN HIT: AV658289.1, EVALUE 2.50e+00
WLFQPRPFSSASNCPTSKPLELNLPSEFHSDFLVLSNR

SEQ ID NO: 41880 - protein, 52 aa, Homo sapiens
  MAP TO AL135792.3; EXPRESSED IN BRAIN, SIGNAL = 3.2; EXPRESSED IN HELA, SIGNAL = 3.5; EXPRESSED IN ADULT LIVER, SIGNAL = 3.3; EXPRESSED IN PLACENTA, SIGNAL = 2.6; EXPRESSED IN LUNG, SIGNAL = 3.5; EXPRESSED IN HEART, SIGNAL = 3.3; EXPRESSED IN FETAL LIVER, SIGNAL = 3.2; EXPRESSED IN BONE MARROW, SIGNAL = 2.6
ILEAGPSPTKHLPHFHPAPPHAITGKTLRQKNTLKISLQMEPFHVARDRQLG

SEQ ID NO: 41881 - protein, 24 aa, Homo sapiens
  MAP TO AL109925.11; EXPRESSED IN PLACENTA, SIGNAL = 2.4; EXPRESSED IN BRAIN, SIGNAL = 2.2; EXPRESSED IN HELA, SIGNAL = 2.9; EXPRESSED IN FETAL LIVER, SIGNAL = 3.7; EXPRESSED IN HEART, SIGNAL = 2.7; EXPRESSED IN LUNG, SIGNAL = 2.5; SWISSPROT HIT: P21414, EVALUE 8.80e-02; EST_HUMAN HIT: AW843480.1, EVALUE 6.00e-03
QAELTALTRDLALAKGLRVNIYTD

SEQ ID NO: 41882 - protein, 41 aa, Homo sapiens
  MAP TO AL109925.11; EXPRESSED IN PLACENTA, SIGNAL = 2.4; EXPRESSED IN BRAIN, SIGNAL = 2.2; EXPRESSED IN HELA, SIGNAL = 2.9; EXPRESSED IN FETAL LIVER, SIGNAL = 3.7; EXPRESSED IN HEART, SIGNAL = 2.7; EXPRESSED IN LUNG, SIGNAL = 2.5; EST_HUMAN HIT: BE150340.1, EVALUE 2.00e-14
DYASIFILTVNMPSISCTTMLLYGQKEISSLCKGPPSLMPL

SEQ ID NO: 41883 - protein, 24 aa, Homo sapiens
  MAP TO AL139105.2; EXPRESSED IN BRAIN, SIGNAL = 1.3; EXPRESSED IN HELA, SIGNAL = 1.9; EXPRESSED IN FETAL LIVER, SIGNAL = 2.5; EXPRESSED IN HEART, SIGNAL = 2.3
AAAATTTTTTTTTTTTTTTETKNN

SEQ ID NO: 41884 - protein, 37 aa, Homo sapiens
  MAP TO AC009565.7; EXPRESSED IN BRAIN, SIGNAL = 1.3; EXPRESSED IN FETAL LIVER, SIGNAL = 2.2; EXPRESSED IN HELA, SIGNAL =   2; EXPRESSED IN HEART, SIGNAL = 1.9; EST_HUMAN HIT: BE304693.1, EVALUE 5.60e+00
MLWGSTSRHVGWTTWKTETQPTAPTEIQLTASTNCQH

SEQ ID NO: 41885 - protein, 28 aa, Homo sapiens
  MAP TO AC009565.7; EXPRESSED IN BRAIN, SIGNAL = 1.3; EXPRESSED IN FETAL LIVER, SIGNAL = 2.2; EXPRESSED IN HELA, SIGNAL =   2; EXPRESSED IN HEART, SIGNAL = 1.9; EST_HUMAN HIT: AI799009.1, EVALUE 6.00e+00
CCGEAQADMWGGPHGKLRLSLQPPLRSS

SEQ ID NO: 41886 - protein, 68 aa, Homo sapiens
  MAP TO AC004551.1; EXPRESSED IN ADULT LIVER, SIGNAL = 4.5; EXPRESSED IN HEART, SIGNAL = 3.7; EXPRESSED IN LUNG, SIGNAL =   4; EXPRESSED IN BRAIN, SIGNAL = 6.6; EXPRESSED IN PLACENTA, SIGNAL = 3.2; EXPRESSED IN BONE MARROW, SIGNAL = 3.5; EXPRESSED IN FETAL LIVER, SIGNAL =   5; EXPRESSED IN HELA, SIGNAL = 4.4; SWISSPROT HIT: P47709, EVALUE 1.00e-23; EST_HUMAN HIT: BF310620.1, EVALUE 1.00e-22
FLAPSPPRPTLPFPPMQQVERVGDIEERGKILVSLMYSTQQGGLIVGIIRCVHLAAMDANGYSDPFVK

SEQ ID NO: 41887 - protein, 81 aa, Homo sapiens
  MAP TO AC011465.4; EXPRESSED IN ADULT LIVER, SIGNAL = 1.9; EXPRESSED IN BRAIN, SIGNAL =   2; EXPRESSED IN BONE MARROW, SIGNAL = 2.1; EXPRESSED IN FETAL LIVER, SIGNAL =   2; EXPRESSED IN HELA, SIGNAL = 1.9; EXPRESSED IN HEART, SIGNAL = 1.9; EXPRESSED IN LUNG, SIGNAL = 2.9; EXPRESSED IN PLACENTA, SIGNAL = 1.5; SWISSPROT HIT: P46062, EVALUE 1.00e-10; EST_HUMAN HIT: AW501661.1, EVALUE 2.00e-32
MTLRRNGLGQLGFHVKYDGTVAEVEDYGFAWQAGLRQGSRLVEICKVAVVTLTHDQMIDLLRTSVTVKVVIIPPFEDGTPR

SEQ ID NO: 41888 - protein, 25 aa, Homo sapiens
  MAP TO AC010352.4; EXPRESSED IN FETAL LIVER, SIGNAL = 6.2; EXPRESSED IN HEART, SIGNAL = 6.1; EXPRESSED IN BRAIN, SIGNAL = 5.2; EXPRESSED IN PLACENTA, SIGNAL = 3.9; EXPRESSED IN BONE MARROW, SIGNAL = 3.6; EXPRESSED IN LUNG, SIGNAL =   4; EXPRESSED IN ADULT LIVER, SIGNAL = 3.8; EXPRESSED IN HELA, SIGNAL = 6.3; SWISSPROT HIT: P52090, EVALUE 8.70e+00
DLFNDEWDVEVCNDYYIGMYYSLEV

SEQ ID NO: 41889 - protein, 44 aa, Homo sapiens
  MAP TO AL138828.4; EXPRESSED IN HELA, SIGNAL = 2.8; EXPRESSED IN BONE MARROW, SIGNAL = 1.5; EXPRESSED IN FETAL LIVER, SIGNAL = 2.8; EXPRESSED IN HEART, SIGNAL = 2.4; EXPRESSED IN ADULT LIVER, SIGNAL = 1.5; EXPRESSED IN LUNG, SIGNAL = 1.7; EXPRESSED IN BRAIN, SIGNAL = 1.8; EXPRESSED IN PLACENTA, SIGNAL = 2.2; EST_HUMAN HIT: AA481627.1, EVALUE 9.00e-13; SWISSPROT HIT: P70453, EVALUE 3.00e-14
LASFLTPLDIMLGLLAAAAHDVDHPGVNQPFLIKTNHHLANLYQ

SEQ ID NO: 41890 - protein, 26 aa, Homo sapiens
  MAP TO AL138828.4; EXPRESSED IN HELA, SIGNAL = 2.8; EXPRESSED IN BONE MARROW, SIGNAL = 1.5; EXPRESSED IN FETAL LIVER, SIGNAL = 2.8; EXPRESSED IN HEART, SIGNAL = 2.4; EXPRESSED IN ADULT LIVER, SIGNAL = 1.5; EXPRESSED IN LUNG, SIGNAL = 1.7; EXPRESSED IN BRAIN, SIGNAL = 1.8; EXPRESSED IN PLACENTA, SIGNAL = 2.2; EST_HUMAN HIT: AA904859.1, EVALUE 4.10e-01
LPASSRLWTSCLDCWLQQHTMWTTQG

SEQ ID NO: 41891 - protein, 89 aa, Homo sapiens
  MAP TO AL049829.3; EXPRESSED IN BONE MARROW, SIGNAL = 1.7; EXPRESSED IN HEART, SIGNAL =  60; EST_HUMAN HIT: AL042859.1, EVALUE 6.00e-38; SWISSPROT HIT: P13533, EVALUE 6.00e-47
ADKSAYLMGLNSADLLKGLCHPRVKVGNEYVTKGQSVQQVYYSIGALAKAVYEKMFNWMVTRINATLETKQPRQYFIGVLDIAGFEIFD

SEQ ID NO: 41892 - protein, 18 aa, Homo sapiens
  MAP TO AL049776.3; EXPRESSED IN BRAIN, SIGNAL = 1.4; EXPRESSED IN BONE MARROW, SIGNAL = 2.7; EXPRESSED IN LUNG, SIGNAL = 2.3; EXPRESSED IN HEART, SIGNAL = 1.8; EST_HUMAN HIT: AW244134.1, EVALUE 1.40e-01
MAQVKVFGAGYPSLATMT

SEQ ID NO: 41893 - protein, 52 aa, Homo sapiens
  MAP TO AC008395.3; EXPRESSED IN HEART, SIGNAL = 1.8; EXPRESSED IN LUNG, SIGNAL = 3.8; EXPRESSED IN PLACENTA, SIGNAL = 1.8; EXPRESSED IN BRAIN, SIGNAL =   2; EXPRESSED IN ADULT LIVER, SIGNAL = 1.8; EXPRESSED IN BONE MARROW, SIGNAL = 1.9; EST_HUMAN HIT: BE870599.1, EVALUE 3.80e+00
VRAARVKKRRSCPGGSSLLSLASKSSPFCGGTTQAPNAGDKHPDNSQLPGIK

SEQ ID NO: 41894 - protein, 76 aa, Homo sapiens
  MAP TO AL139289.4; EXPRESSED IN HEART, SIGNAL =   2; EXPRESSED IN BRAIN, SIGNAL = 2.4; EXPRESSED IN ADULT LIVER, SIGNAL = 2.1; EXPRESSED IN BONE MARROW, SIGNAL = 4.4; EXPRESSED IN FETAL LIVER, SIGNAL = 3.7; EXPRESSED IN HELA, SIGNAL = 3.6; EXPRESSED IN LUNG, SIGNAL = 2.2; EXPRESSED IN PLACENTA, SIGNAL =   2; SWISSPROT HIT: P53197, EVALUE 3.00e-12; EST_HUMAN HIT: BE747255.1, EVALUE 2.00e-42
GSRSGHIHHHDVRVAEHHVATLSGHSQEVCGLRWAPDGRHLASGGNDNLVNVWPSAPGEGGWVPLQTFTQHQGAVK

SEQ ID NO: 41895 - protein, 50 aa, Homo sapiens
  MAP TO AL138876.3; EXPRESSED IN BRAIN, SIGNAL = 2.7; EXPRESSED IN BONE MARROW, SIGNAL = 2.1; EXPRESSED IN LUNG, SIGNAL = 2.5; EXPRESSED IN PLACENTA, SIGNAL = 2.6; EXPRESSED IN HEART, SIGNAL = 2.7; EXPRESSED IN HELA, SIGNAL = 2.9; EXPRESSED IN FETAL LIVER, SIGNAL = 2.5; EXPRESSED IN ADULT LIVER, SIGNAL = 2.6; SWISSPROT HIT: P07313, EVALUE 5.00e-13; EST_HUMAN HIT: R02824.1, EVALUE 1.00e-11
LSGLSPFLGDNDAETLNNILACRWDLEDEEFQDISEEAKEFISKLLIKEK

SEQ ID NO: 41896 - protein, 40 aa, Homo sapiens
  MAP TO AC004547.1; EXPRESSED IN BRAIN, SIGNAL = 7.6; EXPRESSED IN PLACENTA, SIGNAL =  15; EXPRESSED IN BONE MARROW, SIGNAL =   7; EXPRESSED IN FETAL LIVER, SIGNAL = 8.9; EXPRESSED IN HELA, SIGNAL = 8.7; EXPRESSED IN HEART, SIGNAL = 7.5; EXPRESSED IN ADULT LIVER, SIGNAL = 5.5; EXPRESSED IN LUNG, SIGNAL = 5.9
ERRLLRSLVLPLRRSLSNKPVLPSSRPPCLFFSILTVTWK

SEQ ID NO: 41897 - protein, 18 aa, Homo sapiens
  MAP TO AL109658.5; EXPRESSED IN BRAIN, SIGNAL = 2.2; EXPRESSED IN PLACENTA, SIGNAL = 2.5; EXPRESSED IN FETAL LIVER, SIGNAL =   3; EXPRESSED IN ADULT LIVER, SIGNAL = 2.6; EXPRESSED IN BONE MARROW, SIGNAL = 2.3; EXPRESSED IN HEART, SIGNAL = 2.4; EXPRESSED IN LUNG, SIGNAL =   4; EXPRESSED IN HELA, SIGNAL = 3.4
LPFWDYPSYSCYHIGKKV

SEQ ID NO: 41898 - protein, 55 aa, Homo sapiens
  MAP TO AL136102.10; EXPRESSED IN BRAIN, SIGNAL = 2.3; EXPRESSED IN LUNG, SIGNAL = 2.2; EXPRESSED IN ADULT LIVER, SIGNAL = 4.3; EXPRESSED IN HEART, SIGNAL = 3.4; EST_HUMAN HIT: AA255578.1, EVALUE 1.60e+00; SWISSPROT HIT: P53390, EVALUE 4.60e+00
ALFQTCKSRILPWLISPGQRLREGRGHRHIVHLQIYADDIYLPSTNAPSGWALAI

SEQ ID NO: 41899 - protein, 47 aa, Homo sapiens
  MAP TO AL136169.6; EXPRESSED IN BRAIN, SIGNAL =   4; EXPRESSED IN BONE MARROW, SIGNAL = 1.6; EXPRESSED IN ADULT LIVER, SIGNAL = 1.6; EXPRESSED IN LUNG, SIGNAL = 5.8; EXPRESSED IN PLACENTA, SIGNAL = 3.3; EXPRESSED IN HEART, SIGNAL = 3.5; EXPRESSED IN HELA, SIGNAL = 2.9; EXPRESSED IN FETAL LIVER, SIGNAL = 2.2; SWISSPROT HIT: P08345, EVALUE 6.20e+00; EST_HUMAN HIT: BE882932.1, EVALUE 1.00e-21
SGLRRVAGGTRFPFPRRLTAIPTDSRSSSCRRAPTCSWTRTRSPATP

SEQ ID NO: 41900 - protein, 92 aa, Homo sapiens
  MAP TO AL121595.3; EXPRESSED IN HEART, SIGNAL = 2.5
ELYETLTQGAVGHVPDGNPRRESWTPRLSSEAVSVLWDLLRQSPQPAQALLELLLEEDDGTGLCHWPLQNALVDLIRKALRALQGPDSVPPG

SEQ ID NO: 41901 - protein, 23 aa, Homo sapiens
  MAP TO AL138734.2; EXPRESSED IN PLACENTA, SIGNAL = 6.8; EXPRESSED IN BRAIN, SIGNAL = 4.5; EXPRESSED IN BONE MARROW, SIGNAL =   8; EXPRESSED IN LUNG, SIGNAL =  22; EXPRESSED IN ADULT LIVER, SIGNAL = 7.9; EXPRESSED IN FETAL LIVER, SIGNAL = 7.3; EXPRESSED IN HELA, SIGNAL = 6.6; EXPRESSED IN HEART, SIGNAL = 3.1; EST_HUMAN HIT: AA393362.1, EVALUE 6.00e-07
SYGSTLRRVPGCILCLPNSASWV

SEQ ID NO: 41902 - protein, 73 aa, Homo sapiens
  MAP TO AL133415.12; EXPRESSED IN ADULT LIVER, SIGNAL = 3.9; EXPRESSED IN FETAL LIVER, SIGNAL = 4.7; EXPRESSED IN HEART, SIGNAL = 6.2; EXPRESSED IN BRAIN, SIGNAL = 5.6; EXPRESSED IN PLACENTA, SIGNAL = 7.9; EXPRESSED IN BONE MARROW, SIGNAL = 7.7; EXPRESSED IN LUNG, SIGNAL =  19; EXPRESSED IN HELA, SIGNAL = 5.8; EST_HUMAN HIT: AU119666.1, EVALUE 6.00e-35; SWISSPROT HIT: P08670, EVALUE 6.00e-36
NESLERQMREMEENFAVEAANYQDTIGRLQDEIQNMKEEMARHLREYQDLLNVKMALDIEIATYRKLLEGEES

SEQ ID NO: 41903 - protein, 43 aa, Homo sapiens
  MAP TO AC010251.3; EXPRESSED IN BRAIN, SIGNAL = 3.8; EXPRESSED IN PLACENTA, SIGNAL = 3.6; EXPRESSED IN ADULT LIVER, SIGNAL = 2.9; EXPRESSED IN FETAL LIVER, SIGNAL =  12; EXPRESSED IN HELA, SIGNAL = 4.9; EXPRESSED IN HEART, SIGNAL = 6.2; EXPRESSED IN BONE MARROW, SIGNAL = 2.6; EXPRESSED IN LUNG, SIGNAL = 2.7; EST_HUMAN HIT: BE567816.1, EVALUE 5.00e-20; SWISSPROT HIT: P36959, EVALUE 4.80e+00
YPTKASGHVLSEDGCFCPDSINRGSRSGQIQPWERTLQENHQC

SEQ ID NO: 41904 - protein, 39 aa, Homo sapiens
  MAP TO AC013533.3; EXPRESSED IN BRAIN, SIGNAL = 9.5; EXPRESSED IN PLACENTA, SIGNAL = 8.1; EXPRESSED IN HEART, SIGNAL = 7.1; EXPRESSED IN ADULT LIVER, SIGNAL =   7; EXPRESSED IN BONE MARROW, SIGNAL = 6.9; EXPRESSED IN HELA, SIGNAL =  10; EXPRESSED IN LUNG, SIGNAL = 4.4; EXPRESSED IN FETAL LIVER, SIGNAL = 6.3; EST_HUMAN HIT: BF514170.1, EVALUE 2.00e-17
WKKELNPTSWYERRPNRKKQTARVPGCKLPTAQRLSGST

SEQ ID NO: 41905 - protein, 63 aa, Homo sapiens
  MAP TO AL158848.1; EXPRESSED IN PLACENTA, SIGNAL = 2.8; EXPRESSED IN BONE MARROW, SIGNAL = 3.7; EXPRESSED IN BRAIN, SIGNAL = 3.6; EXPRESSED IN LUNG, SIGNAL = 5.7; EXPRESSED IN HEART, SIGNAL = 3.3; EXPRESSED IN HELA, SIGNAL = 4.5; EXPRESSED IN FETAL LIVER, SIGNAL = 4.4; EXPRESSED IN ADULT LIVER, SIGNAL = 3.7; EST_HUMAN HIT: BF359917.1, EVALUE 3.00e-20; SWISSPROT HIT: Q02998, EVALUE 4.50e+00
EDLTKDGIEALSSRPFRNVSRQTSRQMSLCGTPEKSSYRQLSVSDRSSIRVEEIIPAARVAIQ

SEQ ID NO: 41906 - protein, 60 aa, Homo sapiens
  MAP TO AL096814.26; EXPRESSED IN BRAIN, SIGNAL = 6.5; EXPRESSED IN PLACENTA, SIGNAL = 5.7; EXPRESSED IN HELA, SIGNAL = 8.6; EXPRESSED IN ADULT LIVER, SIGNAL = 5.8; EXPRESSED IN BONE MARROW, SIGNAL = 4.9; EXPRESSED IN FETAL LIVER, SIGNAL = 7.2; EXPRESSED IN LUNG, SIGNAL = 9.7; EXPRESSED IN HEART, SIGNAL = 6.8; EST_HUMAN HIT: AI198885.1, EVALUE 1.00e-28; SWISSPROT HIT: Q11149, EVALUE 2.00e+00
VTPPAVSSPSPWGPEVTGVRVKGRGLPFGSGLGAPQDQVGRRHIKALAGVVSVPAVQVAT

SEQ ID NO: 41907 - protein, 43 aa, Homo sapiens
  MAP TO AL096814.26; EXPRESSED IN BRAIN, SIGNAL = 6.5; EXPRESSED IN PLACENTA, SIGNAL = 5.7; EXPRESSED IN HELA, SIGNAL = 8.6; EXPRESSED IN ADULT LIVER, SIGNAL = 5.8; EXPRESSED IN BONE MARROW, SIGNAL = 4.9; EXPRESSED IN FETAL LIVER, SIGNAL = 7.2; EXPRESSED IN LUNG, SIGNAL = 9.7; EXPRESSED IN HEART, SIGNAL = 6.8; EST_HUMAN HIT: AI198885.1, EVALUE 2.00e-06
PGRGSRTSSSLWQQPMCRSLWTLRGRIRTSSGSISTPPSTPTP

SEQ ID NO: 41908 - protein, 17 aa, Homo sapiens
  MAP TO AC012683.3; EXPRESSED IN BRAIN, SIGNAL =   3; EXPRESSED IN PLACENTA, SIGNAL = 2.5; EXPRESSED IN ADULT LIVER, SIGNAL = 2.3; EXPRESSED IN BONE MARROW, SIGNAL = 2.1; EXPRESSED IN FETAL LIVER, SIGNAL = 3.5; EXPRESSED IN HELA, SIGNAL = 4.2; EXPRESSED IN HEART, SIGNAL = 3.1; EXPRESSED IN LUNG, SIGNAL = 2.8; EST_HUMAN HIT: BF332253.1, EVALUE 1.60e+00
ELFNLVPNMSLLMLLIN

SEQ ID NO: 41909 - protein, 57 aa, Homo sapiens
  MAP TO AC011462.3; EXPRESSED IN BRAIN, SIGNAL =   2; EXPRESSED IN ADULT LIVER, SIGNAL = 1.7; EXPRESSED IN BONE MARROW, SIGNAL = 2.4; EXPRESSED IN FETAL LIVER, SIGNAL = 1.6; EXPRESSED IN HEART, SIGNAL = 2.9; EXPRESSED IN LUNG, SIGNAL = 4.6; EST_HUMAN HIT: BE385109.1, EVALUE 8.00e-30; SWISSPROT HIT: P12694, EVALUE 7.00e-31
IGHHSTSDDSSAYRSVDEVNYWDKQDHPISRLRHYLLSQGWWDEEQEKAWRKQSRRK

SEQ ID NO: 41910 - protein, 41 aa, Homo sapiens
  MAP TO AC011989.3; EXPRESSED IN BRAIN, SIGNAL = 1.3; EXPRESSED IN PLACENTA, SIGNAL = 1.5; EXPRESSED IN HELA, SIGNAL = 2.9; EXPRESSED IN FETAL LIVER, SIGNAL = 3.3; EXPRESSED IN HEART, SIGNAL = 2.6; EXPRESSED IN ADULT LIVER, SIGNAL = 2.2
LQQEASSINWTFLMSIEKNLKNHIPNILILQLLALRSISYV

SEQ ID NO: 41911 - protein, 45 aa, Homo sapiens
  MAP TO AC023009.3; EXPRESSED IN BRAIN, SIGNAL = 2.2; EXPRESSED IN PLACENTA, SIGNAL = 3.3; EXPRESSED IN BONE MARROW, SIGNAL = 2.1; EXPRESSED IN HEART, SIGNAL = 3.2; EXPRESSED IN ADULT LIVER, SIGNAL = 4.2; EXPRESSED IN HELA, SIGNAL = 2.1; EXPRESSED IN LUNG, SIGNAL = 3.8; EXPRESSED IN FETAL LIVER, SIGNAL = 2.1; SWISSPROT HIT: P00488, EVALUE 8.00e-21; EST_HUMAN HIT: AV733491.1, EVALUE 3.00e-15
VRGTQVVGSDMTVTVEFTNPLKETLRNVWVHLDGPGVTRPMKKMF

SEQ ID NO: 41912 - protein, 60 aa, Homo sapiens
  MAP TO AC018836.2; EXPRESSED IN ADULT LIVER, SIGNAL = 7.4; EXPRESSED IN HELA, SIGNAL =  11; EXPRESSED IN HEART, SIGNAL =  11; EXPRESSED IN PLACENTA, SIGNAL = 6.6; EXPRESSED IN BONE MARROW, SIGNAL =  10; EXPRESSED IN FETAL LIVER, SIGNAL =  11; EXPRESSED IN LUNG, SIGNAL =  29; EXPRESSED IN BRAIN, SIGNAL = 6.7; EST_HUMAN HIT: AV742383.1, EVALUE 3.00e-30; SWISSPROT HIT: P02433, EVALUE 3.00e-31
RNWRKPRGIDNRVRRRFKGQILMPNIGYGSNKKTKHMLPSGFRKFLVHNVKELEVLLMCN

SEQ ID NO: 41913 - protein, 39 aa, Homo sapiens
  MAP TO AC018836.2; EXPRESSED IN ADULT LIVER, SIGNAL = 7.4; EXPRESSED IN HELA, SIGNAL =  11; EXPRESSED IN HEART, SIGNAL =  11; EXPRESSED IN PLACENTA, SIGNAL = 6.6; EXPRESSED IN BONE MARROW, SIGNAL =  10; EXPRESSED IN FETAL LIVER, SIGNAL =  11; EXPRESSED IN LUNG, SIGNAL =  29; EXPRESSED IN BRAIN, SIGNAL = 6.7; EST_HUMAN HIT: AW029087.1, EVALUE 3.00e-11
KSSHSAQTLTHLCIISFSVTGGNPEALTTGFVEDSRARS

SEQ ID NO: 41914 - protein, 83 aa, Homo sapiens
  MAP TO AC010311.5; EXPRESSED IN PLACENTA, SIGNAL = 9.7; EXPRESSED IN BRAIN, SIGNAL = 9.6; EXPRESSED IN HEART, SIGNAL =  19; EXPRESSED IN ADULT LIVER, SIGNAL = 9.9; EXPRESSED IN BONE MARROW, SIGNAL = 9.2; EXPRESSED IN HELA, SIGNAL =  22; EXPRESSED IN FETAL LIVER, SIGNAL =  21; EXPRESSED IN LUNG, SIGNAL = 8.2; EST_HUMAN HIT: AL134339.1, EVALUE 9.00e-13; SWISSPROT HIT: P06213, EVALUE 2.00e-46
PYQNVTEFDGQDACGSNSWTVVDIDPPLRSNDPKSQNHPGWLMRGLKPWTQYAIFVKTLVTFSDERRTYGAKSDIIYVQTDAT

SEQ ID NO: 41915 - protein, 44 aa, Homo sapiens [sequence omitted]

SEQ ID NO: 41916 - protein, 42 aa, Homo sapiens
  MAP TO AC010361.3; EXPRESSED IN BRAIN, SIGNAL = 2.2; EXPRESSED IN PLACENTA, SIGNAL = 1.9; EXPRESSED IN HEART, SIGNAL = 4.2; EXPRESSED IN BONE MARROW, SIGNAL = 1.8; EXPRESSED IN ADULT LIVER, SIGNAL =   2; EXPRESSED IN HELA, SIGNAL = 4.1; EXPRESSED IN FETAL LIVER, SIGNAL = 3.7; SWISSPROT HIT: P11369, EVALUE 2.00e-09; EST_HUMAN HIT: AA244041.1, EVALUE 5.00e-14
WYIYNMEYYVAIKRNKIMSFAGTWVDLEAVILSKLMQEQKNK

SEQ ID NO: 41917 - protein, 64 aa, Homo sapiens
  MAP TO AC024127.1; EXPRESSED IN BONE MARROW, SIGNAL = 4.8; EXPRESSED IN LUNG, SIGNAL = 4.2; EXPRESSED IN PLACENTA, SIGNAL = 4.8; EXPRESSED IN BRAIN, SIGNAL = 7.1; EXPRESSED IN ADULT LIVER, SIGNAL = 5.4; EXPRESSED IN FETAL LIVER, SIGNAL = 6.9; EXPRESSED IN HELA, SIGNAL = 6.8; EXPRESSED IN HEART, SIGNAL = 5.2; SWISSPROT HIT: P20930, EVALUE 1.50e+00; EST_HUMAN HIT: BF032755.1, EVALUE 1.00e-34
ADPVHYRHWASISQHSPRTSAKEQRVAKNSNPGHIGHTCSDCSDHSKHKQPHEHSSKSFQAHAQ

SEQ ID NO: 41918 - protein, 63 aa, Homo sapiens
  MAP TO AC024127.1; EXPRESSED IN BONE MARROW, SIGNAL = 4.8; EXPRESSED IN LUNG, SIGNAL = 4.2; EXPRESSED IN PLACENTA, SIGNAL = 4.8; EXPRESSED IN BRAIN, SIGNAL = 7.1; EXPRESSED IN ADULT LIVER, SIGNAL = 5.4; EXPRESSED IN FETAL LIVER, SIGNAL = 6.9; EXPRESSED IN HELA, SIGNAL = 6.8; EXPRESSED IN HEART, SIGNAL = 5.2; EST_HUMAN HIT: BF032755.1, EVALUE 8.00e-08
RTPSTTATGHPSLSTALAQVPKSSALPRTATLATLATRAQTVATTANTSSPMSTRPSPSKHMP

SEQ ID NO: 41919 - protein, 61 aa, Homo sapiens
  MAP TO AL133233.2; EXPRESSED IN ADULT LIVER, SIGNAL = 2.5; EXPRESSED IN HEART, SIGNAL = 2.8; EXPRESSED IN BRAIN, SIGNAL = 2.3; EXPRESSED IN PLACENTA, SIGNAL = 2.6; EXPRESSED IN BONE MARROW, SIGNAL = 1.8; EXPRESSED IN FETAL LIVER, SIGNAL = 2.5; EXPRESSED IN HELA, SIGNAL = 2.7; EST_HUMAN HIT: AA346973.1, EVALUE 2.00e-10
SGRECCHHWGWGSCSFWQKKVHRVYKLSVPSCKRILPHVPIPTCRVPFFSNQCPHFNNRHL

SEQ ID NO: 41920 - protein, 105 aa, Homo sapiens
  MAP TO AC002060.3; EXPRESSED IN BRAIN, SIGNAL = 1.4; EXPRESSED IN BONE MARROW, SIGNAL = 1.5e+02; EXPRESSED IN HEART, SIGNAL = 1.8; EXPRESSED IN LUNG, SIGNAL =  86; EXPRESSED IN ADULT LIVER, SIGNAL = 3.7; EXPRESSED IN FETAL LIVER, SIGNAL = 1.9; SWISSPROT HIT: P01842, EVALUE 8.00e-57; EST_HUMAN HIT: AW804521.1, EVALUE 3.00e-56
QPKAAPSVTLFPPSSEELQANKATLVCLISDFYPGAVTVAWKADSSPVKAGVETTTPSKQSNNKYAASSYLSLTPEQWKSHKSYSCQVTHEGSTVEKTVAPTECS

SEQ ID NO: 41921 - protein, 19 aa, Homo sapiens
  MAP TO AC002060.3; EXPRESSED IN BRAIN, SIGNAL = 1.4; EXPRESSED IN BONE MARROW, SIGNAL = 1.5e+02; EXPRESSED IN HEART, SIGNAL = 1.8; EXPRESSED IN LUNG, SIGNAL =  86; EXPRESSED IN ADULT LIVER, SIGNAL = 3.7; EXPRESSED IN FETAL LIVER, SIGNAL = 1.9; EST_HUMAN HIT: BF089664.1, EVALUE 1.00e-05
CSRPPLRSFKPTRPHWCVS

SEQ ID NO: 41922 - protein, 32 aa, Homo sapiens
  MAP TO AC000134.14; EXPRESSED IN BRAIN, SIGNAL = 1.6; EXPRESSED IN PLACENTA, SIGNAL = 1.6; EXPRESSED IN HELA, SIGNAL = 1.8; EXPRESSED IN BONE MARROW, SIGNAL = 3.3; EXPRESSED IN LUNG, SIGNAL = 3.6; EXPRESSED IN ADULT LIVER, SIGNAL = 1.8; EXPRESSED IN FETAL LIVER, SIGNAL =   2; EXPRESSED IN HEART, SIGNAL = 2.1; EST_HUMAN HIT: BF340308.1, EVALUE 5.00e-10
MKQLFSILEELAMVTSLRPPVQANPDLLSLLT

SEQ ID NO: 41923 - protein, 73 aa, Homo sapiens
  MAP TO AL133475.14; EXPRESSED IN PLACENTA, SIGNAL =  14; EXPRESSED IN BONE MARROW, SIGNAL =  50; EXPRESSED IN HELA, SIGNAL =  41; EXPRESSED IN LUNG, SIGNAL =  25; EXPRESSED IN ADULT LIVER, SIGNAL =  27; EXPRESSED IN BRAIN, SIGNAL =  53; EXPRESSED IN HEART, SIGNAL =  49; EXPRESSED IN FETAL LIVER, SIGNAL =  39; SWISSPROT HIT: P04406, EVALUE 2.00e-32; EST_HUMAN HIT: BE893057.1, EVALUE 2.00e-31
EPDPSKIKWGDAGTEYVMESTGIFTTMENAGAHLQWGAKRVIISAPSADPPMFTMGVNHEKYDNSLKIISNAT

SEQ ID NO: 41924 - protein, 44 aa, Homo sapiens
  MAP TO AC022211.2; EXPRESSED IN ADULT LIVER, SIGNAL = 1.5; EXPRESSED IN HELA, SIGNAL = 2.6; EXPRESSED IN HEART, SIGNAL = 2.3; EXPRESSED IN BRAIN, SIGNAL = 3.5; EXPRESSED IN PLACENTA, SIGNAL = 2.8; EXPRESSED IN BONE MARROW, SIGNAL = 3.4; EXPRESSED IN LUNG, SIGNAL = 3.9; EXPRESSED IN FETAL LIVER, SIGNAL = 3.4; SWISSPROT HIT: P55855, EVALUE 3.00e-20; EST_HUMAN HIT: BF574192.1, EVALUE 4.00e-19
EGVKTENNDHINLKVAGQDGSVVQFKIKRHTPLSKLMKAYCERQ

SEQ ID NO: 41925 - protein, 54 aa, Homo sapiens
  MAP TO AL159191.1; EXPRESSED IN BRAIN, SIGNAL = 2.5; EXPRESSED IN PLACENTA, SIGNAL = 1.8; EXPRESSED IN FETAL LIVER, SIGNAL = 1.9; EXPRESSED IN ADULT LIVER, SIGNAL = 1.9; EXPRESSED IN HELA, SIGNAL = 1.8; EXPRESSED IN HEART, SIGNAL = 1.8; SWISSPROT HIT: P21425, EVALUE 1.00e-07; EST_HUMAN HIT: AA305163.1, EVALUE 5.00e-23
KINWDDLAAKKVPAPFKPVIRDELDVSNFAEEFTEMDPTYSPAALPQSSEKLFQ

SEQ ID NO: 41926 - protein, 68 aa, Homo sapiens
  MAP TO AL132773.14; EXPRESSED IN FETAL LIVER, SIGNAL = 2.3; EXPRESSED IN HEART, SIGNAL = 2.3; EXPRESSED IN BRAIN, SIGNAL = 1.9; EXPRESSED IN PLACENTA, SIGNAL = 2.4; EXPRESSED IN ADULT LIVER, SIGNAL = 2.5; EXPRESSED IN BONE MARROW, SIGNAL = 2.3; EXPRESSED IN HELA, SIGNAL = 2.4; EXPRESSED IN LUNG, SIGNAL = 2.2; SWISSPROT HIT: P39112, EVALUE 7.70e-02; EST_HUMAN HIT: AJ271378.1, EVALUE 4.90e-01
EKSTQNAAQRDKEIESTIDTKNMEDRMRRSNSYIFPESQNKGEAIFRNDSFPELMENMNIQIPEAKHI

SEQ ID NO: 41927 - protein, 54 aa, Homo sapiens
  MAP TO AC008372.6; EXPRESSED IN ADULT LIVER, SIGNAL = 3.4; EXPRESSED IN FETAL LIVER, SIGNAL = 3.5; EXPRESSED IN HELA, SIGNAL = 3.2; EXPRESSED IN PLACENTA, SIGNAL = 4.5; EXPRESSED IN BONE MARROW, SIGNAL = 3.1; EXPRESSED IN HEART, SIGNAL = 2.8; EXPRESSED IN LUNG, SIGNAL = 3.6; EXPRESSED IN BRAIN, SIGNAL = 3.8; EST_HUMAN HIT: AI860487.1, EVALUE 3.70e+00; SWISSPROT HIT: O04212, EVALUE 1.20e-02
MWLVDEAKKNLPLELDFLNEGRNAEKVSQMLRHFDFLKVGGTMQCRVWWSGGRV

SEQ ID NO: 41928 - protein, 37 aa, Homo sapiens
  MAP TO AC002400.1; EXPRESSED IN PLACENTA, SIGNAL = 2.3; EXPRESSED IN HELA, SIGNAL = 3.4; EXPRESSED IN BRAIN, SIGNAL = 2.9; EXPRESSED IN LUNG, SIGNAL = 5.4; EXPRESSED IN FETAL LIVER, SIGNAL =   3; EXPRESSED IN BONE MARROW, SIGNAL =   3; EXPRESSED IN ADULT LIVER, SIGNAL = 2.8; EXPRESSED IN HEART, SIGNAL =  20; EST_HUMAN HIT: AW248374.1, EVALUE 1.00e-13; SWISSPROT HIT: O32741, EVALUE 8.40e+00
QDLVSPVYSYLWTRPAVGRAQLDAISEKVDVIAKRVL

SEQ ID NO: 41929 - protein, 37 aa, Homo sapiens
  MAP TO AL121595.3; EXPRESSED IN BRAIN, SIGNAL = 2.4; EXPRESSED IN ADULT LIVER, SIGNAL = 2.4; EXPRESSED IN HELA, SIGNAL = 2.5; EXPRESSED IN PLACENTA, SIGNAL = 2.9; EXPRESSED IN LUNG, SIGNAL =   2; EXPRESSED IN HEART, SIGNAL = 2.2; EXPRESSED IN FETAL LIVER, SIGNAL = 2.4; EXPRESSED IN BONE MARROW, SIGNAL = 1.8; SWISSPROT HIT: Q9V676, EVALUE 8.40e+00; EST_HUMAN HIT: AV726296.1, EVALUE 7.40e+00
DPCGLLSKAIACESSWWQSLRCRFQIGEKGRDKDKKR

SEQ ID NO: 41930 - protein, 18 aa, Homo sapiens
  MAP TO AC008753.5; EXPRESSED IN FETAL LIVER, SIGNAL = 1.9; EXPRESSED IN HELA, SIGNAL = 1.8; EXPRESSED IN BRAIN, SIGNAL = 1.8; EXPRESSED IN PLACENTA, SIGNAL = 1.5; EXPRESSED IN HEART, SIGNAL = 2.8; EST_HUMAN HIT: AU139562.1, EVALUE 3.70e-02
LPKQTHSHQRNVNSLQNR

SEQ ID NO: 41931 - protein, 33 aa, Homo sapiens
  MAP TO AC008481.4; EXPRESSED IN PLACENTA, SIGNAL = 3.9; EXPRESSED IN HELA, SIGNAL = 3.8; EXPRESSED IN BRAIN, SIGNAL = 3.5; EXPRESSED IN LUNG, SIGNAL =   9; EXPRESSED IN HEART, SIGNAL = 2.5; EXPRESSED IN FETAL LIVER, SIGNAL = 3.8; EXPRESSED IN BONE MARROW, SIGNAL = 6.1; EXPRESSED IN ADULT LIVER, SIGNAL = 4.4; SWISSPROT HIT: P14314, EVALUE 1.00e-16; EST_HUMAN HIT: AA314843.1, EVALUE 1.00e-15
TWGSWIGPDHDKFSAMKYEQGTGCWQGPNRSTT

SEQ ID NO: 41932 - protein, 103 aa, Homo sapiens; identical to SEQ ID NO: 34208
  MAP TO AL049829.3; EXPRESSED IN BONE MARROW, SIGNAL = 1.7; EXPRESSED IN HEART, SIGNAL =  69; SWISSPROT HIT: P13533, EVALUE 3.00e-56; EST_HUMAN HIT: F00635.1, EVALUE 3.00e-28

SEQ ID NO: 41933 - protein, 39 aa, Homo sapiens
  MAP TO AL133244.1; EXPRESSED IN BRAIN, SIGNAL = 1.8; EXPRESSED IN PLACENTA, SIGNAL = 2.4; EXPRESSED IN FETAL LIVER, SIGNAL =   5; EXPRESSED IN HELA, SIGNAL = 5.3; EXPRESSED IN ADULT LIVER, SIGNAL = 1.5; EXPRESSED IN HEART, SIGNAL = 4.7; EST_HUMAN HIT: AL119158.1, EVALUE 3.00e-12
NGFDQNANSDRDNKVQAEVVSDRDEELVGSWSKGDSCYT

SEQ ID NO: 41934 - protein, 84 aa, Homo sapiens
  MAP TO AL133244.1; EXPRESSED IN BRAIN, SIGNAL = 1.8; EXPRESSED IN PLACENTA, SIGNAL = 2.4; EXPRESSED IN FETAL LIVER, SIGNAL =   5; EXPRESSED IN HELA, SIGNAL = 5.3; EXPRESSED IN ADULT LIVER, SIGNAL = 1.5; EXPRESSED IN HEART, SIGNAL = 4.7; SWISSPROT HIT: Q10175, EVALUE 1.20e-01; EST_HUMAN HIT: AI183641.1, EVALUE 3.00e-26
DLWNFELERDDLGYLVEETSKWQTVQEEAEYKSLENLQPDDEVEKKNQFSGEKLKPAAEICVSNKEPKTVGLITKTVNHQVNHQ

SEQ ID NO: 41935 - protein, 42 aa, Homo sapiens
  MAP TO AL133286.5; EXPRESSED IN FETAL LIVER, SIGNAL = 6.2; EXPRESSED IN HEART, SIGNAL = 4.8; EXPRESSED IN PLACENTA, SIGNAL = 4.1; EXPRESSED IN BRAIN, SIGNAL = 3.3; EXPRESSED IN BONE MARROW, SIGNAL = 4.2; EXPRESSED IN ADULT LIVER, SIGNAL = 3.9; EXPRESSED IN HELA, SIGNAL = 4.8; EXPRESSED IN LUNG, SIGNAL = 4.9; EST_HUMAN HIT: AV696705.1, EVALUE 1.10e+00
AVPWTVGRVASGRQTCRVLAAFSLRQVAWSPGASVISTMKLR

SEQ ID NO: 41936 - protein, 46 aa, Homo sapiens
  MAP TO AC008929.3; EXPRESSED IN ADULT LIVER, SIGNAL =   3; EXPRESSED IN FETAL LIVER, SIGNAL = 3.5; EXPRESSED IN HEART, SIGNAL = 3.4; EXPRESSED IN BRAIN, SIGNAL = 2.7; EXPRESSED IN PLACENTA, SIGNAL = 3.5; EXPRESSED IN HELA, SIGNAL = 3.8; EXPRESSED IN BONE MARROW, SIGNAL = 3.3; EXPRESSED IN LUNG, SIGNAL = 4.3; SWISSPROT HIT: P49021, EVALUE 2.80e+00; EST_HUMAN HIT: AI023930.1, EVALUE 9.00e-06
RETKTIISGKWYLQQSNTKTQLHTQDRTLHVLLMVASVLHVQGNFS

SEQ ID NO: 41937 - protein, 92 aa, Homo sapiens
  MAP TO Z97197.2; EXPRESSED IN BRAIN, SIGNAL = 1.6; EXPRESSED IN PLACENTA, SIGNAL = 2.4; EXPRESSED IN BONE MARROW, SIGNAL =   6; EXPRESSED IN HEART, SIGNAL = 3.5; EXPRESSED IN LUNG, SIGNAL = 5.7; EXPRESSED IN FETAL LIVER, SIGNAL = 3.5; EXPRESSED IN HELA, SIGNAL = 2.2; EST_HUMAN HIT: AU124608.1, EVALUE 1.00e-33
GVLEYLSAFDEETTEVCSLDTPSRPLALPLVEEEEAVSEPEPEGLPEACDDLELADDNLKEGTICTESSQQEPITKSGFTRLSSSPCYYFYQ

SEQ ID NO: 41938 - protein, 22 aa, Homo sapiens
  MAP TO Z97197.2; EXPRESSED IN BRAIN, SIGNAL = 1.6; EXPRESSED IN PLACENTA, SIGNAL = 2.4; EXPRESSED IN BONE MARROW, SIGNAL =   6; EXPRESSED IN HEART, SIGNAL = 3.5; EXPRESSED IN LUNG, SIGNAL = 5.7; EXPRESSED IN FETAL LIVER, SIGNAL = 3.5; EXPRESSED IN HELA, SIGNAL = 2.2; EST_HUMAN HIT: BE898862.1, EVALUE 2.00e-06
KRRKQCLNQSLRGCQRPVMTWS

SEQ ID NO: 41939 - protein, 40 aa, Homo sapiens
  MAP TO AC007955.4; EXPRESSED IN BRAIN, SIGNAL = 2.7; EXPRESSED IN ADULT LIVER, SIGNAL = 3.5; EXPRESSED IN HELA, SIGNAL = 2.5; EXPRESSED IN PLACENTA, SIGNAL = 2.3; EXPRESSED IN LUNG, SIGNAL = 2.8; EXPRESSED IN HEART, SIGNAL = 2.7; EXPRESSED IN FETAL LIVER, SIGNAL = 2.9; EXPRESSED IN BONE MARROW, SIGNAL = 4.7; EST_HUMAN HIT: AW409831.1, EVALUE 2.00e-11; SWISSPROT HIT: Q16595, EVALUE 2.00e-12
GPKNYDGTGKNCMYSHDSVSLHELLATELTEVLKTKLDLS

SEQ ID NO: 41940 - protein, 27 aa, Homo sapiens
  MAP TO AC002039.1; EXPRESSED IN BRAIN, SIGNAL = 8.3; EXPRESSED IN PLACENTA, SIGNAL = 6.4; EXPRESSED IN HELA, SIGNAL = 6.8; EXPRESSED IN BONE MARROW, SIGNAL = 2.4; EXPRESSED IN FETAL LIVER, SIGNAL = 4.1; EXPRESSED IN LUNG, SIGNAL =  19; EXPRESSED IN HEART, SIGNAL = 5.7; EST_HUMAN HIT: BE621856.1, EVALUE 2.10e+00
ALGQAASDNSGPEDAKRQAKKQKTRRT

SEQ ID NO: 41941 - protein, 52 aa, Homo sapiens
  MAP TO AL157996.1; EXPRESSED IN FETAL LIVER, SIGNAL = 5.8; EXPRESSED IN LUNG, SIGNAL = 5.4; EXPRESSED IN BRAIN, SIGNAL = 4.5; EXPRESSED IN ADULT LIVER, SIGNAL = 4.5; EXPRESSED IN BONE MARROW, SIGNAL = 5.3; EXPRESSED IN HELA, SIGNAL = 5.8; EXPRESSED IN HEART, SIGNAL = 6.6; EXPRESSED IN PLACENTA, SIGNAL = 4.8; EST_HUMAN HIT: BF314525.1, EVALUE 2.00e-08; SWISSPROT HIT: P28615, EVALUE 2.10e+00
VTGTPSKGFDEKAYLSAKQLKAGEDPYRQHAFNQLESDKLSPDRPIRDTRHY

SEQ ID NO: 41942 - protein, 30 aa, Homo sapiens
  MAP TO AC009565.7; EXPRESSED IN BRAIN, SIGNAL =   2; EXPRESSED IN PLACENTA, SIGNAL = 2.2; EXPRESSED IN BONE MARROW, SIGNAL = 1.8; EXPRESSED IN FETAL LIVER, SIGNAL = 2.3; EXPRESSED IN ADULT LIVER, SIGNAL = 2.1; EXPRESSED IN HELA, SIGNAL = 2.5; EXPRESSED IN HEART, SIGNAL = 2.2; EST_HUMAN HIT: AI937039.1, EVALUE 5.90e+00
PKTPIPKTILFHAWKEGMLHREEESAQTGL

SEQ ID NO: 41943 - protein, 30 aa, Homo sapiens
  MAP TO AC009565.7; EXPRESSED IN BRAIN, SIGNAL =   2; EXPRESSED IN PLACENTA, SIGNAL = 2.2; EXPRESSED IN BONE MARROW, SIGNAL = 1.8; EXPRESSED IN FETAL LIVER, SIGNAL = 2.3; EXPRESSED IN ADULT LIVER, SIGNAL = 2.1; EXPRESSED IN HELA, SIGNAL = 2.5; EXPRESSED IN HEART, SIGNAL = 2.2; SWISSPROT HIT: Q9Y5B6, EVALUE 6.00e-03; EST_HUMAN HIT: AW573258.1, EVALUE 6.00e-02
VPRLPFQRQSCSMPGRKECCTERKNLHRQA

SEQ ID NO: 41944 - protein, 48 aa, Homo sapiens
  MAP TO AC007338.2; EXPRESSED IN ADULT LIVER, SIGNAL =   3; EXPRESSED IN FETAL LIVER, SIGNAL = 2.8; EXPRESSED IN HEART, SIGNAL = 2.8; EXPRESSED IN PLACENTA, SIGNAL = 2.4; EXPRESSED IN BONE MARROW, SIGNAL = 2.6; EXPRESSED IN LUNG, SIGNAL = 2.5; EXPRESSED IN BRAIN, SIGNAL = 3.6; EXPRESSED IN HELA, SIGNAL = 2.7; SWISSPROT HIT: Q03363, EVALUE 8.00e-11; EST_HUMAN HIT: AA364711.1, EVALUE 1.00e-22
VFQRDGNDLHMTYKIGLVEALCGFQFTFKHLDGRQIVVKYPPGKVIEP

SEQ ID NO: 41945 - protein, 124 aa, Homo sapiens
  MAP TO AL157817.3; EXPRESSED IN BRAIN, SIGNAL = 8.9; EXPRESSED IN PLACENTA, SIGNAL = 7.7; EXPRESSED IN BONE MARROW, SIGNAL = 7.8; EXPRESSED IN ADULT LIVER, SIGNAL = 8.5; EXPRESSED IN HELA, SIGNAL =  11; EXPRESSED IN LUNG, SIGNAL = 7.7; EXPRESSED IN FETAL LIVER, SIGNAL = 8.3; EXPRESSED IN HEART, SIGNAL = 8.7; SWISSPROT HIT: P20668, EVALUE 5.40e+00; EST_HUMAN HIT: AI498066.1, EVALUE 8.00e-15
SDLSVVSAYSAPSRFCSTVETPLPSERCSSHWAAHKDSREGPLPTVSRVTTEASWASLPFFTKRSSSSSATARAAPPAPSTSTLTDSSPQLPCDTPKVKQTDGDMPPPPGSAGPGDNDMEEFYI

SEQ ID NO: 41946 - protein, 34 aa, Homo sapiens
  MAP TO AL157817.3; EXPRESSED IN BRAIN, SIGNAL = 8.9; EXPRESSED IN PLACENTA, SIGNAL = 7.7; EXPRESSED IN BONE MARROW, SIGNAL = 7.8; EXPRESSED IN ADULT LIVER, SIGNAL = 8.5; EXPRESSED IN HELA, SIGNAL =  11; EXPRESSED IN LUNG, SIGNAL = 7.7; EXPRESSED IN FETAL LIVER, SIGNAL = 8.3; EXPRESSED IN HEART, SIGNAL = 8.7; SWISSPROT HIT: P08519, EVALUE 8.50e+00; EST_HUMAN HIT: AI498066.1, EVALUE 3.00e-14
SHAIPPKSSRLMETCHHPQGRLAPGITTWRNSTS

SEQ ID NO: 41947 - protein, 53 aa, Homo sapiens
  MAP TO AC002477.1; EXPRESSED IN BRAIN, SIGNAL = 2.8; EXPRESSED IN HELA, SIGNAL = 2.9; EXPRESSED IN BONE MARROW, SIGNAL =   2; EXPRESSED IN LUNG, SIGNAL = 3.7; EXPRESSED IN PLACENTA, SIGNAL = 2.8; EXPRESSED IN FETAL LIVER, SIGNAL = 2.7; EXPRESSED IN ADULT LIVER, SIGNAL = 2.2; EXPRESSED IN HEART, SIGNAL = 2.6; EST_HUMAN HIT: AA136210.1, EVALUE 4.00e-23; SWISSPROT HIT: Q15233, EVALUE 2.40e-01
HRRMEAVRLRKENQIYSADEKRALASFNQEERRKRENKILASFREMVYRKTKG

SEQ ID NO: 41948 - protein, 18 aa, Homo sapiens
  MAP TO AC002477.1; EXPRESSED IN BRAIN, SIGNAL = 2.8; EXPRESSED IN HELA, SIGNAL = 2.9; EXPRESSED IN BONE MARROW, SIGNAL =   2; EXPRESSED IN LUNG, SIGNAL = 3.7; EXPRESSED IN PLACENTA, SIGNAL = 2.8; EXPRESSED IN FETAL LIVER, SIGNAL = 2.7; EXPRESSED IN ADULT LIVER, SIGNAL = 2.2; EXPRESSED IN HEART, SIGNAL = 2.6; EST_HUMAN HIT: AA906517.1, EVALUE 7.00e-04
ASPNGGCATAKREPDLQC

SEQ ID NO: 41949 - protein, 31 aa, Homo sapiens
  MAP TO AL117692.1; EXPRESSED IN BRAIN, SIGNAL = 3.6; EXPRESSED IN FETAL LIVER, SIGNAL = 7.7; EXPRESSED IN HELA, SIGNAL = 9.1; EXPRESSED IN BONE MARROW, SIGNAL = 2.8; EXPRESSED IN HEART, SIGNAL = 8.1; EXPRESSED IN PLACENTA, SIGNAL = 3.4; EXPRESSED IN LUNG, SIGNAL = 1.9; EXPRESSED IN ADULT LIVER, SIGNAL = 3.4; EST_HUMAN HIT: BE385006.1, EVALUE 1.00e-08
SSKLSHIFLSASELSKRYQPLPITQFQSCFH

SEQ ID NO: 41950 - protein, 53 aa, Homo sapiens
  MAP TO AC002401.1; EXPRESSED IN BRAIN, SIGNAL = 2.2; EXPRESSED IN PLACENTA, SIGNAL = 1.6; EXPRESSED IN FETAL LIVER, SIGNAL = 1.9; EXPRESSED IN ADULT LIVER, SIGNAL = 1.7; EXPRESSED IN BONE MARROW, SIGNAL = 1.8; EXPRESSED IN HELA, SIGNAL = 2.3; EXPRESSED IN LUNG, SIGNAL = 2.1; EXPRESSED IN HEART, SIGNAL = 1.8; EST_HUMAN HIT: AL134452.1, EVALUE 8.00e-07
ESVEGSGRSGGSPFLPFSWFTDSGKGSASSGSTTSPTCSPKHEGFSPKKSASQ

SEQ ID NO: 41951 - protein, 25 aa, Homo sapiens
  MAP TO AC002401.1; EXPRESSED IN BRAIN, SIGNAL = 2.2; EXPRESSED IN PLACENTA, SIGNAL = 1.6; EXPRESSED IN FETAL LIVER, SIGNAL = 1.9; EXPRESSED IN ADULT LIVER, SIGNAL = 1.7; EXPRESSED IN BONE MARROW, SIGNAL = 1.8; EXPRESSED IN HELA, SIGNAL = 2.3; EXPRESSED IN LUNG, SIGNAL = 2.1; EXPRESSED IN HEART, SIGNAL = 1.8; EST_HUMAN HIT: AI300907.1, EVALUE 4.00e-07
RQVRGLPVPAFFLVHGQRQGLSILG

SEQ ID NO: 41952 - protein, 49 aa, Homo sapiens
  MAP TO AC000059.1; EXPRESSED IN PLACENTA, SIGNAL = 1.8; EXPRESSED IN BRAIN, SIGNAL =   2; EXPRESSED IN ADULT LIVER, SIGNAL =   2; EXPRESSED IN BONE MARROW, SIGNAL = 1.7; EXPRESSED IN FETAL LIVER, SIGNAL = 2.2; EXPRESSED IN HELA, SIGNAL = 2.3; EXPRESSED IN HEART, SIGNAL = 2.2; SWISSPROT HIT: O51757, EVALUE 6.20e+00
VVPNINKIHFDDLNKIHFDDLKESHSCQSPTPPHHLLPTTTSTSALSNH

SEQ ID NO: 41953 - protein, 38 aa, Homo sapiens
  MAP TO AC023344.2; EXPRESSED IN PLACENTA, SIGNAL = 2.6; EXPRESSED IN HEART, SIGNAL = 3.2; EXPRESSED IN ADULT LIVER, SIGNAL = 3.2; EXPRESSED IN BRAIN, SIGNAL = 3.6; EXPRESSED IN LUNG, SIGNAL = 3.7; EXPRESSED IN HELA, SIGNAL = 3.9; EXPRESSED IN FETAL LIVER, SIGNAL = 3.8; EXPRESSED IN BONE MARROW, SIGNAL = 2.8
VLYVPDPEYVSSVESSPSLSPVSPLSPTSSEAEFDKTT

SEQ ID NO: 41954 - protein, 18 aa, Homo sapiens
  MAP TO AC023344.2; EXPRESSED IN PLACENTA, SIGNAL = 2.6; EXPRESSED IN HEART, SIGNAL = 3.2; EXPRESSED IN ADULT LIVER, SIGNAL = 3.2; EXPRESSED IN BRAIN, SIGNAL = 3.6; EXPRESSED IN LUNG, SIGNAL = 3.7; EXPRESSED IN HELA, SIGNAL = 3.9; EXPRESSED IN FETAL LIVER, SIGNAL = 3.8; EXPRESSED IN BONE MARROW, SIGNAL = 2.8; EST_HUMAN HIT: AW504109.1, EVALUE 6.00e-03
FCMFLILNMSPVLRALHL

SEQ ID NO: 41955 - protein, 72 aa, Homo sapiens
  MAP TO AC017004.2; EXPRESSED IN BONE MARROW, SIGNAL = 3.2; EXPRESSED IN LUNG, SIGNAL = 2.7; EXPRESSED IN BRAIN, SIGNAL = 4.5; EXPRESSED IN PLACENTA, SIGNAL = 3.2; EXPRESSED IN ADULT LIVER, SIGNAL = 1.6; EXPRESSED IN FETAL LIVER, SIGNAL =   4; EXPRESSED IN HELA, SIGNAL = 6.2; EXPRESSED IN HEART, SIGNAL = 3.1; SWISSPROT HIT: O75593, EVALUE 5.50e-01; EST_HUMAN HIT: N66951.1, EVALUE 4.00e-19
PSDLSPPPQAAPCQAELGPNSSSASAPPPYNPFITSPPHTWSGLQFRSVTSPPPPAQQFTLKKVPGAKGIVK

SEQ ID NO: 41956 - protein, 30 aa, Homo sapiens
  MAP TO AC011442.2; EXPRESSED IN BRAIN, SIGNAL = 5.7; EXPRESSED IN HELA, SIGNAL = 6.6; EXPRESSED IN PLACENTA, SIGNAL = 4.8; EXPRESSED IN LUNG, SIGNAL = 7.2; EXPRESSED IN HEART, SIGNAL = 5.4; EXPRESSED IN FETAL LIVER, SIGNAL = 6.1; EXPRESSED IN BONE MARROW, SIGNAL = 4.6; EXPRESSED IN ADULT LIVER, SIGNAL = 5.4; EST_HUMAN HIT: AI251815.1, EVALUE 1.20e+00
CGAKTKYIHIIPQRASGCGHRWGIGRSHRP

SEQ ID NO: 41957 - protein, 18 aa, Homo sapiens
  MAP TO AL132801.1; EXPRESSED IN ADULT LIVER, SIGNAL = 2.9; EXPRESSED IN BONE MARROW, SIGNAL = 8.6; EXPRESSED IN LUNG, SIGNAL = 8.5; EXPRESSED IN PLACENTA, SIGNAL = 7.6; EXPRESSED IN FETAL LIVER, SIGNAL =  16; EXPRESSED IN HEART, SIGNAL =  14; EXPRESSED IN BRAIN, SIGNAL = 7.1; EXPRESSED IN HELA, SIGNAL =  19; EST_HUMAN HIT: AI147944.1, EVALUE 3.20e-01
RAPPGETSLTTILSSSCR

SEQ ID NO: 41958 - protein, 113 aa, Homo sapiens
  MAP TO AL121761.5; EXPRESSED IN PLACENTA, SIGNAL = 2.1; EXPRESSED IN FETAL LIVER, SIGNAL = 2.1; EXPRESSED IN HEART, SIGNAL = 1.8; EXPRESSED IN BRAIN, SIGNAL = 2.1; EXPRESSED IN LUNG, SIGNAL = 2.5; EXPRESSED IN HELA, SIGNAL = 1.8; EXPRESSED IN BONE MARROW, SIGNAL = 2.1; EXPRESSED IN ADULT LIVER, SIGNAL = 1.7; EST_HUMAN HIT: AA847698.1, EVALUE 8.00e-05
RKCEILFSLRSCFRSVTTKLCNSWLCPQPLSLFHLLLPPSQQEFHVFTYNLYVKKTKTCFSSALTTITNTEAFCDQMCGVFPHTPSSGHQLGILQLNSHRVRAESHKTAPTPP

SEQ ID NO: 41959 - protein, 103 aa, Homo sapiens
  MAP TO AC002045.1; EXPRESSED IN ADULT LIVER, SIGNAL =  66; EXPRESSED IN PLACENTA, SIGNAL =  51; EXPRESSED IN BONE MARROW, SIGNAL =  90; EXPRESSED IN FETAL LIVER, SIGNAL =  56; EXPRESSED IN HELA, SIGNAL =  19; EXPRESSED IN LUNG, SIGNAL = 1.2e+02; EXPRESSED IN HEART, SIGNAL =  25; EXPRESSED IN BRAIN, SIGNAL = 1.4e+02; EST_HUMAN HIT: BF508898.1, EVALUE 3.00e-28
GHQPPPPTQQHSIIDNSLSLKTPPECLLTPLPPSALPSADDNLKTPAECLLYPLPPSADDNLKTPPECLLTPLPPSAPPSADDNLKTPPKCVCSLPFHPQRMI

SEQ ID NO: 41960 - protein, 38 aa, Homo sapiens
  MAP TO AC011464.2; EXPRESSED IN BRAIN, SIGNAL = 3.1; EXPRESSED IN PLACENTA, SIGNAL = 3.9; EXPRESSED IN BONE MARROW, SIGNAL = 2.6; EXPRESSED IN HELA, SIGNAL = 4.3; EXPRESSED IN ADULT LIVER, SIGNAL = 3.3; EXPRESSED IN LUNG, SIGNAL = 2.2; EXPRESSED IN FETAL LIVER, SIGNAL =   4; EXPRESSED IN HEART, SIGNAL = 3.8; SWISSPROT HIT: P24592, EVALUE 8.40e+00; EST_HUMAN HIT: BF514896.1, EVALUE 3.20e+00
MSSGQGRCLPARVMSSGQGRCLPARVRVFRQGTCLPAR

SEQ ID NO: 41961 - protein, 38 aa, Homo sapiens
  MAP TO AC011464.2; EXPRESSED IN BRAIN, SIGNAL = 3.1; EXPRESSED IN PLACENTA, SIGNAL = 3.9; EXPRESSED IN BONE MARROW, SIGNAL = 2.6; EXPRESSED IN HELA, SIGNAL = 4.3; EXPRESSED IN ADULT LIVER, SIGNAL = 3.3; EXPRESSED IN LUNG, SIGNAL = 2.2; EXPRESSED IN FETAL LIVER, SIGNAL =   4; EXPRESSED IN HEART, SIGNAL = 3.8; EST_HUMAN HIT: AI906305.1, EVALUE 7.30e+00
PGRKTCTLAEDTYPGRKTSTLAGRHYPGRKTPTLAGRH

SEQ ID NO: 41962 - protein, 54 aa, Homo sapiens
  MAP TO AC006530.4; EXPRESSED IN BRAIN, SIGNAL = 3.5; EXPRESSED IN PLACENTA, SIGNAL = 3.6; EXPRESSED IN BONE MARROW, SIGNAL = 3.6; EXPRESSED IN HELA, SIGNAL = 3.6; EXPRESSED IN ADULT LIVER, SIGNAL = 3.5; EXPRESSED IN FETAL LIVER, SIGNAL = 3.8; EXPRESSED IN HEART, SIGNAL = 3.3; EXPRESSED IN LUNG, SIGNAL = 3.1; SWISSPROT HIT: Q10364, EVALUE 8.00e-06; EST_HUMAN HIT: AA463334.1, EVALUE 4.00e-07
ADGAGRGCGRATWSVREEQVKQWAAEMLVALEALHEQGVLCRDLHPGNLLLDQA

SEQ ID NO: 41963 - protein, 31 aa, Homo sapiens
  MAP TO AC002994.2; EXPRESSED IN HEART, SIGNAL = 3.2; EXPRESSED IN BRAIN, SIGNAL = 3.4; EXPRESSED IN HELA, SIGNAL =   3; EXPRESSED IN PLACENTA, SIGNAL = 2.4; EXPRESSED IN LUNG, SIGNAL =   4; EXPRESSED IN FETAL LIVER, SIGNAL = 2.9; EXPRESSED IN BONE MARROW, SIGNAL = 2.2; EXPRESSED IN ADULT LIVER, SIGNAL = 2.5
FQKFDYDVFMDLWFILFDGRCFLNMNVYVFC

SEQ ID NO: 41964 - protein, 32 aa, Homo sapiens
  MAP TO AC002994.2; EXPRESSED IN HEART, SIGNAL = 3.2; EXPRESSED IN BRAIN, SIGNAL = 3.4; EXPRESSED IN HELA, SIGNAL =   3; EXPRESSED IN PLACENTA, SIGNAL = 2.4; EXPRESSED IN LUNG, SIGNAL =   4; EXPRESSED IN FETAL LIVER, SIGNAL = 2.9; EXPRESSED IN BONE MARROW, SIGNAL = 2.2; EXPRESSED IN ADULT LIVER, SIGNAL = 2.5
LAKDIYIHIQETATVKQDKPKIHEDIIVKLLK

SEQ ID NO: 41965 - protein, 50 aa, Homo sapiens
  MAP TO AC020714.2; EXPRESSED IN BRAIN, SIGNAL = 2.8; EXPRESSED IN PLACENTA, SIGNAL =   2; EXPRESSED IN HELA, SIGNAL = 2.9; EXPRESSED IN ADULT LIVER, SIGNAL = 2.4; EXPRESSED IN BONE MARROW, SIGNAL = 2.4; EXPRESSED IN HEART, SIGNAL = 2.9; EXPRESSED IN FETAL LIVER, SIGNAL = 2.7; EXPRESSED IN LUNG, SIGNAL = 3.3; EST_HUMAN HIT: AU124958.1, EVALUE 2.60e-01
ILKCISQLELAQLIGTGVKPRYISGTVRGREGSLTGTKDQAPDEFVGLGL

SEQ ID NO: 41966 - protein, 59 aa, Homo sapiens
  MAP TO AC019205.2; EXPRESSED IN BRAIN, SIGNAL = 2.5; EXPRESSED IN HELA, SIGNAL = 2.1; EXPRESSED IN BONE MARROW, SIGNAL = 2.5; EXPRESSED IN HEART, SIGNAL = 2.4; EXPRESSED IN PLACENTA, SIGNAL = 2.2; EXPRESSED IN LUNG, SIGNAL = 2.9; EXPRESSED IN FETAL LIVER, SIGNAL =   2; EXPRESSED IN ADULT LIVER, SIGNAL = 1.9; EST_HUMAN HIT: AI365263.1, EVALUE 4.00e-07
PDGSRIPYIEQVSKAMLELKALESSDLTEVVVYGSYLYKLRTKWMLQSMAEWHRQRQER

SEQ ID NO: 41967 - protein, 104 aa, Homo sapiens
  MAP TO AL121985.13; EXPRESSED IN ADULT LIVER, SIGNAL = 3.1; EXPRESSED IN HEART, SIGNAL = 3.1; EXPRESSED IN LUNG, SIGNAL = 3.4; EXPRESSED IN BRAIN, SIGNAL = 2.9; EXPRESSED IN PLACENTA, SIGNAL = 2.8; EXPRESSED IN BONE MARROW, SIGNAL = 2.8; EXPRESSED IN FETAL LIVER, SIGNAL =   3; EXPRESSED IN HELA, SIGNAL = 3.9; SWISSPROT HIT: Q13291, EVALUE 4.00e-50; EST_HUMAN HIT: AI904924.1, EVALUE 2.00e-33
IIRDSLLLPPTGGRMMNCPKILRQLGSKVLLPLTYERINKSMNKSIHIVVTMAKSLENSVENKIVSLDPSEAGPPRYLGDRYKFYLENLTLGIRESRKEDEGWY

SEQ ID NO: 41968 - protein, 37 aa, Homo sapiens
  MAP TO AC009242.2; EXPRESSED IN BRAIN, SIGNAL = 3.3; EXPRESSED IN PLACENTA, SIGNAL = 2.4; EXPRESSED IN HELA, SIGNAL = 2.3; EXPRESSED IN ADULT LIVER, SIGNAL = 1.9; EXPRESSED IN BONE MARROW, SIGNAL =   3; EXPRESSED IN FETAL LIVER, SIGNAL = 2.5; EXPRESSED IN LUNG, SIGNAL = 5.6; EXPRESSED IN HEART, SIGNAL = 1.9
VMVLTRGRKPAALIPAAVFLQEQQAPADTGRVTREVP

SEQ ID NO: 41969 - protein, 178 aa, Homo sapiens
  MAP TO AC012558.6; EXPRESSED IN FETAL LIVER, SIGNAL = 1.7; EXPRESSED IN HEART, SIGNAL =   2; EXPRESSED IN PLACENTA, SIGNAL = 1.8; EXPRESSED IN BRAIN, SIGNAL = 1.8; EXPRESSED IN HELA, SIGNAL = 1.9; EXPRESSED IN ADULT LIVER, SIGNAL = 1.9; EST_HUMAN HIT: BF684261.1, EVALUE 7.80e-01; SWISSPROT HIT: P41272, EVALUE 2.50e+00
FKLILGVPLSNKNRGPAFPSLSHSWSVFYYCPPHTCQHLDFLLACLLQNRVTYGLSSGFMDTLPQSPPPVLSLLPPAYHCFCSHVLHCNQHVCTVELLATLNFDVTGMDITPPSQAFFLSSPSGSRENIFPFSMELPGSENMSPRSSITSACSHQFVCTVGQWPKCNFQSYCGPRATV

SEQ ID NO: 41970 - protein, 33 aa, Homo sapiens
  MAP TO AC012558.6; EXPRESSED IN FETAL LIVER, SIGNAL = 1.7; EXPRESSED IN HEART, SIGNAL =   2; EXPRESSED IN PLACENTA, SIGNAL = 1.8; EXPRESSED IN BRAIN, SIGNAL = 1.8; EXPRESSED IN HELA, SIGNAL = 1.9; EXPRESSED IN ADULT LIVER, SIGNAL = 1.9
CCSWVTCSQNQGAPWKMGRCSLWSLKENSGRKL

SEQ ID NO: 41971 - protein, 69 aa, Homo sapiens
  MAP TO AL121694.3; EXPRESSED IN BRAIN, SIGNAL =  14; EXPRESSED IN HELA, SIGNAL = 1.9; EXPRESSED IN BONE MARROW, SIGNAL = 1.5; EXPRESSED IN LUNG, SIGNAL = 2.1; EXPRESSED IN PLACENTA, SIGNAL = 1.6; EXPRESSED IN HEART, SIGNAL = 1.8; EXPRESSED IN FETAL LIVER, SIGNAL = 2.2; EXPRESSED IN ADULT LIVER, SIGNAL = 1.8; EST_HUMAN HIT: R13375.1, EVALUE 3.00e-11; SWISSPROT HIT: Q24546, EVALUE 5.80e+00
DPVQRGERRGLPGPGRTLSHHQFPHLQVCFTSSAENRRRPPFQVSASAEEPSPTDQGLLPSPVFQLTDA

SEQ ID NO: 41972 - protein, 26 aa, Homo sapiens
  MAP TO AC020596.2; EXPRESSED IN BRAIN, SIGNAL = 3.3; EXPRESSED IN PLACENTA, SIGNAL = 2.6; EXPRESSED IN FETAL LIVER, SIGNAL = 3.6; EXPRESSED IN HELA, SIGNAL =   4; EXPRESSED IN ADULT LIVER, SIGNAL = 2.9; EXPRESSED IN BONE MARROW, SIGNAL = 2.8; EXPRESSED IN HEART, SIGNAL = 3.4; SWISSPROT HIT: P15882, EVALUE 1.00e-08; EST_HUMAN HIT: AW897636.1, EVALUE 1.00e-07
LTSLVRRATLKENEQIPKYEKIHNFK

SEQ ID NO: 41973 - protein, 91 aa, Homo sapiens
  MAP TO AL135747.2; EXPRESSED IN PLACENTA, SIGNAL = 3.1; EXPRESSED IN BRAIN, SIGNAL = 3.4; EXPRESSED IN FETAL LIVER, SIGNAL = 4.3; EXPRESSED IN HELA, SIGNAL = 5.4; EXPRESSED IN BONE MARROW, SIGNAL = 2.4; EXPRESSED IN LUNG, SIGNAL = 2.5; EXPRESSED IN HEART, SIGNAL = 2.9; EXPRESSED IN ADULT LIVER, SIGNAL = 2.9; SWISSPROT HIT: P24054, EVALUE 1.20e+00; EST_HUMAN HIT: BF330102.1, EVALUE 2.00e-22
TRADGSCKILIGVLCGGGVCPWPRFSEPDPSHTLEERVVHWYFSQLDSNSSNDINKREMKPFKRYVKKKAKPKKCARRFTDYCDLNKDKVI

SEQ ID NO: 41974 - protein, 36 aa, Homo sapiens
  MAP TO AC016910.2; EXPRESSED IN BRAIN, SIGNAL =   2; EXPRESSED IN PLACENTA, SIGNAL = 2.4; EXPRESSED IN BONE MARROW, SIGNAL = 1.8; EXPRESSED IN ADULT LIVER, SIGNAL = 1.8; EXPRESSED IN HELA, SIGNAL = 2.5; EXPRESSED IN LUNG, SIGNAL = 4.1; EXPRESSED IN FETAL LIVER, SIGNAL = 2.2; EXPRESSED IN HEART, SIGNAL = 2.2; EST_HUMAN HIT: AU119344.1, EVALUE 1.00e-14
EHDKDPESFFKVLMHLKDLGLNFHVSVLGETFTDVP

SEQ ID NO: 41975 - protein, 35 aa, Homo sapiens
  MAP TO AC023344.2; EXPRESSED IN PLACENTA, SIGNAL = 8.1; EXPRESSED IN HELA, SIGNAL = 8.7; EXPRESSED IN FETAL LIVER, SIGNAL = 3.6; EXPRESSED IN HEART, SIGNAL = 4.1; EXPRESSED IN BONE MARROW, SIGNAL = 3.7; EXPRESSED IN LUNG, SIGNAL =  75; EST_HUMAN HIT: BE902673.1, EVALUE 5.00e-07
HRHPLEWPTGDLHYGLSRRCSRRLRNSMMQIWSRS

SEQ ID NO: 41976 - protein, 68 aa, Homo sapiens
  MAP TO AL136527.7; EXPRESSED IN BRAIN, SIGNAL = 4.1; EXPRESSED IN PLACENTA, SIGNAL = 2.6; EXPRESSED IN HELA, SIGNAL = 2.6; EXPRESSED IN ADULT LIVER, SIGNAL =  12; EXPRESSED IN FETAL LIVER, SIGNAL = 3.8; EXPRESSED IN LUNG, SIGNAL = 3.1; EXPRESSED IN BONE MARROW, SIGNAL = 2.1; EXPRESSED IN HEART, SIGNAL = 5.2; SWISSPROT HIT: P07954, EVALUE 1.00e-29; EST_HUMAN HIT: BE293788.1, EVALUE 1.00e-28
NCVVGIQANTERINKLMNESQMLVTALNPRIAYDKAAKIAKTAHKNGSTLKETVIELGYLTPEQFDEQ

SEQ ID NO: 41977 - protein, 63 aa, Homo sapiens
  MAP TO AC019055.2; EXPRESSED IN ADULT LIVER, SIGNAL = 2.3; EXPRESSED IN FETAL LIVER, SIGNAL = 2.5; EXPRESSED IN HEART, SIGNAL = 2.2; EXPRESSED IN LUNG, SIGNAL = 1.8; EXPRESSED IN BRAIN, SIGNAL = 2.1; EXPRESSED IN PLACENTA, SIGNAL = 2.1; EXPRESSED IN BONE MARROW, SIGNAL = 2.6; EXPRESSED IN HELA, SIGNAL = 2.6
CNDFNTAAADMLLALITVTTTTAATSTTTTTIITTTTTTTTTATTTSTTLSTTATKYHCNNNY

SEQ ID NO: 41978 - protein, 30 aa, Homo sapiens
  MAP TO AC005201.1; EXPRESSED IN BRAIN, SIGNAL = 4.1; EXPRESSED IN PLACENTA, SIGNAL = 3.6; EXPRESSED IN BONE MARROW, SIGNAL =   3; EXPRESSED IN HELA, SIGNAL = 3.4; EXPRESSED IN HEART, SIGNAL = 2.9; EXPRESSED IN ADULT LIVER, SIGNAL =   3; EXPRESSED IN LUNG, SIGNAL = 2.1; EXPRESSED IN FETAL LIVER, SIGNAL = 3.4; EST_HUMAN HIT: AU121685.1, EVALUE 8.00e-08
KLKHPKLTSDCCAGSENFKAVDLSLLGSME

SEQ ID NO: 41979 - protein, 51 aa, Homo sapiens
  MAP TO AL109658.5; EXPRESSED IN BONE MARROW, SIGNAL = 2.8; EXPRESSED IN FETAL LIVER, SIGNAL = 4.2; EXPRESSED IN LUNG, SIGNAL =   6; EXPRESSED IN PLACENTA, SIGNAL = 3.1; EXPRESSED IN ADULT LIVER, SIGNAL = 3.3; EXPRESSED IN HEART, SIGNAL = 3.5; EXPRESSED IN BRAIN, SIGNAL =   4; EXPRESSED IN HELA, SIGNAL =   4; EST_HUMAN HIT: AV651727.1, EVALUE 4.00e-15
QSKPFPYTGQFGHYFTCCEVYWDLPGKSHLISKKKNKDSGRKFLPSLLNAV

SEQ ID NO: 41980 - protein, 118 aa, Homo sapiens
  MAP TO AL049829.3; EXPRESSED IN HEART, SIGNAL = 1.5e+02; EXPRESSED IN BONE MARROW, SIGNAL = 7.6; EXPRESSED IN LUNG, SIGNAL = 5.2; EXPRESSED IN PLACENTA, SIGNAL = 4.9; EXPRESSED IN BRAIN, SIGNAL = 7.3; EXPRESSED IN HELA, SIGNAL = 6.9; EXPRESSED IN ADULT LIVER, SIGNAL = 5.6; EXPRESSED IN FETAL LIVER, SIGNAL =   7; EST_HUMAN HIT: C05089.1, EVALUE 3.00e-36; SWISSPROT HIT: P13533, EVALUE 1.00e-38
GRKEILGGQKAPAPGPCSLPPLSCTQAAMMAEELKKEQDTSAHLERMKKNMEQTIKDLQHRLDEAEQIALKGGKKQLQKLEARVRELEGELEAEQKRNAESVKGMRKSERRIKELTYQ

SEQ ID NO: 41981 - protein, 65 aa, Homo sapiens
  MAP TO AL117258.2; EXPRESSED IN BRAIN, SIGNAL = 1.7; EXPRESSED IN BONE MARROW, SIGNAL = 2.1; EXPRESSED IN FETAL LIVER, SIGNAL = 2.4; EXPRESSED IN HELA, SIGNAL = 2.9; EXPRESSED IN LUNG, SIGNAL = 3.8; EXPRESSED IN PLACENTA, SIGNAL = 2.3; EXPRESSED IN HEART, SIGNAL =   2; EXPRESSED IN ADULT LIVER, SIGNAL =   2; SWISSPROT HIT: P77247, EVALUE 6.50e-01; EST_HUMAN HIT: BF027733.1, EVALUE 1.00e-34
WFANWSGPQRERFLEDLVAKAVPEKLQPLLDSLEQLSVSGADRPPSIFECQLHLWDQWFRGWAEQ

SEQ ID NO: 41982 - protein, 56 aa, Homo sapiens
  MAP TO AL158148.1; EXPRESSED IN BRAIN, SIGNAL = 2.9; EXPRESSED IN BONE MARROW, SIGNAL = 2.5; EXPRESSED IN HEART, SIGNAL = 3.1; EXPRESSED IN LUNG, SIGNAL = 3.1; EXPRESSED IN PLACENTA, SIGNAL = 2.8; EXPRESSED IN HELA, SIGNAL =   3; EXPRESSED IN FETAL LIVER, SIGNAL =   3; EXPRESSED IN ADULT LIVER, SIGNAL = 3.5; SWISSPROT HIT: O14972, EVALUE 2.10e+00; EST_HUMAN HIT: BF127111.1, EVALUE 5.50e-01
WVTRGFCVPSPITFVSPKTLKVTKARFIIPIFLTSKLRLSKVGALPRVSDRVRISL

SEQ ID NO: 41983 - protein, 53 aa, Homo sapiens
  MAP TO AC011375.3; EXPRESSED IN PLACENTA, SIGNAL = 1.4; EXPRESSED IN BRAIN, SIGNAL = 1.7; EXPRESSED IN ADULT LIVER, SIGNAL = 1.6; EXPRESSED IN HELA, SIGNAL = 2.7; EXPRESSED IN LUNG, SIGNAL = 2.6; EXPRESSED IN FETAL LIVER, SIGNAL = 2.4; EXPRESSED IN HEART, SIGNAL = 2.2; SWISSPROT HIT: P33203, EVALUE 4.10e-01; EST_HUMAN HIT: W94973.1, EVALUE 2.00e-26
CVVWTGDERVFFYNPTTRLSMWDRPDDLIGRADVDKIIQEPPHKKGMEELKKL

SEQ ID NO: 41984 - protein, 27 aa, Homo sapiens
  MAP TO AC011375.3; EXPRESSED IN PLACENTA, SIGNAL = 1.4; EXPRESSED IN BRAIN, SIGNAL = 1.7; EXPRESSED IN ADULT LIVER, SIGNAL = 1.6; EXPRESSED IN HELA, SIGNAL = 2.7; EXPRESSED IN LUNG, SIGNAL = 2.6; EXPRESSED IN FETAL LIVER, SIGNAL = 2.4; EXPRESSED IN HEART, SIGNAL = 2.2; EST_HUMAN HIT: AW935666.1, EVALUE 5.00e-08
VSFGLVMSGSSFIIPPLVFLCGTDLMI

SEQ ID NO: 41985 - protein, 27 aa, Homo sapiens
  MAP TO AC008381.5; EXPRESSED IN BRAIN, SIGNAL = 6.9; EXPRESSED IN PLACENTA, SIGNAL =   5; EXPRESSED IN HELA, SIGNAL = 7.2; EXPRESSED IN ADULT LIVER, SIGNAL = 6.4; EXPRESSED IN FETAL LIVER, SIGNAL = 7.1; EXPRESSED IN HEART, SIGNAL = 6.3; EXPRESSED IN BONE MARROW, SIGNAL = 4.9; EXPRESSED IN LUNG, SIGNAL =   7
VGQIWAGIWLCSHQLSLRVSVYTTLSL

SEQ ID NO: 41986 - protein, 23 aa, Homo sapiens
  MAP TO AC018801.2; EXPRESSED IN BRAIN, SIGNAL = 8.1; EXPRESSED IN PLACENTA, SIGNAL = 5.8; EXPRESSED IN HELA, SIGNAL = 7.7; EXPRESSED IN ADULT LIVER, SIGNAL = 7.5; EXPRESSED IN FETAL LIVER, SIGNAL =   8; EXPRESSED IN HEART, SIGNAL = 6.7; EXPRESSED IN BONE MARROW, SIGNAL = 5.9; EXPRESSED IN LUNG, SIGNAL = 3.7; EST_HUMAN HIT: AI767386.1, EVALUE 2.00e-06
WMFNTIPFISLIQTFSVQFCSRS

SEQ ID NO: 41987 - protein, 41 aa, Homo sapiens
  MAP TO AC023344.2; EXPRESSED IN ADULT LIVER, SIGNAL = 1.9; EXPRESSED IN FETAL LIVER, SIGNAL = 2.7; EXPRESSED IN HEART, SIGNAL = 2.3; EXPRESSED IN BRAIN, SIGNAL = 2.4; EXPRESSED IN PLACENTA, SIGNAL = 1.6; EXPRESSED IN BONE MARROW, SIGNAL = 1.5; EXPRESSED IN HELA, SIGNAL = 1.9; EST_HUMAN HIT: AW872641.1, EVALUE 4.00e-09
YIVVVVVMVLGVIVIGECIQLEGALHFLKWRWEKALDTWES

SEQ ID NO: 41988 - protein, 136 aa, Homo sapiens
  MAP TO AC022845.2; EXPRESSED IN FETAL LIVER, SIGNAL = 2.2; EXPRESSED IN HEART, SIGNAL = 2.2; EXPRESSED IN BRAIN, SIGNAL = 2.3; EXPRESSED IN ADULT LIVER, SIGNAL = 2.4; EXPRESSED IN BONE MARROW, SIGNAL = 1.9; EXPRESSED IN HELA, SIGNAL = 2.2; EXPRESSED IN LUNG, SIGNAL =   3; EXPRESSED IN PLACENTA, SIGNAL = 2.1; SWISSPROT HIT: P51587, EVALUE 1.20e-01; EST_HUMAN HIT: AA746375.1, EVALUE 1.00e-49
ELSESKEKSTVADTSIQKLEKSKQTLPGLSNGSQIKAPIPKARKMIYKSTDLNKDDNQSFPRQRTDSLKARGAPRGILKRNSSSSSTDSETLRYNHNFEPKSKIVSPGLTIHERISEKEHSLEDNSSPNSLEPLKH

SEQ ID NO: 41989 - protein, 19 aa, Homo sapiens
  MAP TO AC022845.2; EXPRESSED IN FETAL LIVER, SIGNAL = 2.2; EXPRESSED IN HEART, SIGNAL = 2.2; EXPRESSED IN BRAIN, SIGNAL = 2.3; EXPRESSED IN ADULT LIVER, SIGNAL = 2.4; EXPRESSED IN BONE MARROW, SIGNAL = 1.9; EXPRESSED IN HELA, SIGNAL = 2.2; EXPRESSED IN LUNG, SIGNAL =   3; EXPRESSED IN PLACENTA, SIGNAL = 2.1
MNCQSQKKSQLSQILQSKS

SEQ ID NO: 41990 - protein, 66 aa, Homo sapiens
  MAP TO AC023890.3; EXPRESSED IN ADULT LIVER, SIGNAL = 4.2; EXPRESSED IN BONE MARROW, SIGNAL = 3.2; EXPRESSED IN FETAL LIVER, SIGNAL = 3.9; EXPRESSED IN BRAIN, SIGNAL = 3.8; EXPRESSED IN PLACENTA, SIGNAL = 3.6; EXPRESSED IN HELA, SIGNAL = 4.3; EXPRESSED IN HEART, SIGNAL = 3.5; EXPRESSED IN LUNG, SIGNAL = 5.2; SWISSPROT HIT: Q03601, EVALUE 1.50e+00; EST_HUMAN HIT: BE734357.1, EVALUE 5.00e-33
YHQNGVIRNQYVPYPHAPGSQRSNQKSLYTSMARPPLPRQQSTSSDRVSQTPESLDFLKVPDQGAA

SEQ ID NO: 41991 - protein, 67 aa, Homo sapiens
  MAP TO AC023890.3; EXPRESSED IN ADULT LIVER, SIGNAL = 4.2; EXPRESSED IN BONE MARROW, SIGNAL = 3.2; EXPRESSED IN FETAL LIVER, SIGNAL = 3.9; EXPRESSED IN BRAIN, SIGNAL = 3.8; EXPRESSED IN PLACENTA, SIGNAL = 3.6; EXPRESSED IN HELA, SIGNAL = 4.3; EXPRESSED IN HEART, SIGNAL = 3.5; EXPRESSED IN LUNG, SIGNAL = 5.2; SWISSPROT HIT: Q15878, EVALUE 1.80e+00; EST_HUMAN HIT: BE251428.1, EVALUE 6.00e-35
DTIRTESSETSMCHIPMLLEARGPIRKACTPPWPARPCLGSSLPVQTECHRRQRAWISSRSRTRELQ

SEQ ID NO: 41992 - protein, 27 aa, Homo sapiens
  MAP TO AC002124.1; EXPRESSED IN BRAIN, SIGNAL = 1.5; EXPRESSED IN HELA, SIGNAL = 2.4; EXPRESSED IN HEART, SIGNAL = 2.1; EXPRESSED IN ADULT LIVER, SIGNAL = 1.4; EXPRESSED IN FETAL LIVER, SIGNAL =   2; EST_HUMAN HIT: AU133383.1, EVALUE 2.00e-08
SRRNQWTVMKMLRSRKWNLGSRLLLCN

SEQ ID NO: 41993 - protein, 67 aa, Homo sapiens
  MAP TO AC002124.1; EXPRESSED IN BRAIN, SIGNAL = 1.5; EXPRESSED IN HELA, SIGNAL = 2.4; EXPRESSED IN HEART, SIGNAL = 2.1; EXPRESSED IN ADULT LIVER, SIGNAL = 1.4; EXPRESSED IN FETAL LIVER, SIGNAL =   2; EST_HUMAN HIT: AU133383.1, EVALUE 8.00e-31; SWISSPROT HIT: Q02638, EVALUE 2.60e-02
ELQGDQAMQEDRAPSSGNSTRSDSSACVDDTLGQVGAVKVKEEPVDSDEDAQIQEMESGEQAAFMQQ

SEQ ID NO: 41994 - protein, 26 aa, Homo sapiens
  MAP TO AC017067.2; EXPRESSED IN BRAIN, SIGNAL = 3.5; EXPRESSED IN BONE MARROW, SIGNAL = 3.6; EXPRESSED IN FETAL LIVER, SIGNAL = 3.5; EXPRESSED IN LUNG, SIGNAL = 8.7; EXPRESSED IN ADULT LIVER, SIGNAL = 2.6; EXPRESSED IN HEART, SIGNAL = 4.9; EXPRESSED IN PLACENTA, SIGNAL = 5.7; EXPRESSED IN HELA, SIGNAL = 4.6; EST_HUMAN HIT: AU132529.1, EVALUE 7.00e-09
WTSLPNSLHISRIQGQRLMKHWRGVS

SEQ ID NO: 41995 - protein, 19 aa, Homo sapiens
  MAP TO AC018497.4; EXPRESSED IN ADULT LIVER, SIGNAL = 3.2; EXPRESSED IN BONE MARROW, SIGNAL = 2.9; EXPRESSED IN LUNG, SIGNAL = 2.6; EXPRESSED IN PLACENTA, SIGNAL = 3.1; EXPRESSED IN FETAL LIVER, SIGNAL = 3.7; EXPRESSED IN HELA, SIGNAL = 3.9; EXPRESSED IN HEART, SIGNAL = 3.5; EXPRESSED IN BRAIN, SIGNAL = 3.1; EST_HUMAN HIT: AW591062.1, EVALUE 2.90e-02
LPVGQDVEVEDSDINDPDS

SEQ ID NO: 41996 - protein, 29 aa, Homo sapiens
  MAP TO AC011497.3; EXPRESSED IN FETAL LIVER, SIGNAL = 4.1; EXPRESSED IN HEART, SIGNAL = 2.7; EXPRESSED IN LUNG, SIGNAL = 8.1; EXPRESSED IN PLACENTA, SIGNAL = 2.2; EXPRESSED IN BRAIN, SIGNAL = 1.8; EXPRESSED IN HELA, SIGNAL = 1.7; EST_HUMAN HIT: W29011.1, EVALUE 8.00e-10
FCFVIIRTVVLVRVNGEVHKTNFHIGSQT

SEQ ID NO: 41997 - protein, 33 aa, Homo sapiens
  MAP TO AC023392.2; EXPRESSED IN ADULT LIVER, SIGNAL = 2.3; EXPRESSED IN FETAL LIVER, SIGNAL =   5; EXPRESSED IN LUNG, SIGNAL = 1.8; EXPRESSED IN BRAIN, SIGNAL =   2; EXPRESSED IN PLACENTA, SIGNAL = 2.9; EXPRESSED IN HEART, SIGNAL = 5.3; EXPRESSED IN BONE MARROW, SIGNAL = 3.1; EXPRESSED IN HELA, SIGNAL = 5.3; EST_HUMAN HIT: AA001415.1, EVALUE 9.00e-09
VHRRLELQFGNLHLDFRRCIETPGFPGRSLMQG

SEQ ID NO: 41998 - protein, 136 aa, Homo sapiens
  MAP TO AC013359.4; EXPRESSED IN BRAIN, SIGNAL = 3.7; EXPRESSED IN HELA, SIGNAL =   2; EXPRESSED IN LUNG, SIGNAL =  12; EXPRESSED IN HEART, SIGNAL = 2.4; EXPRESSED IN PLACENTA, SIGNAL = 2.7; SWISSPROT HIT: O65607, EVALUE 4.30e-02; EST_HUMAN HIT: M78448.1, EVALUE 1.00e-45
ERRERELHEAYKNARSQEEAEGILQQYIERFTISEAVLERLEMPKILERSHSTEPNLSSFLNDPNPMKYLRQQSLPPPKFTATVETTIARASVLDTSMSAGSGSPSKTVTPKAVPMLTPKPYSQPKNSQDVLKTFK

SEQ ID NO: 41999 - protein, 60 aa, Homo sapiens
  MAP TO AC013359.4; EXPRESSED IN BRAIN, SIGNAL = 3.7; EXPRESSED IN HELA, SIGNAL =   2; EXPRESSED IN LUNG, SIGNAL =  12; EXPRESSED IN HEART, SIGNAL = 2.4; EXPRESSED IN PLACENTA, SIGNAL = 2.7; SWISSPROT HIT: P13671, EVALUE 3.50e+00; EST_HUMAN HIT: M78448.1, EVALUE 1.00e-29
SGERESCMKHIRTLGPRRRQRGSFNSTLRGSPSVRLFSNAWRCQKFWKEAIQQSQIYPPS

SEQ ID NO: 42000 - protein, 83 aa, Homo sapiens
  MAP TO AC002401.1; EXPRESSED IN ADULT LIVER, SIGNAL = 1.6; EXPRESSED IN LUNG, SIGNAL = 3.6; EXPRESSED IN PLACENTA, SIGNAL = 1.8; EXPRESSED IN BONE MARROW, SIGNAL = 1.7; EXPRESSED IN HEART, SIGNAL = 1.8; SWISSPROT HIT: P26006, EVALUE 2.00e-48; EST_HUMAN HIT: BF353625.1, EVALUE 2.00e-47
VCAHRYTQVLWSGSEDQRRMVGKCYVRGNDLELDSSDDWQTYHNEMCNSNTDYLETGMCQLGTSGGFTQNTVYFGAPGAYNWK

SEQ ID NO: 42001 - protein, 66 aa, Homo sapiens
  MAP TO AC015971.2; EXPRESSED IN BRAIN, SIGNAL = 6.8; EXPRESSED IN BONE MARROW, SIGNAL = 5.8; EXPRESSED IN FETAL LIVER, SIGNAL = 8.1; EXPRESSED IN LUNG, SIGNAL = 9.5; EXPRESSED IN HEART, SIGNAL = 8.1; EXPRESSED IN PLACENTA, SIGNAL = 6.5; EXPRESSED IN HELA, SIGNAL = 7.7; EXPRESSED IN ADULT LIVER, SIGNAL =   6; SWISSPROT HIT: P01029, EVALUE 2.40e+00; EST_HUMAN HIT: BE004173.1, EVALUE 2.00e-35
NFPVESDWDEDPDLFLERLAFPDLWLHPLIPTDYIKNLPMWRFKCLGVQSEEEMSEGSQDTENDSE

SEQ ID NO: 42002 - protein, 38 aa, Homo sapiens
  MAP TO AC018503.4; EXPRESSED IN BRAIN, SIGNAL = 3.5; EXPRESSED IN ADULT LIVER, SIGNAL = 3.9; EXPRESSED IN HELA, SIGNAL = 4.2; EXPRESSED IN HEART, SIGNAL = 4.3; EXPRESSED IN PLACENTA, SIGNAL = 3.4; EXPRESSED IN LUNG, SIGNAL =   4; EXPRESSED IN FETAL LIVER, SIGNAL = 3.7; EXPRESSED IN BONE MARROW, SIGNAL = 3.3; EST_HUMAN HIT: AW664888.1, EVALUE 5.70e-02
KNFNYKATKESKDHLVAIKQAIQRQNSLFEEFRILDFP

SEQ ID NO: 42003 - protein, 34 aa, Homo sapiens
  MAP TO AC018503.4; EXPRESSED IN BRAIN, SIGNAL = 3.5; EXPRESSED IN ADULT LIVER, SIGNAL = 3.9; EXPRESSED IN HELA, SIGNAL = 4.2; EXPRESSED IN HEART, SIGNAL = 4.3; EXPRESSED IN PLACENTA, SIGNAL = 3.4; EXPRESSED IN LUNG, SIGNAL =   4; EXPRESSED IN FETAL LIVER, SIGNAL = 3.7; EXPRESSED IN BONE MARROW, SIGNAL = 3.3; EST_HUMAN HIT: AW664888.1, EVALUE 1.00e-01
RISIIRQPRKAKITWWPSSRPSRDKTPYLRNLEY

SEQ ID NO: 42004 - protein, 53 aa, Homo sapiens
  MAP TO AC018506.3; EXPRESSED IN BRAIN, SIGNAL = 3.2; EXPRESSED IN PLACENTA, SIGNAL = 2.4; EXPRESSED IN ADULT LIVER, SIGNAL = 2.5; EXPRESSED IN BONE MARROW, SIGNAL =   2; EXPRESSED IN FETAL LIVER, SIGNAL = 3.9; EXPRESSED IN HELA, SIGNAL = 3.9; EXPRESSED IN HEART, SIGNAL = 3.4; EXPRESSED IN LUNG, SIGNAL = 2.8
TRPGSRRCPPAHSTLAFVLRLELLLQQVCLPVAQHEGEEGEDEGVEDADDGQD

SEQ ID NO: 42005 - protein, 44 aa, Homo sapiens
  MAP TO AC011989.3; EXPRESSED IN BRAIN, SIGNAL = 2.9; EXPRESSED IN ADULT LIVER, SIGNAL = 5.2; EXPRESSED IN BONE MARROW, SIGNAL = 7.5; EXPRESSED IN PLACENTA, SIGNAL = 3.9; EXPRESSED IN LUNG, SIGNAL = 9.1; EXPRESSED IN HEART, SIGNAL = 1.9; EXPRESSED IN HELA, SIGNAL = 3.7; EXPRESSED IN FETAL LIVER, SIGNAL = 4.6; EST_HUMAN HIT: AW752219.1, EVALUE 2.00e-19; SWISSPROT HIT: P02775, EVALUE 1.00e-20
ESLDSDLYAELRCMCIKTTSGIHPKNIQSLEVIGKGTHCNQVEV

SEQ ID NO: 42006 - protein, 90 aa, Homo sapiens
  MAP TO AL121767.3; EXPRESSED IN BRAIN, SIGNAL =   2; EXPRESSED IN FETAL LIVER, SIGNAL = 5.7; EXPRESSED IN HELA, SIGNAL = 6.1; EXPRESSED IN ADULT LIVER, SIGNAL =   2; EXPRESSED IN BONE MARROW, SIGNAL = 1.8; EXPRESSED IN HEART, SIGNAL = 5.5; EXPRESSED IN PLACENTA, SIGNAL = 2.5; EST_HUMAN HIT: BF058612.1, EVALUE 1.00e-35; SWISSPROT HIT: P29539, EVALUE 6.60e-01
AEVVPDGDEEFVGNWSKGDYCYVLAKRLDAFCPCPEDLGNIELERDDLGYLVEEISKQQSIQEVTWLLLKAFNFIRVAEHKSLEKLQPDN

SEQ ID NO: 42007 - protein, 36 aa, Homo sapiens
  MAP TO AC009242.2; EXPRESSED IN BRAIN, SIGNAL = 2.8; EXPRESSED IN ADULT LIVER, SIGNAL =   4; EXPRESSED IN HELA, SIGNAL = 2.6; EXPRESSED IN HEART, SIGNAL = 3.5; EXPRESSED IN PLACENTA, SIGNAL = 2.7; EXPRESSED IN LUNG, SIGNAL = 3.1; EXPRESSED IN FETAL LIVER, SIGNAL = 2.4; EXPRESSED IN BONE MARROW, SIGNAL = 2.5
IKEKNEPQAEYELFVGLKRTEPQAEEGEADLECGRT

SEQ ID NO: 42008 - protein, 28 aa, Homo sapiens
  MAP TO AL158801.1; EXPRESSED IN HEART, SIGNAL =  53; EST_HUMAN HIT: BF223065.1, EVALUE 6.00e-09
KGETRDAAAQYPIMHRTASTTKSYSTKN

SEQ ID NO: 42009 - protein, 65 aa, Homo sapiens
  MAP TO AC018552.2; EXPRESSED IN FETAL LIVER, SIGNAL = 2.4; EXPRESSED IN HEART, SIGNAL = 2.2; EXPRESSED IN BRAIN, SIGNAL = 2.8; EXPRESSED IN PLACENTA, SIGNAL = 3.1; EXPRESSED IN BONE MARROW, SIGNAL = 1.8; EXPRESSED IN ADULT LIVER, SIGNAL = 1.6; EXPRESSED IN HELA, SIGNAL = 2.9; EXPRESSED IN LUNG, SIGNAL = 3.2; SWISSPROT HIT: P27887, EVALUE 2.00e+00; EST_HUMAN HIT: AA400370.1, EVALUE 9.00e-11
ERMMHEEHLRQVETQLDYLAPFLAQLPPGEKLTCWQAVRLKDECLSDFKQRLINKANLIQARFEK

SEQ ID NO: 42010 - protein, 79 aa, Homo sapiens
  MAP TO AL158801.1; EXPRESSED IN PLACENTA, SIGNAL = 6.1; EXPRESSED IN BONE MARROW, SIGNAL = 6.8; EXPRESSED IN HELA, SIGNAL =  13; EXPRESSED IN LUNG, SIGNAL = 4.6; EXPRESSED IN ADULT LIVER, SIGNAL = 7.1; EXPRESSED IN HEART, SIGNAL =  11; EXPRESSED IN BRAIN, SIGNAL = 5.8; EXPRESSED IN FETAL LIVER, SIGNAL =  13; SWISSPROT HIT: Q05858, EVALUE 1.10e+00; EST_HUMAN HIT: AU133356.1, EVALUE 9.00e-40
MSSSHFASRHRKDISTEMIRTKIAHRKSLSQKENRHKEYERNRHFGLKDVNIPTLEGRILVELDETSQGLVPEKTNVKP

SEQ ID NO: 42011 - protein, 80 aa, Homo sapiens
  MAP TO AC007340.3; EXPRESSED IN BRAIN, SIGNAL = 7.6; EXPRESSED IN PLACENTA, SIGNAL = 7.3; EXPRESSED IN LUNG, SIGNAL = 3.7; EXPRESSED IN ADULT LIVER, SIGNAL = 7.8; EXPRESSED IN BONE MARROW, SIGNAL = 6.9; EXPRESSED IN HELA, SIGNAL = 9.8; EXPRESSED IN FETAL LIVER, SIGNAL = 9.4; EXPRESSED IN HEART, SIGNAL = 8.5; EST_HUMAN HIT: AV718492.1, EVALUE 3.90e+00
PYFSTLTSWTSVMLIQVLNSWIRLRRKRSHGINEVWRSGVLLKKKERKKEKEKKRNRKGKKRRRRRRRGRRRRRRKKKGE

SEQ ID NO: 42012 - protein, 72 aa, Homo sapiens
  MAP TO AL137190.2; EXPRESSED IN ADULT LIVER, SIGNAL = 3.8; EXPRESSED IN HEART, SIGNAL = 4.4; EXPRESSED IN BRAIN, SIGNAL =   4; EXPRESSED IN PLACENTA, SIGNAL = 3.4; EXPRESSED IN HELA, SIGNAL = 4.3; EXPRESSED IN BONE MARROW, SIGNAL = 3.7; EXPRESSED IN FETAL LIVER, SIGNAL = 4.1; EXPRESSED IN LUNG, SIGNAL = 4.3; SWISSPROT HIT: O84337, EVALUE 4.70e+00; EST_HUMAN HIT: R78762.1, EVALUE 2.40e+00
SYEACSFYLELLEHSFLGEPAPCKKSNNLGTSILGGSPSHLKKPLQDEIPRGEWPSCLEAPDKFRGNYTLEA

SEQ ID NO: 42013 - protein, 40 aa, Homo sapiens
  MAP TO AL137190.2; EXPRESSED IN ADULT LIVER, SIGNAL = 3.8; EXPRESSED IN HEART, SIGNAL = 4.4; EXPRESSED IN BRAIN, SIGNAL =   4; EXPRESSED IN PLACENTA, SIGNAL = 3.4; EXPRESSED IN HELA, SIGNAL = 4.3; EXPRESSED IN BONE MARROW, SIGNAL = 3.7; EXPRESSED IN FETAL LIVER, SIGNAL = 4.1; EXPRESSED IN LUNG, SIGNAL = 4.3; SWISSPROT HIT: P34652, EVALUE 4.80e+00; EST_HUMAN HIT: BF527198.1, EVALUE 1.40e+00
PTKPAASTWNCWNTLSWGSQHHARRATTLGPPYWEEAQVT

SEQ ID NO: 42014 - protein, 29 aa, Homo sapiens
  MAP TO AC021012.2; EXPRESSED IN PLACENTA, SIGNAL = 1.4; EXPRESSED IN BONE MARROW, SIGNAL = 1.9; EXPRESSED IN HELA, SIGNAL = 2.8; EXPRESSED IN LUNG, SIGNAL = 1.7; EXPRESSED IN ADULT LIVER, SIGNAL = 1.9; EXPRESSED IN BRAIN, SIGNAL =   2; EXPRESSED IN FETAL LIVER, SIGNAL = 2.7; EXPRESSED IN HEART, SIGNAL = 2.6
VMASSSIQVAACSLKPWSKALTSLLLQKS

SEQ ID NO: 42015 - protein, 27 aa, Homo sapiens
  MAP TO AC022267.2; EXPRESSED IN ADULT LIVER, SIGNAL =   2; EXPRESSED IN HEART, SIGNAL = 4.4; EXPRESSED IN BRAIN, SIGNAL = 2.3; EXPRESSED IN PLACENTA, SIGNAL = 1.8; EXPRESSED IN BONE MARROW, SIGNAL = 2.1; EXPRESSED IN FETAL LIVER, SIGNAL = 4.9; EXPRESSED IN HELA, SIGNAL = 4.3
LDYSNRKVKQHEIHTKRFLRDKREQEK

SEQ ID NO: 42016 - protein, 18 aa, Homo sapiens
  MAP TO AC022267.2; EXPRESSED IN ADULT LIVER, SIGNAL =   2; EXPRESSED IN HEART, SIGNAL = 4.4; EXPRESSED IN BRAIN, SIGNAL = 2.3; EXPRESSED IN PLACENTA, SIGNAL = 1.8; EXPRESSED IN BONE MARROW, SIGNAL = 2.1; EXPRESSED IN FETAL LIVER, SIGNAL = 4.9; EXPRESSED IN HELA, SIGNAL = 4.3
LITVTVRSNSMRFIQRDS

SEQ ID NO: 42017 - protein, 123 aa, Homo sapiens
  MAP TO AL136170.2; EXPRESSED IN HELA, SIGNAL = 1.9; EXPRESSED IN HEART, SIGNAL = 3.5; EXPRESSED IN BRAIN, SIGNAL = 2.5; EXPRESSED IN PLACENTA, SIGNAL = 1.9; EXPRESSED IN ADULT LIVER, SIGNAL = 1.5; EXPRESSED IN BONE MARROW, SIGNAL = 3.4; EXPRESSED IN FETAL LIVER, SIGNAL = 2.1; EXPRESSED IN LUNG, SIGNAL = 4.4; EST_HUMAN HIT: N59624.1, EVALUE 2.00e-24; SWISSPROT HIT: Q27409, EVALUE 1.10e+00
MYYTPPPQCVSRFVRPPPSAPEPAPPYLDHYPPYLQERVVNSQYGTQPQQYPPIYPSHYDGRRVYPAPSYTREEIFRESPIPIEIPPAAVPSYVPESRERYQQIESYYPVAPHPTQIRPSYLR

SEQ ID NO: 42018 - protein, 48 aa, Homo sapiens
  MAP TO AL158148.1; EXPRESSED IN BRAIN, SIGNAL = 1.6; EXPRESSED IN PLACENTA, SIGNAL = 1.3; EXPRESSED IN ADULT LIVER, SIGNAL = 8.9; EXPRESSED IN HEART, SIGNAL = 1.8; EST_HUMAN HIT: BE968345.1, EVALUE 3.90e+00; SWISSPROT HIT: Q9T1Q3, EVALUE 2.10e+00
MLVQGHHLQAWCAETTHTHVSIVPSLICQPDPEDPKVQGDCRTTHLEE

SEQ ID NO: 42019 - protein, 48 aa, Homo sapiens
  MAP TO AL158148.1; EXPRESSED IN BRAIN, SIGNAL = 1.6; EXPRESSED IN PLACENTA, SIGNAL = 1.3; EXPRESSED IN ADULT LIVER, SIGNAL = 8.9; EXPRESSED IN HEART, SIGNAL = 1.8; SWISSPROT HIT: P13993, EVALUE 3.60e+00; EST_HUMAN HIT: BE620821.1, EVALUE 7.80e-01
CWYKGITSKPGVQRPPTRTSPLCLPSSANQIQRTPRSKGIAEPPIWRK

SEQ ID NO: 42020 - protein, 26 aa, Homo sapiens
  MAP TO AC002126.1; EXPRESSED IN BRAIN, SIGNAL = 1.7; EXPRESSED IN BONE MARROW, SIGNAL = 2.5; EXPRESSED IN FETAL LIVER, SIGNAL = 2.6; EXPRESSED IN HEART, SIGNAL = 2.3; EXPRESSED IN LUNG, SIGNAL = 2.3; EXPRESSED IN ADULT LIVER, SIGNAL = 3.4; EXPRESSED IN PLACENTA, SIGNAL = 1.9; EXPRESSED IN HELA, SIGNAL = 2.7; EST_HUMAN HIT: BF311552.1, EVALUE 2.00e-09
PAAGPDPPGRTDHVGGQTHAAVKWVA

SEQ ID NO: 42021 - protein, 53 aa, Homo sapiens
  MAP TO AC002126.1; EXPRESSED IN BRAIN, SIGNAL = 1.7; EXPRESSED IN BONE MARROW, SIGNAL = 2.5; EXPRESSED IN FETAL LIVER, SIGNAL = 2.6; EXPRESSED IN HEART, SIGNAL = 2.3; EXPRESSED IN LUNG, SIGNAL = 2.3; EXPRESSED IN ADULT LIVER, SIGNAL = 3.4; EXPRESSED IN PLACENTA, SIGNAL = 1.9; EXPRESSED IN HELA, SIGNAL = 2.7; EST_HUMAN HIT: BF311552.1, EVALUE 3.00e-05
GPSQGPPGRLVTWCSPRLPVAKLAIRVGLAVVGSVLGAFLTFPGLRLAQTHRD

SEQ ID NO: 42022 - protein, 28 aa, Homo sapiens
  MAP TO AC022845.2; EXPRESSED IN ADULT LIVER, SIGNAL = 2.7; EXPRESSED IN PLACENTA, SIGNAL = 1.8; EXPRESSED IN BRAIN, SIGNAL = 2.4; EXPRESSED IN FETAL LIVER, SIGNAL = 1.9; EXPRESSED IN HELA, SIGNAL = 2.3; EXPRESSED IN HEART, SIGNAL = 2.1; EXPRESSED IN LUNG, SIGNAL = 2.5; SWISSPROT HIT: Q06846, EVALUE 5.00e+00; EST_HUMAN HIT: BE243021.1, EVALUE 3.00e-03
FLTEEEQEAIMKVLQRDAALKRAEEERV

SEQ ID NO: 42023 - protein, 44 aa, Homo sapiens
  MAP TO AL157817.3; EXPRESSED IN PLACENTA, SIGNAL = 5.1; EXPRESSED IN BONE MARROW, SIGNAL = 4.9; EXPRESSED IN FETAL LIVER, SIGNAL = 4.1; EXPRESSED IN HELA, SIGNAL = 3.6; EXPRESSED IN HEART, SIGNAL = 4.8; EXPRESSED IN ADULT LIVER, SIGNAL = 5.2; EXPRESSED IN BRAIN, SIGNAL =  10
DINAALGGKALQQGFPQLNSRKSLSNSDMQQDFGTGAIEKLIED

SEQ ID NO: 42024 - protein, 18 aa, Homo sapiens
  MAP TO AL157817.3; EXPRESSED IN PLACENTA, SIGNAL = 5.1; EXPRESSED IN BONE MARROW, SIGNAL = 4.9; EXPRESSED IN FETAL LIVER, SIGNAL = 4.1; EXPRESSED IN HELA, SIGNAL = 3.6; EXPRESSED IN HEART, SIGNAL = 4.8; EXPRESSED IN ADULT LIVER, SIGNAL = 5.2; EXPRESSED IN BRAIN, SIGNAL =  10
MTSTLLWVARLYSRDFHN

SEQ ID NO: 42025 - protein, 49 aa, Homo sapiens
  MAP TO AC007497.2; EXPRESSED IN BRAIN, SIGNAL = 2.6; EXPRESSED IN PLACENTA, SIGNAL = 2.6; EXPRESSED IN ADULT LIVER, SIGNAL = 2.3; EXPRESSED IN FETAL LIVER, SIGNAL = 2.4; EXPRESSED IN BONE MARROW, SIGNAL = 2.1; EXPRESSED IN LUNG, SIGNAL = 2.1; EXPRESSED IN HELA, SIGNAL = 2.7; EXPRESSED IN HEART, SIGNAL = 2.2; SWISSPROT HIT: P50593, EVALUE 8.10e+00
MPDDSVDEFDETIHLERGENLFEIHINKVTFSSEVLQASGDKEPVTFCT

SEQ ID NO: 42026 - protein, 25 aa, Homo sapiens
  MAP TO AC007497.2; EXPRESSED IN BRAIN, SIGNAL = 2.6; EXPRESSED IN PLACENTA, SIGNAL = 2.6; EXPRESSED IN ADULT LIVER, SIGNAL = 2.3; EXPRESSED IN FETAL LIVER, SIGNAL = 2.4; EXPRESSED IN BONE MARROW, SIGNAL = 2.1; EXPRESSED IN LUNG, SIGNAL = 2.1; EXPRESSED IN HELA, SIGNAL = 2.7; EXPRESSED IN HEART, SIGNAL = 2.2
APSSTNLNQKSCQMTLLMNLMKPST

SEQ ID NO: 42027 - protein, 25 aa, Homo sapiens
  MAP TO AL049873.2; EXPRESSED IN BONE MARROW, SIGNAL = 4.2; EXPRESSED IN FETAL LIVER, SIGNAL = 7.7; EXPRESSED IN HELA, SIGNAL = 7.2; EXPRESSED IN LUNG, SIGNAL = 3.6; EXPRESSED IN ADULT LIVER, SIGNAL = 6.2; EXPRESSED IN HEART, SIGNAL = 7.1; EXPRESSED IN BRAIN, SIGNAL = 8.8; EXPRESSED IN PLACENTA, SIGNAL = 7.6; EST_HUMAN HIT: AW840840.1, EVALUE 6.00e-06
TVPLGSTPVGTLCGGSNPTFPFHTA

SEQ ID NO: 42028 - protein, 23 aa, Homo sapiens
  MAP TO AC018826.3; EXPRESSED IN PLACENTA, SIGNAL = 1.5; EXPRESSED IN HELA, SIGNAL =   2; EXPRESSED IN FETAL LIVER, SIGNAL = 1.5; EXPRESSED IN HEART, SIGNAL = 1.8; EST_HUMAN HIT: BE064410.1, EVALUE 2.00e-06
FMGPGINGWKWKWHNSPSPLVIH

SEQ ID NO: 42029 - protein, 51 aa, Homo sapiens [sequence omitted]

SEQ ID NO: 42030 - protein, 21 aa, Homo sapiens
  MAP TO AC011428.2; EXPRESSED IN BRAIN, SIGNAL = 6.4; EXPRESSED IN PLACENTA, SIGNAL =   5; EXPRESSED IN BONE MARROW, SIGNAL = 4.6; EXPRESSED IN LUNG, SIGNAL = 6.3; EXPRESSED IN ADULT LIVER, SIGNAL = 5.9; EXPRESSED IN FETAL LIVER, SIGNAL =   7; EXPRESSED IN HELA, SIGNAL = 6.9; EXPRESSED IN HEART, SIGNAL = 6.5
YILSLCMQISGLQKAATVKQS

SEQ ID NO: 42031 - protein, 136 aa, Homo sapiens
  MAP TO AC010457.3; EXPRESSED IN BRAIN, SIGNAL = 2.1; EXPRESSED IN PLACENTA, SIGNAL =   3; EXPRESSED IN HELA, SIGNAL = 2.1; EXPRESSED IN LUNG, SIGNAL = 3.6; EXPRESSED IN ADULT LIVER, SIGNAL = 1.4; EXPRESSED IN HEART, SIGNAL = 1.9; EST_HUMAN HIT: BF366553.1, EVALUE 2.00e-49; SWISSPROT HIT: P42702, EVALUE 8.00e-69
GSSALKTLEMNPCTPNNVEVLETRSAFPKIEDTEIISPVAERPEDRSDAEPENHVVVSYCPPIIEEEIPNPAADEAGGTAQVIYIDVQSMYQPQAKPEEEQENDPVGGAGYKPQMHLPINSTVEDIAAEEDLDKTA

SEQ ID NO: 42032 - protein, 17 aa, Homo sapiens
  MAP TO AC010828.3; EXPRESSED IN ADULT LIVER, SIGNAL =   6; EXPRESSED IN HELA, SIGNAL =   6; EXPRESSED IN BRAIN, SIGNAL = 4.5; EXPRESSED IN PLACENTA, SIGNAL =   4; EXPRESSED IN BONE MARROW, SIGNAL = 4.7; EXPRESSED IN FETAL LIVER, SIGNAL =   5; EXPRESSED IN HEART, SIGNAL = 5.2; EXPRESSED IN LUNG, SIGNAL = 4.4
SLLQGSSLLRADSTIQV

SEQ ID NO: 42033 - protein, 17 aa, Homo sapiens
  MAP TO AC019191.2; EXPRESSED IN BRAIN, SIGNAL = 4.4; EXPRESSED IN PLACENTA, SIGNAL = 2.6; EXPRESSED IN HELA, SIGNAL = 2.7; EXPRESSED IN BONE MARROW, SIGNAL =   3; EXPRESSED IN FETAL LIVER, SIGNAL = 2.2; EXPRESSED IN HEART, SIGNAL = 2.4; EXPRESSED IN LUNG, SIGNAL = 2.9; EXPRESSED IN ADULT LIVER, SIGNAL = 3.4
WKASIQFVKVSTQTNKY

SEQ ID NO: 42034 - protein, 70 aa, Homo sapiens
  MAP TO AC019191.2; EXPRESSED IN BRAIN, SIGNAL = 4.4; EXPRESSED IN PLACENTA, SIGNAL = 2.6; EXPRESSED IN HELA, SIGNAL = 2.7; EXPRESSED IN BONE MARROW, SIGNAL =   3; EXPRESSED IN FETAL LIVER, SIGNAL = 2.2; EXPRESSED IN HEART, SIGNAL = 2.4; EXPRESSED IN LUNG, SIGNAL = 2.9; EXPRESSED IN ADULT LIVER, SIGNAL = 3.4; EST_HUMAN HIT: AL118940.1, EVALUE 7.80e+00
CLRFSGKFFISVLRTLIKWPNPYLKGQISSRPSSKKSKPVRCAKRIIPWSIIRPLWGNKEYGTILETTGS

SEQ ID NO: 42035 - protein, 29 aa, Homo sapiens
  MAP TO AC009396.5; EXPRESSED IN BRAIN, SIGNAL = 2.6; EXPRESSED IN PLACENTA, SIGNAL = 2.1; EXPRESSED IN ADULT LIVER, SIGNAL = 3.5; EXPRESSED IN FETAL LIVER, SIGNAL = 1.8; EXPRESSED IN BONE MARROW, SIGNAL = 1.9; EXPRESSED IN HELA, SIGNAL = 1.7; EXPRESSED IN HEART, SIGNAL = 2.6; SWISSPROT HIT: P95816, EVALUE 8.60e+00
CILEMGIDRIWDLLDKKLKEKQMQRPEIQ

SEQ ID NO: 42036 - protein, 34 aa, Homo sapiens
  MAP TO AC017004.2; EXPRESSED IN BRAIN, SIGNAL = 7.3; EXPRESSED IN PLACENTA, SIGNAL = 6.3; EXPRESSED IN BONE MARROW, SIGNAL = 6.5; EXPRESSED IN HEART, SIGNAL =  12; EXPRESSED IN LUNG, SIGNAL = 5.9; EXPRESSED IN ADULT LIVER, SIGNAL = 7.8; EXPRESSED IN FETAL LIVER, SIGNAL =  12; EXPRESSED IN HELA, SIGNAL =  14; EST_HUMAN HIT: BF672609.1, EVALUE 1.50e+00
LVRNRSTKLWKVYTLRLGRWWPPCSCTIVTVRML

SEQ ID NO: 42037 - protein, 35 aa, Homo sapiens
  MAP TO AL158845.1; EXPRESSED IN HELA, SIGNAL = 2.7; EXPRESSED IN FETAL LIVER, SIGNAL = 2.4; EXPRESSED IN ADULT LIVER, SIGNAL = 1.5; EXPRESSED IN HEART, SIGNAL = 3.1; EXPRESSED IN BRAIN, SIGNAL = 1.4
LNSLLKSALSILRNEISSLVTINNVYNFKRNKKYL

SEQ ID NO: 42038 - protein, 44 aa, Homo sapiens
  MAP TO AL121963.10; EXPRESSED IN PLACENTA, SIGNAL = 3.2; EXPRESSED IN BRAIN, SIGNAL = 4.8; EXPRESSED IN LUNG, SIGNAL = 2.7; EXPRESSED IN HEART, SIGNAL = 3.8; EXPRESSED IN HELA, SIGNAL =   4; EXPRESSED IN FETAL LIVER, SIGNAL = 3.9; EXPRESSED IN BONE MARROW, SIGNAL = 3.1; EXPRESSED IN ADULT LIVER, SIGNAL =   4
HQEDKEPSRHQEDEEVQGTQKFRHQEDEEEPAKETEKDQSMKKE

SEQ ID NO: 42039 - protein, 47 aa, Homo sapiens
  MAP TO AL121963.10; EXPRESSED IN PLACENTA, SIGNAL = 3.2; EXPRESSED IN BRAIN, SIGNAL = 4.8; EXPRESSED IN LUNG, SIGNAL = 2.7; EXPRESSED IN HEART, SIGNAL = 3.8; EXPRESSED IN HELA, SIGNAL =   4; EXPRESSED IN FETAL LIVER, SIGNAL = 3.9; EXPRESSED IN BONE MARROW, SIGNAL = 3.1; EXPRESSED IN ADULT LIVER, SIGNAL =   4; EST_HUMAN HIT: BF125627.1, EVALUE 6.00e-01; SWISSPROT HIT: P13816, EVALUE 2.40e-01
RENRRQKEGEGKEQRCLDIKKTRNHQDIKKMRKFKERRSLDIKKMRK

SEQ ID NO: 42040 - protein, 71 aa, Homo sapiens
  MAP TO AC007115.1; EXPRESSED IN PLACENTA, SIGNAL = 4.4; EXPRESSED IN FETAL LIVER, SIGNAL = 1.8; EXPRESSED IN ADULT LIVER, SIGNAL = 2.6; EXPRESSED IN HEART, SIGNAL =  10; EXPRESSED IN LUNG, SIGNAL =  17; EST_HUMAN HIT: BE840856.1, EVALUE 3.00e-33; SWISSPROT HIT: P07585, EVALUE 3.00e-34
ALILVNNKISKVSPGAFTPLVKLERLYLSKNQLKELPEKMPKTLQELRAHENEITKVRKVTFNGLNQMIVI

SEQ ID NO: 42041 - protein, 38 aa, Homo sapiens
  MAP TO AL031658.11; EXPRESSED IN HELA, SIGNAL = 2.2; EXPRESSED IN HEART, SIGNAL = 2.3; EXPRESSED IN PLACENTA, SIGNAL =   2; EXPRESSED IN ADULT LIVER, SIGNAL =   2; EXPRESSED IN BONE MARROW, SIGNAL = 1.7; EXPRESSED IN FETAL LIVER, SIGNAL = 2.1; EXPRESSED IN LUNG, SIGNAL = 3.4; EXPRESSED IN BRAIN, SIGNAL = 2.4; EST_HUMAN HIT: AW901129.1, EVALUE 2.00e-05; SWISSPROT HIT: P38584, EVALUE 1.30e+00
DIDNIFVKSLQSVQKVIISDKHCFELYGYDILIDQDLK

SEQ ID NO: 42042 - protein, 31 aa, Homo sapiens
  MAP TO AL031658.11; EXPRESSED IN HELA, SIGNAL = 2.2; EXPRESSED IN HEART, SIGNAL = 2.3; EXPRESSED IN PLACENTA, SIGNAL =   2; EXPRESSED IN ADULT LIVER, SIGNAL =   2; EXPRESSED IN BONE MARROW, SIGNAL = 1.7; EXPRESSED IN FETAL LIVER, SIGNAL = 2.1; EXPRESSED IN LUNG, SIGNAL = 3.4; EXPRESSED IN BRAIN, SIGNAL = 2.4; EST_HUMAN HIT: AA421972.1, EVALUE 3.40e+00
QTRARGSGDTLQGHRQHLCQKPAECAEGDHQ

SEQ ID NO: 42043 - protein, 19 aa, Homo sapiens
  MAP TO AC010278.3; EXPRESSED IN FETAL LIVER, SIGNAL = 2.2; EXPRESSED IN HEART, SIGNAL = 1.9; EXPRESSED IN HELA, SIGNAL = 1.9
CIYYIILFIIIFPMYSFYL

SEQ ID NO: 42044 - protein, 40 aa, Homo sapiens
  MAP TO AC017016.3; EXPRESSED IN ADULT LIVER, SIGNAL = 5.8; EXPRESSED IN FETAL LIVER, SIGNAL = 5.1; EXPRESSED IN PLACENTA, SIGNAL = 2.9; EXPRESSED IN BONE MARROW, SIGNAL = 3.9; EXPRESSED IN HELA, SIGNAL = 4.6; EXPRESSED IN HEART, SIGNAL = 4.2; EXPRESSED IN LUNG, SIGNAL = 3.1; EXPRESSED IN BRAIN, SIGNAL = 4.1; EST_HUMAN HIT: BE010038.1, EVALUE 1.00e-11
FSSAICDSFLICPQVGGCIRRVLLMTVGVLLSVNLDNAAT

SEQ ID NO: 42045 - protein, 17 aa, Homo sapiens
  MAP TO AC017016.3; EXPRESSED IN ADULT LIVER, SIGNAL = 5.8; EXPRESSED IN FETAL LIVER, SIGNAL = 5.1; EXPRESSED IN PLACENTA, SIGNAL = 2.9; EXPRESSED IN BONE MARROW, SIGNAL = 3.9; EXPRESSED IN HELA, SIGNAL = 4.6; EXPRESSED IN HEART, SIGNAL = 4.2; EXPRESSED IN LUNG, SIGNAL = 3.1; EXPRESSED IN BRAIN, SIGNAL = 4.1; EST_HUMAN HIT: BE385958.1, EVALUE 1.60e+00; SWISSPROT HIT: P10266, EVALUE 8.80e+00
QNQQSIWIPSRHLKTLS

SEQ ID NO: 42046 - protein, 53 aa, Homo sapiens
  MAP TO AC019055.2; EXPRESSED IN BRAIN, SIGNAL = 2.8; EXPRESSED IN PLACENTA, SIGNAL =   2; EXPRESSED IN HELA, SIGNAL = 2.8; EXPRESSED IN ADULT LIVER, SIGNAL =   5; EXPRESSED IN BONE MARROW, SIGNAL = 2.8; EXPRESSED IN FETAL LIVER, SIGNAL = 3.5; EXPRESSED IN HEART, SIGNAL = 2.7; EXPRESSED IN LUNG, SIGNAL = 2.2; SWISSPROT HIT: P40583, EVALUE 2.70e+00
RSWYFCYQSNNLPHAFFYMLEEELSSDLKAYVFDSHKIMDTKGIKMEITTAKI

SEQ ID NO: 42047 - protein, 43 aa, Homo sapiens
  MAP TO AC019055.2; EXPRESSED IN BRAIN, SIGNAL = 2.8; EXPRESSED IN PLACENTA, SIGNAL =   2; EXPRESSED IN HELA, SIGNAL = 2.8; EXPRESSED IN ADULT LIVER, SIGNAL =   5; EXPRESSED IN BONE MARROW, SIGNAL = 2.8; EXPRESSED IN FETAL LIVER, SIGNAL = 3.5; EXPRESSED IN HEART, SIGNAL = 2.7; EXPRESSED IN LUNG, SIGNAL = 2.2
VPGIFATRAITFPMHFFTCWRRSYPVISKHMFLILIRLWIPKE

SEQ ID NO: 42048 - protein, 40 aa, Homo sapiens
  MAP TO AC008786.6; EXPRESSED IN HELA, SIGNAL = 3.5; EXPRESSED IN HEART, SIGNAL = 2.9; EXPRESSED IN LUNG, SIGNAL = 2.8; EXPRESSED IN PLACENTA, SIGNAL = 2.2; EXPRESSED IN BRAIN, SIGNAL = 2.4; EXPRESSED IN FETAL LIVER, SIGNAL = 3.3; EXPRESSED IN ADULT LIVER, SIGNAL = 2.3; EXPRESSED IN BONE MARROW, SIGNAL = 2.3
VLGRQPVAVLAPYLGVDGLYVQAAICGSGSLEPGLGATCA

SEQ ID NO: 42049 - protein, 21 aa, Homo sapiens
  MAP TO AC008786.6; EXPRESSED IN HELA, SIGNAL = 3.5; EXPRESSED IN HEART, SIGNAL = 2.9; EXPRESSED IN LUNG, SIGNAL = 2.8; EXPRESSED IN PLACENTA, SIGNAL = 2.2; EXPRESSED IN BRAIN, SIGNAL = 2.4; EXPRESSED IN FETAL LIVER, SIGNAL = 3.3; EXPRESSED IN ADULT LIVER, SIGNAL = 2.3; EXPRESSED IN BONE MARROW, SIGNAL = 2.3; EST_HUMAN HIT: AI801771.1, EVALUE 8.30e+00
HAQVAPRPGSRLPLPQMAAWT

SEQ ID NO: 42050 - protein, 27 aa, Homo sapiens
  MAP TO AC007262.4; EXPRESSED IN BRAIN, SIGNAL =   2; EXPRESSED IN PLACENTA, SIGNAL = 2.7; EXPRESSED IN ADULT LIVER, SIGNAL =   2; EXPRESSED IN FETAL LIVER, SIGNAL =   2; EXPRESSED IN HELA, SIGNAL = 2.1; EXPRESSED IN HEART, SIGNAL =   2; EST_HUMAN HIT: AV704723.1, EVALUE 4.00e-07
DLDGAGGHYPPQTNRGTENKIPHVLTY

SEQ ID NO: 42051 - protein, 151 aa, Homo sapiens
  MAP TO AL122010.2; EXPRESSED IN BONE MARROW, SIGNAL = 2.4; EXPRESSED IN HEART, SIGNAL = 3.8; EXPRESSED IN LUNG, SIGNAL = 2.5; EXPRESSED IN PLACENTA, SIGNAL = 2.4; EXPRESSED IN ADULT LIVER, SIGNAL = 2.7; EXPRESSED IN FETAL LIVER, SIGNAL = 3.2; EXPRESSED IN HELA, SIGNAL = 3.4; EXPRESSED IN BRAIN, SIGNAL = 2.6; EST_HUMAN HIT: BE182360.1, EVALUE 3.00e-64; SWISSPROT HIT: O95377, EVALUE 2.00e-89
EKRHREAHGENSGRLYLNPGKKRGGLWWTYVCSLVFKASVDIAFLYVFHSFYPKYILPPVVKCHADPCPNIVDCFISKPSEKNIFTLFMVATAAICILLNLVELIYLVSKRCHECLAARKAQAMCTGHHPHGTTSSCKQDDLLSGDLIFLG

SEQ ID NO: 42052 - protein, 35 aa, Homo sapiens
  MAP TO AL122010.2; EXPRESSED IN BONE MARROW, SIGNAL = 2.4; EXPRESSED IN HEART, SIGNAL = 3.8; EXPRESSED IN LUNG, SIGNAL = 2.5; EXPRESSED IN PLACENTA, SIGNAL = 2.4; EXPRESSED IN ADULT LIVER, SIGNAL = 2.7; EXPRESSED IN FETAL LIVER, SIGNAL = 3.2; EXPRESSED IN HELA, SIGNAL = 3.4; EXPRESSED IN BRAIN, SIGNAL = 2.6; EST_HUMAN HIT: AW176548.1, EVALUE 4.00e-08
WTASSPSPQRRTFSPSSWWPQLPSASCSTSWSSST

SEQ ID NO: 42053 - protein, 51 aa, Homo sapiens
  MAP TO AC009009.2; EXPRESSED IN FETAL LIVER, SIGNAL = 3.6; EXPRESSED IN HELA, SIGNAL = 3.4; EXPRESSED IN HEART, SIGNAL = 2.8; EST_HUMAN HIT: AA435719.1, EVALUE 3.00e-09
LTTTTMVSISMLLKDMVFIRSILVKLTLFLTSVLSPLPFGWIKKLFSMLFT

SEQ ID NO: 42054 - protein, 34 aa, Homo sapiens
  MAP TO AC010253.2; EXPRESSED IN ADULT LIVER, SIGNAL = 4.3; EXPRESSED IN HELA, SIGNAL = 4.7; EXPRESSED IN HEART, SIGNAL = 3.5; EXPRESSED IN LUNG, SIGNAL = 4.1; EXPRESSED IN BRAIN, SIGNAL = 4.2; EXPRESSED IN PLACENTA, SIGNAL = 3.7; EXPRESSED IN BONE MARROW, SIGNAL = 4.1; EXPRESSED IN FETAL LIVER, SIGNAL = 4.4; EST_HUMAN HIT: BF037205.1, EVALUE 3.00e-05
SGGRSRRQAARWPGRAQQRCSGHVNVSASARGIE

SEQ ID NO: 42055 - protein, 33 aa, Homo sapiens
  MAP TO AL160007.1; EXPRESSED IN BRAIN, SIGNAL = 1.9; EXPRESSED IN PLACENTA, SIGNAL = 1.8; EXPRESSED IN ADULT LIVER, SIGNAL = 2.1; EXPRESSED IN FETAL LIVER, SIGNAL =   2; EXPRESSED IN HELA, SIGNAL = 2.2; EXPRESSED IN HEART, SIGNAL =   2; EXPRESSED IN BONE MARROW, SIGNAL = 1.6; SWISSPROT HIT: P33247, EVALUE 1.70e+00
ISKVIFQETSVSLDWIAQHRASDGSWKGGCLGR

SEQ ID NO: 42056 - protein, 43 aa, Homo sapiens
  MAP TO AC018760.4; EXPRESSED IN PLACENTA, SIGNAL = 1.4; EXPRESSED IN FETAL LIVER, SIGNAL = 3.7; EXPRESSED IN HEART, SIGNAL = 2.2; EXPRESSED IN LUNG, SIGNAL = 1.8; EXPRESSED IN BRAIN, SIGNAL = 2.7; EXPRESSED IN HELA, SIGNAL = 2.1; EXPRESSED IN BONE MARROW, SIGNAL = 2.4; EXPRESSED IN ADULT LIVER, SIGNAL = 1.9; EST_HUMAN HIT: AW602409.1, EVALUE 1.40e+00; SWISSPROT HIT: O70248, EVALUE 1.20e+00
EASTVLHYVLQQPPELLQEPVGAQVPSETHGRPLGGAIGGATV

SEQ ID NO: 42057 - protein, 59 aa, Homo sapiens
  MAP TO AL139289.4; EXPRESSED IN BONE MARROW, SIGNAL =   3; EXPRESSED IN HELA, SIGNAL = 5.4; EXPRESSED IN LUNG, SIGNAL = 3.7; EXPRESSED IN BRAIN, SIGNAL = 4.3; EXPRESSED IN PLACENTA, SIGNAL = 3.3; EXPRESSED IN ADULT LIVER, SIGNAL = 7.9; EXPRESSED IN FETAL LIVER, SIGNAL = 4.9; EXPRESSED IN HEART, SIGNAL = 4.5; EST_HUMAN HIT: AI360996.1, EVALUE 2.10e+00; SWISSPROT HIT: P40238, EVALUE 9.00e-31
EKPRACPLSSQSMPHFGTRYVCQFPDQEEVRLFFPLHLWVKNVFLNQTRTQRVLFVDSV

SEQ ID NO: 42058 - protein, 22 aa, Homo sapiens
  MAP TO AC000097.1; EXPRESSED IN BRAIN, SIGNAL = 3.9; EXPRESSED IN ADULT LIVER, SIGNAL = 3.5; EXPRESSED IN HEART, SIGNAL = 2.9; EXPRESSED IN PLACENTA, SIGNAL = 3.1; EXPRESSED IN LUNG, SIGNAL = 3.3; EXPRESSED IN HELA, SIGNAL = 3.4; EXPRESSED IN FETAL LIVER, SIGNAL = 3.8; EXPRESSED IN BONE MARROW, SIGNAL = 3.5
KVGPGSTSRPSALPFLGPAFPF

SEQ ID NO: 42059 - protein, 81 aa, Homo sapiens [sequence omitted]

SEQ ID NO: 42060 - protein, 68 aa, Homo sapiens
  MAP TO AC000134.14; EXPRESSED IN BRAIN, SIGNAL = 1.6; EXPRESSED IN PLACENTA, SIGNAL = 1.6; EXPRESSED IN HEART, SIGNAL = 2.2; EXPRESSED IN ADULT LIVER, SIGNAL = 1.5; EXPRESSED IN BONE MARROW, SIGNAL = 1.5; EXPRESSED IN LUNG, SIGNAL = 1.7; SWISSPROT HIT: P11217, EVALUE 3.00e-33; EST_HUMAN HIT: C03311.1, EVALUE 3.00e-32
IPAADLSEQISTAGTEASGTGNMKFMLNGALTIGTMDGANVEMAEEAGEENFFIFGMRVEDVDKLDQR

SEQ ID NO: 42061 - protein, 77 aa, Homo sapiens
  MAP TO AL133375.3; EXPRESSED IN BRAIN, SIGNAL = 4.1; EXPRESSED IN PLACENTA, SIGNAL =   3; EXPRESSED IN BONE MARROW, SIGNAL = 2.8; EXPRESSED IN HEART, SIGNAL = 3.5; EXPRESSED IN LUNG, SIGNAL = 4.3; EXPRESSED IN HELA, SIGNAL = 3.8; EXPRESSED IN ADULT LIVER, SIGNAL = 3.7; EXPRESSED IN FETAL LIVER, SIGNAL = 3.2; EST_HUMAN HIT: BE896423.1, EVALUE 4.00e-33; SWISSPROT HIT: P70289, EVALUE 3.00e+00
MSPQEVEGLMKQTVRQVQETLNLEPDVAQHLLAHSHWGAEQLLQSYSEDPEPLLLAAGLCVHQAQAVPVRPDHCPVC

SEQ ID NO: 42062 - protein, 41 aa, Homo sapiens
  MAP TO AC019224.2; EXPRESSED IN PLACENTA, SIGNAL = 4.3; EXPRESSED IN BONE MARROW, SIGNAL = 4.6; EXPRESSED IN FETAL LIVER, SIGNAL = 5.4; EXPRESSED IN HELA, SIGNAL = 5.7; EXPRESSED IN LUNG, SIGNAL = 3.6; EXPRESSED IN HEART, SIGNAL = 6.4; EXPRESSED IN BRAIN, SIGNAL =   6; EXPRESSED IN ADULT LIVER, SIGNAL = 4.8; EST_HUMAN HIT: AI922911.1, EVALUE 2.00e-16
AVSELLQVLLCKQKAGGCTPDQGPHTSKVLTEASSLPRISR

SEQ ID NO: 42063 - protein, 41 aa, Homo sapiens
  MAP TO AC019224.2; EXPRESSED IN PLACENTA, SIGNAL = 4.3; EXPRESSED IN BONE MARROW, SIGNAL = 4.6; EXPRESSED IN FETAL LIVER, SIGNAL = 5.4; EXPRESSED IN HELA, SIGNAL = 5.7; EXPRESSED IN LUNG, SIGNAL = 3.6; EXPRESSED IN HEART, SIGNAL = 6.4; EXPRESSED IN BRAIN, SIGNAL =   6; EXPRESSED IN ADULT LIVER, SIGNAL = 4.8; EST_HUMAN HIT: AI922911.1, EVALUE 4.00e-09
QSASSCRSCSVSRKLEAAPQIKALTPQRFSRRPRLCPASPE

SEQ ID NO: 42064 - protein, 57 aa, Homo sapiens
  MAP TO AC017079.2; EXPRESSED IN ADULT LIVER, SIGNAL =   3; EXPRESSED IN HEART, SIGNAL = 2.2; EXPRESSED IN BRAIN, SIGNAL = 2.6; EXPRESSED IN PLACENTA, SIGNAL = 2.1; EXPRESSED IN BONE MARROW, SIGNAL =   5; EXPRESSED IN FETAL LIVER, SIGNAL = 2.6; EXPRESSED IN HELA, SIGNAL = 2.6; EXPRESSED IN LUNG, SIGNAL = 8.2; EST_HUMAN HIT: AI623668.1, EVALUE 8.30e-02; SWISSPROT HIT: Q92777, EVALUE 4.60e+00
MLVTRCGFHSTPAPSPAPGPRQGGRVFAEVSTWGAVCTGVSLGSWALKLSSSSPSPS

SEQ ID NO: 42065 - protein, 46 aa, Homo sapiens
  MAP TO AL157955.1; EXPRESSED IN BRAIN, SIGNAL = 3.4; EXPRESSED IN BONE MARROW, SIGNAL = 2.6; EXPRESSED IN FETAL LIVER, SIGNAL = 3.5; EXPRESSED IN HEART, SIGNAL = 3.8; EXPRESSED IN LUNG, SIGNAL = 7.2; EXPRESSED IN ADULT LIVER, SIGNAL = 3.3; EXPRESSED IN PLACENTA, SIGNAL = 2.9; EXPRESSED IN HELA, SIGNAL =   4; SWISSPROT HIT: O02791, EVALUE 7.00e-25; EST_HUMAN HIT: AV649529.1, EVALUE 8.00e-24
LPWSFPGWLGKGFDWPYVNLQLTAYYVVTWIVGAKRYHDLDIDYIG

SEQ ID NO: 42066 - protein, 22 aa, Homo sapiens
  MAP TO AL157955.1; EXPRESSED IN BRAIN, SIGNAL = 3.4; EXPRESSED IN BONE MARROW, SIGNAL = 2.6; EXPRESSED IN FETAL LIVER, SIGNAL = 3.5; EXPRESSED IN HEART, SIGNAL = 3.8; EXPRESSED IN LUNG, SIGNAL = 7.2; EXPRESSED IN ADULT LIVER, SIGNAL = 3.3; EXPRESSED IN PLACENTA, SIGNAL = 2.9; EXPRESSED IN HELA, SIGNAL =   4; EST_HUMAN HIT: AV649253.1, EVALUE 1.00e-06
GCHGHSLDGWEKVSTGLMSIFS

SEQ ID NO: 42067 - protein, 66 aa, Homo sapiens
  MAP TO AL049780.2; EXPRESSED IN ADULT LIVER, SIGNAL = 1.6; EXPRESSED IN HEART, SIGNAL = 1.7; EXPRESSED IN LUNG, SIGNAL = 4.4; EXPRESSED IN PLACENTA, SIGNAL = 1.8; EXPRESSED IN BRAIN, SIGNAL = 1.9; EXPRESSED IN BONE MARROW, SIGNAL = 2.3; EXPRESSED IN FETAL LIVER, SIGNAL = 1.7; EST_HUMAN HIT: AW500153.1, EVALUE 5.00e-35; SWISSPROT HIT: P23800, EVALUE 1.00e-04
EGQLYAFGSDYYGCMGVDKVAGPEVLEPMQLNFFLSNPVEQVSCGDNHVVVLTRNKEVYSWGCGEY

SEQ ID NO: 42068 - protein, 20 aa, Homo sapiens
  MAP TO AL049780.2; EXPRESSED IN ADULT LIVER, SIGNAL = 1.6; EXPRESSED IN HEART, SIGNAL = 1.7; EXPRESSED IN LUNG, SIGNAL = 4.4; EXPRESSED IN PLACENTA, SIGNAL = 1.8; EXPRESSED IN BRAIN, SIGNAL = 1.9; EXPRESSED IN BONE MARROW, SIGNAL = 2.3; EXPRESSED IN FETAL LIVER, SIGNAL = 1.7; EST_HUMAN HIT: AW500307.1, EVALUE 3.00e-04
RTHAAELLPQQSSGAGLLWR

SEQ ID NO: 42069 - protein, 24 aa, Homo sapiens
  MAP TO AC013329.3; EXPRESSED IN ADULT LIVER, SIGNAL = 1.8; EXPRESSED IN HEART, SIGNAL = 1.8; EXPRESSED IN BRAIN, SIGNAL = 1.5; EXPRESSED IN PLACENTA, SIGNAL = 1.4; EXPRESSED IN FETAL LIVER, SIGNAL = 2.1; EXPRESSED IN HELA, SIGNAL =   2
YTVLPLCVSTLAFFSCSFAALLSL

SEQ ID NO: 42070 - protein, 24 aa, Homo sapiens
  MAP TO AC013329.3; EXPRESSED IN ADULT LIVER, SIGNAL = 1.8; EXPRESSED IN HEART, SIGNAL = 1.8; EXPRESSED IN BRAIN, SIGNAL = 1.5; EXPRESSED IN PLACENTA, SIGNAL = 1.4; EXPRESSED IN FETAL LIVER, SIGNAL = 2.1; EXPRESSED IN HELA, SIGNAL =   2
KETAVLQRSKKRRPKLTHREAKQC

SEQ ID NO: 42071 - protein, 60 aa, Homo sapiens
  MAP TO AC017111.2; EXPRESSED IN PLACENTA, SIGNAL = 1.8; EXPRESSED IN FETAL LIVER, SIGNAL = 2.5; EXPRESSED IN ADULT LIVER, SIGNAL = 2.1; EXPRESSED IN LUNG, SIGNAL =   2; EXPRESSED IN BRAIN, SIGNAL = 2.2; EXPRESSED IN HEART, SIGNAL = 2.3; EXPRESSED IN HELA, SIGNAL =   2; EXPRESSED IN BONE MARROW, SIGNAL = 1.5; EST_HUMAN HIT: AA421782.1, EVALUE 1.80e-01; SWISSPROT HIT: P81743, EVALUE 3.50e+00
MRILETTDCSCNNQMSDQGKVCVTYEVFNTCCFLSLPSVCWPTYQPATINLAMMSTFETG

SEQ ID NO: 42072 - protein, 65 aa, Homo sapiens
  MAP TO AC011469.3; EXPRESSED IN BRAIN, SIGNAL = 2.2; EXPRESSED IN PLACENTA, SIGNAL = 2.1; EXPRESSED IN FETAL LIVER, SIGNAL = 2.9; EXPRESSED IN ADULT LIVER, SIGNAL = 1.9; EXPRESSED IN BONE MARROW, SIGNAL = 2.8; EXPRESSED IN HELA, SIGNAL = 2.6; EXPRESSED IN HEART, SIGNAL = 2.3; EXPRESSED IN LUNG, SIGNAL = 1.9; EST_HUMAN HIT: BF346161.1, EVALUE 8.70e-01; SWISSPROT HIT: P21817, EVALUE 7.00e-32
SLDSFSGKPRGSGPPAGTALPIEGVILSLQDLIIYFEPPSEDLQHEEKQSKLRSLRNRQSLFQEE

SEQ ID NO: 42073 - protein, 26 aa, Homo sapiens
  MAP TO AC011469.3; EXPRESSED IN BRAIN, SIGNAL = 2.2; EXPRESSED IN PLACENTA, SIGNAL = 2.1; EXPRESSED IN FETAL LIVER, SIGNAL = 2.9; EXPRESSED IN ADULT LIVER, SIGNAL = 1.9; EXPRESSED IN BONE MARROW, SIGNAL = 2.8; EXPRESSED IN HELA, SIGNAL = 2.6; EXPRESSED IN HEART, SIGNAL = 2.3; EXPRESSED IN LUNG, SIGNAL = 1.9
AWTASAGSHGARGHPLARRCPSRALS

SEQ ID NO: 42074 - protein, 51 aa, Homo sapiens
  MAP TO AL138806.5; EXPRESSED IN PLACENTA, SIGNAL = 3.1; EXPRESSED IN BRAIN, SIGNAL = 3.1; EXPRESSED IN FETAL LIVER, SIGNAL = 3.5; EXPRESSED IN HELA, SIGNAL = 3.2; EXPRESSED IN ADULT LIVER, SIGNAL = 3.6; EXPRESSED IN BONE MARROW, SIGNAL = 2.8; EXPRESSED IN HEART, SIGNAL = 2.5; EXPRESSED IN LUNG, SIGNAL = 5.7; SWISSPROT HIT: P01425, EVALUE 9.30e-01; EST_HUMAN HIT: F10104.1, EVALUE 3.00e-10
ADSLVPRAPRRQSPQCHSCQASEPKLSHHIPCDLHVYTSRWPEASEESQKK

SEQ ID NO: 42075 - protein, 49 aa, Homo sapiens
  MAP TO AL034423.18; EXPRESSED IN BRAIN, SIGNAL = 3.1; EXPRESSED IN PLACENTA, SIGNAL = 1.6; EXPRESSED IN FETAL LIVER, SIGNAL = 2.7; EXPRESSED IN BONE MARROW, SIGNAL = 4.3; EXPRESSED IN HELA, SIGNAL = 1.7; EXPRESSED IN HEART, SIGNAL = 1.8; EXPRESSED IN LUNG, SIGNAL = 4.3; SWISSPROT HIT: P53152, EVALUE 2.00e-13; EST_HUMAN HIT: AL040897.1, EVALUE 4.00e-23
VKVPRNFRLLEELEEGQKGVGDGTVSWGLEDDEDMTLTRWTGMIIGPPR

SEQ ID NO: 42076 - protein, 35 aa, Homo sapiens
  MAP TO AL133444.1; EXPRESSED IN HEART, SIGNAL = 1.9; EXPRESSED IN BRAIN, SIGNAL = 1.3; EXPRESSED IN ADULT LIVER, SIGNAL = 1.5; EXPRESSED IN FETAL LIVER, SIGNAL = 2.2; EXPRESSED IN HELA, SIGNAL = 2.2
VFLHLIGEECAGMPQVGLKNVEFPYYFRRSQMTLV

SEQ ID NO: 42077 - protein, 68 aa, Homo sapiens
  MAP TO AL109925.11; EXPRESSED IN ADULT LIVER, SIGNAL = 3.1; EXPRESSED IN HEART, SIGNAL = 2.4; EXPRESSED IN PLACENTA, SIGNAL = 1.4; EXPRESSED IN FETAL LIVER, SIGNAL = 1.8; EXPRESSED IN LUNG, SIGNAL = 3.6; EST_HUMAN HIT: BE890280.1, EVALUE 4.00e-29; SWISSPROT HIT: P36871, EVALUE 3.00e-30
YDYEEVEAEGANKMMKDLEALMFDRSFVGKQFSANDKVYTVEKADNFEYSDPVDGSISRNQVETDRCV

SEQ ID NO: 42078 - protein, 45 aa, Homo sapiens
  MAP TO AC011455.3; EXPRESSED IN ADULT LIVER, SIGNAL =   3; EXPRESSED IN BONE MARROW, SIGNAL = 3.1; EXPRESSED IN HEART, SIGNAL = 3.2; EXPRESSED IN LUNG, SIGNAL = 3.7; EXPRESSED IN BRAIN, SIGNAL = 3.8; EXPRESSED IN PLACENTA, SIGNAL = 3.4; EXPRESSED IN FETAL LIVER, SIGNAL = 3.5; EXPRESSED IN HELA, SIGNAL = 3.5; EST_HUMAN HIT: BE252414.1, EVALUE 1.00e-20; SWISSPROT HIT: P11930, EVALUE 9.40e-01
DGSVLVPPALQSYLGTDRITAPTHVPLQYIGPNQPRKPGLPGQPA

SEQ ID NO: 42079 - protein, 44 aa, Homo sapiens
  MAP TO AC011455.3; EXPRESSED IN ADULT LIVER, SIGNAL =   3; EXPRESSED IN BONE MARROW, SIGNAL = 3.1; EXPRESSED IN HEART, SIGNAL = 3.2; EXPRESSED IN LUNG, SIGNAL = 3.7; EXPRESSED IN BRAIN, SIGNAL = 3.8; EXPRESSED IN PLACENTA, SIGNAL = 3.4; EXPRESSED IN FETAL LIVER, SIGNAL = 3.5; EXPRESSED IN HELA, SIGNAL = 3.5; EST_HUMAN HIT: BE905396.1, EVALUE 4.00e-19; SWISSPROT HIT: P70178, EVALUE 9.50e-01
TAQCSCPLPSSPTSALIGSQPLPTCLSSTSAPTSPGSLGCLASL

SEQ ID NO: 42080 - protein, 28 aa, Homo sapiens
  MAP TO AC018790.3; EXPRESSED IN PLACENTA, SIGNAL = 2.6; EXPRESSED IN BONE MARROW, SIGNAL = 3.7; EXPRESSED IN ADULT LIVER, SIGNAL = 3.7; EXPRESSED IN LUNG, SIGNAL = 2.9; EXPRESSED IN BRAIN, SIGNAL = 2.6; EXPRESSED IN HEART, SIGNAL = 4.1; EXPRESSED IN HELA, SIGNAL =   5; EXPRESSED IN FETAL LIVER, SIGNAL = 4.6
CHQVTSPKSRLTSVAASTPTQLRRHKAA

SEQ ID NO: 42081 - protein, 69 aa, Homo sapiens
  MAP TO AC025488.1; EXPRESSED IN BRAIN, SIGNAL = 2.6; EXPRESSED IN HELA, SIGNAL = 2.1; EXPRESSED IN PLACENTA, SIGNAL = 2.4; EXPRESSED IN LUNG, SIGNAL = 4.6; EXPRESSED IN HEART, SIGNAL =   2; EXPRESSED IN FETAL LIVER, SIGNAL = 6.3; EXPRESSED IN BONE MARROW, SIGNAL = 2.4; EXPRESSED IN ADULT LIVER, SIGNAL =  25; EST_HUMAN HIT: AA987868.1, EVALUE 4.00e-35; SWISSPROT HIT: P36537, EVALUE 4.00e-36
DQPVKPLDRAVFWIEFVMRHKGAKHLRVAARDLTWFQYHSLDVIGFLLACVATVTFIITKCCLFCFWKF

SEQ ID NO: 42082 - protein, 67 aa, Homo sapiens
  MAP TO AC025488.1; EXPRESSED IN BRAIN, SIGNAL = 2.6; EXPRESSED IN HELA, SIGNAL = 2.1; EXPRESSED IN PLACENTA, SIGNAL = 2.4; EXPRESSED IN LUNG, SIGNAL = 4.6; EXPRESSED IN HEART, SIGNAL =   2; EXPRESSED IN FETAL LIVER, SIGNAL = 6.3; EXPRESSED IN BONE MARROW, SIGNAL = 2.4; EXPRESSED IN ADULT LIVER, SIGNAL =  25; SWISSPROT HIT: P00544, EVALUE 3.40e+00; EST_HUMAN HIT: T67857.1, EVALUE 7.00e-32
NFQKQNRQHFVMINVTVATQASRNPITSKEWYWNQVRSRAATRRCLAPLWRMTNSIQKTARSRGFTG

SEQ ID NO: 42083 - protein, 58 aa, Homo sapiens
  MAP TO AP001224.1; EXPRESSED IN PLACENTA, SIGNAL = 1.4; EXPRESSED IN BONE MARROW, SIGNAL = 1.7; EXPRESSED IN HELA, SIGNAL = 1.8; EXPRESSED IN HEART, SIGNAL = 1.7; EXPRESSED IN LUNG, SIGNAL = 2.3; EXPRESSED IN ADULT LIVER, SIGNAL = 1.6; EXPRESSED IN BRAIN, SIGNAL = 1.6; EXPRESSED IN FETAL LIVER, SIGNAL = 1.7; SWISSPROT HIT: P90917, EVALUE 3.10e-01; EST_HUMAN HIT: AW876909.1, EVALUE 8.10e+00
MGSLRRPILLGAGKDGVVVHWDSHTKMDMAGQLKLQKLIFIFLVAGNCKIKVQQGSLS

SEQ ID NO: 42084 - protein, 38 aa, Homo sapiens
  MAP TO AL133467.1; EXPRESSED IN BRAIN, SIGNAL = 3.4; EXPRESSED IN PLACENTA, SIGNAL =   3; EXPRESSED IN BONE MARROW, SIGNAL = 4.5; EXPRESSED IN LUNG, SIGNAL = 4.3; EXPRESSED IN ADULT LIVER, SIGNAL = 4.4; EXPRESSED IN FETAL LIVER, SIGNAL = 4.3; EXPRESSED IN HELA, SIGNAL = 3.6; EXPRESSED IN HEART, SIGNAL = 2.3; SWISSPROT HIT: P02463, EVALUE 2.20e+00; EST_HUMAN HIT: BE974000.1, EVALUE 5.60e+00
RGSPSQAPSPGDVEAGHPLAGRIPDHKQGGAVQGLEGW

SEQ ID NO: 42085 - protein, 71 aa, Homo sapiens
  MAP TO AC023154.3; EXPRESSED IN BRAIN, SIGNAL = 2.9; EXPRESSED IN PLACENTA, SIGNAL = 2.7; EXPRESSED IN ADULT LIVER, SIGNAL = 2.8; EXPRESSED IN BONE MARROW, SIGNAL = 2.2; EXPRESSED IN FETAL LIVER, SIGNAL = 3.2; EXPRESSED IN HELA, SIGNAL = 3.4; EXPRESSED IN HEART, SIGNAL = 2.9; EXPRESSED IN LUNG, SIGNAL = 2.5; EST_HUMAN HIT: AI818341.1, EVALUE 2.40e+00; SWISSPROT HIT: O66647, EVALUE 9.50e+00
DLYQMSIVFLLVNQGAVNVLCLLLHLHPNSGYEEILPAHLSSKAFHHLTTGLAQLLKPASREEKDDHKPNF

SEQ ID NO: 42086 - protein, 25 aa, Homo sapiens
  MAP TO AL121955.4; EXPRESSED IN FETAL LIVER, SIGNAL = 1.7; EXPRESSED IN HELA, SIGNAL = 1.9; EXPRESSED IN BONE MARROW, SIGNAL = 2.2; EXPRESSED IN HEART, SIGNAL = 1.8; EXPRESSED IN PLACENTA, SIGNAL = 1.4
KKTMLLSLQFKIFVMIITTTSSTGS

SEQ ID NO: 42087 - protein, 37 aa, Homo sapiens
  MAP TO AL133375.3; EXPRESSED IN BRAIN, SIGNAL = 3.3; EXPRESSED IN PLACENTA, SIGNAL = 9.6; EXPRESSED IN BONE MARROW, SIGNAL = 2.5; EXPRESSED IN HELA, SIGNAL = 3.6; EXPRESSED IN LUNG, SIGNAL = 2.8; EXPRESSED IN FETAL LIVER, SIGNAL = 3.4; EXPRESSED IN HEART, SIGNAL = 4.5; EXPRESSED IN ADULT LIVER, SIGNAL = 3.8
MEVAVLKKLQGSGLGQGDGKEEMMKPGAKRGDKIRSW

SEQ ID NO: 42088 - protein, 39 aa, Homo sapiens
  MAP TO AC016910.2; EXPRESSED IN PLACENTA, SIGNAL = 2.2; EXPRESSED IN BONE MARROW, SIGNAL = 2.3; EXPRESSED IN HEART, SIGNAL =   3; EXPRESSED IN BRAIN, SIGNAL =   5; EXPRESSED IN LUNG, SIGNAL = 2.1; EXPRESSED IN HELA, SIGNAL = 3.1; EXPRESSED IN FETAL LIVER, SIGNAL = 3.8; EXPRESSED IN ADULT LIVER, SIGNAL = 2.8
VIPIKLRLFVSYDFNTWPPLLLLKEKKDYEKSHSFLASP

SEQ ID NO: 42089 - protein, 121 aa, Homo sapiens
  MAP TO AP001206.1; EXPRESSED IN ADULT LIVER, SIGNAL = 4.7; EXPRESSED IN BONE MARROW, SIGNAL = 3.3; EXPRESSED IN HEART, SIGNAL = 3.5; EXPRESSED IN LUNG, SIGNAL =   3; EXPRESSED IN PLACENTA, SIGNAL = 4.3; EXPRESSED IN BRAIN, SIGNAL = 4.2; EXPRESSED IN HELA, SIGNAL = 4.1; EXPRESSED IN FETAL LIVER, SIGNAL = 4.2; EST_HUMAN HIT: AW900149.1, EVALUE 2.00e-03
LQENKSVLFEASKFVVICYSSNRKLIQLPLILQLPFHADLTSTQLCSSLTTYTLYSNEGFGSTQSSSILKDLSWGLEASRQQNLCAMRTRNDCKQWDRMCRNNLEFRTVVGATEKDFGIIS

SEQ ID NO: 42090 - protein, 46 aa, Homo sapiens
  MAP TO AC023314.3; EXPRESSED IN BRAIN, SIGNAL = 1.8; EXPRESSED IN PLACENTA, SIGNAL = 1.4; EXPRESSED IN ADULT LIVER, SIGNAL = 1.8; EXPRESSED IN BONE MARROW, SIGNAL = 1.8; EXPRESSED IN HELA, SIGNAL = 1.9; EXPRESSED IN FETAL LIVER, SIGNAL = 1.9; EXPRESSED IN HEART, SIGNAL = 1.8; SWISSPROT HIT: P32319, EVALUE 6.00e-04
IKGIFLANKKVDDQVKTYITYNKGRDWRLLQAPDVDLRGSPVHCLL

SEQ ID NO: 42091 - protein, 43 aa, Homo sapiens
  MAP TO AL117356.3; EXPRESSED IN BRAIN, SIGNAL = 1.5; EXPRESSED IN ADULT LIVER, SIGNAL = 1.8; EXPRESSED IN HEART, SIGNAL = 1.8; SWISSPROT HIT: P02790, EVALUE 4.80e+00; EST_HUMAN HIT: AA639340.1, EVALUE 3.60e-01
TSLGCTLSHGNSSRQWWWTLLSGCVKMHSSPTAGGSAVAASGF

SEQ ID NO: 42092 - protein, 25 aa, Homo sapiens
  MAP TO AL121975.3; EXPRESSED IN ADULT LIVER, SIGNAL = 2.1; EXPRESSED IN BONE MARROW, SIGNAL = 1.8; EXPRESSED IN HEART, SIGNAL = 2.1; EXPRESSED IN LUNG, SIGNAL = 2.2; EXPRESSED IN PLACENTA, SIGNAL = 1.9; EXPRESSED IN BRAIN, SIGNAL = 2.2; EXPRESSED IN FETAL LIVER, SIGNAL = 2.2; EXPRESSED IN HELA, SIGNAL = 2.4
IQKGCCWQCLYSMWHQMKSPEVLSW

SEQ ID NO: 42093 - protein, 35 aa, Homo sapiens
  MAP TO AC012087.10; EXPRESSED IN HELA, SIGNAL = 4.7; EXPRESSED IN HEART, SIGNAL = 4.2; EXPRESSED IN BRAIN, SIGNAL = 4.9; EXPRESSED IN BONE MARROW, SIGNAL = 3.5; EXPRESSED IN LUNG, SIGNAL = 4.9; EXPRESSED IN ADULT LIVER, SIGNAL = 4.4; EXPRESSED IN PLACENTA, SIGNAL =   4; EXPRESSED IN FETAL LIVER, SIGNAL = 4.5; EST_HUMAN HIT: BF345600.1, EVALUE 1.00e-13
KGGSDPTFSDSKQATEGSLGKVIPPMARTDPLTTP

SEQ ID NO: 42094 - protein, 28 aa, Homo sapiens
  MAP TO AL133388.2; EXPRESSED IN PLACENTA, SIGNAL = 2.4; EXPRESSED IN BRAIN, SIGNAL = 1.9; EXPRESSED IN HELA, SIGNAL = 2.6; EXPRESSED IN HEART, SIGNAL = 2.3; EXPRESSED IN BONE MARROW, SIGNAL = 1.8; EXPRESSED IN FETAL LIVER, SIGNAL =   3; EXPRESSED IN ADULT LIVER, SIGNAL = 2.2; SWISSPROT HIT: P55067, EVALUE 8.60e+00
MVPDKTAVPNIAKIPVSPCVTTEYIDMH

SEQ ID NO: 42095 - protein, 19 aa, Homo sapiens
  MAP TO AL133388.2; EXPRESSED IN PLACENTA, SIGNAL = 2.4; EXPRESSED IN BRAIN, SIGNAL = 1.9; EXPRESSED IN HELA, SIGNAL = 2.6; EXPRESSED IN HEART, SIGNAL = 2.3; EXPRESSED IN BONE MARROW, SIGNAL = 1.8; EXPRESSED IN FETAL LIVER, SIGNAL =   3; EXPRESSED IN ADULT LIVER, SIGNAL = 2.2
WSQTKQLFPTLLKFQCHLV

SEQ ID NO: 42096 - protein, 51 aa, Homo sapiens
  MAP TO AL121997.7; EXPRESSED IN PLACENTA, SIGNAL = 1.6; EXPRESSED IN BONE MARROW, SIGNAL = 2.9; EXPRESSED IN FETAL LIVER, SIGNAL =   2; EXPRESSED IN LUNG, SIGNAL = 2.9; EXPRESSED IN HEART, SIGNAL =   2; EXPRESSED IN BRAIN, SIGNAL =   2; EXPRESSED IN HELA, SIGNAL = 2.2; EXPRESSED IN ADULT LIVER, SIGNAL = 1.8; SWISSPROT HIT: Q99698, EVALUE 9.00e-14; EST_HUMAN HIT: AA702948.1, EVALUE 1.00e-12
TDVNRLCNAVVQRVEAREEEEEETHMATLGQYLVHGRGFLLLTKLNSIIDQ

SEQ ID NO: 42097 - protein, 44 aa, Homo sapiens
  MAP TO AL121997.7; EXPRESSED IN PLACENTA, SIGNAL = 1.6; EXPRESSED IN BONE MARROW, SIGNAL = 2.9; EXPRESSED IN FETAL LIVER, SIGNAL =   2; EXPRESSED IN LUNG, SIGNAL = 2.9; EXPRESSED IN HEART, SIGNAL =   2; EXPRESSED IN BRAIN, SIGNAL =   2; EXPRESSED IN HELA, SIGNAL = 2.2; EXPRESSED IN ADULT LIVER, SIGNAL = 1.8; EST_HUMAN HIT: H99579.1, EVALUE 1.00e-10
PMSTGFAMQWSRGWRPGRKKRRRRTWQPLDSTLSMVEDFYYLPS

SEQ ID NO: 42098 - protein, 62 aa, Homo sapiens
  MAP TO AC021881.2; EXPRESSED IN PLACENTA, SIGNAL =  12; EXPRESSED IN BRAIN, SIGNAL =   4; EXPRESSED IN FETAL LIVER, SIGNAL = 3.7; EXPRESSED IN HELA, SIGNAL = 4.4; EXPRESSED IN HEART, SIGNAL = 3.7; EXPRESSED IN LUNG, SIGNAL = 4.6; EXPRESSED IN BONE MARROW, SIGNAL = 3.1; EXPRESSED IN ADULT LIVER, SIGNAL = 3.9; SWISSPROT HIT: Q05594, EVALUE 4.50e+00; EST_HUMAN HIT: AU159465.1, EVALUE 1.40e-01
TEVPIFLLAVSQGLLSVSLDHLLTKSPSITQQQHAKSSLCLKFELLFCHQPQKTLGVFKGSH

SEQ ID NO: 42099 - protein, 18 aa, Homo sapiens
  MAP TO AC021881.2; EXPRESSED IN PLACENTA, SIGNAL =  12; EXPRESSED IN BRAIN, SIGNAL =   4; EXPRESSED IN FETAL LIVER, SIGNAL = 3.7; EXPRESSED IN HELA, SIGNAL = 4.4; EXPRESSED IN HEART, SIGNAL = 3.7; EXPRESSED IN LUNG, SIGNAL = 4.6; EXPRESSED IN BONE MARROW, SIGNAL = 3.1; EXPRESSED IN ADULT LIVER, SIGNAL = 3.9; EST_HUMAN HIT: AI683673.1, EVALUE 6.30e+00
LKSPFSCWLSARDFSQFL

SEQ ID NO: 42100 - protein, 50 aa, Homo sapiens
  MAP TO AL078590.27; EXPRESSED IN ADULT LIVER, SIGNAL = 2.4; EXPRESSED IN HELA, SIGNAL = 2.8; EXPRESSED IN HEART, SIGNAL = 2.3; EXPRESSED IN BRAIN, SIGNAL = 2.2; EXPRESSED IN PLACENTA, SIGNAL = 1.9; EXPRESSED IN BONE MARROW, SIGNAL = 1.7; EXPRESSED IN FETAL LIVER, SIGNAL = 2.7; EXPRESSED IN LUNG, SIGNAL =   2; SWISSPROT HIT: P48372, EVALUE 1.60e+00
KLQAMKGTAVAPQKWEFVLNVILHKPKATSATERSVLTLWDENADQSLGD

SEQ ID NO: 42101 - protein, 79 aa, Homo sapiens
  MAP TO AF223391.1; EXPRESSED IN PLACENTA, SIGNAL = 2.2; EXPRESSED IN FETAL LIVER, SIGNAL = 3.1; EXPRESSED IN HELA, SIGNAL = 4.1; EXPRESSED IN HEART, SIGNAL = 2.6; EXPRESSED IN BRAIN, SIGNAL = 2.6; EXPRESSED IN LUNG, SIGNAL = 2.5; EXPRESSED IN BONE MARROW, SIGNAL = 2.1; EXPRESSED IN ADULT LIVER, SIGNAL = 2.9
SCFKNTKKRKHNTILFSCVFGLSLSCQCCLGHGSGLQKHLEDNAHRQNFPAPTCFLPHPTLPFFFCFCLPNCMWSIHCF

SEQ ID NO: 42102 - protein, 99 aa, Homo sapiens
  MAP TO AC016025.11; EXPRESSED IN PLACENTA, SIGNAL = 3.2; EXPRESSED IN BRAIN, SIGNAL = 8.7; EXPRESSED IN FETAL LIVER, SIGNAL = 5.2; EXPRESSED IN HELA, SIGNAL = 5.1; EXPRESSED IN ADULT LIVER, SIGNAL = 3.9; EXPRESSED IN LUNG, SIGNAL = 5.6; EXPRESSED IN HEART, SIGNAL =   4; EXPRESSED IN BONE MARROW, SIGNAL = 4.1; EST_HUMAN HIT: BE897953.1, EVALUE 3.00e-22; SWISSPROT HIT: P12957, EVALUE 4.20e-01
LDEEEVKAATTEPTEVEEVVPALEPTETLLSEKEINAREESLVEELSPASEKKPVPPSEGKSRLSPAGEMKPMPLSEGKSILLFGGAAAVAILAVAIGV

SEQ ID NO: 42103 - protein, 78 aa, Homo sapiens
  MAP TO AC009144.4; EXPRESSED IN BRAIN, SIGNAL = 1.9; EXPRESSED IN PLACENTA, SIGNAL = 2.2; EXPRESSED IN HELA, SIGNAL = 1.9; EXPRESSED IN LUNG, SIGNAL =   6; EXPRESSED IN ADULT LIVER, SIGNAL = 1.7; EXPRESSED IN BONE MARROW, SIGNAL = 1.6; EXPRESSED IN FETAL LIVER, SIGNAL =   2; EXPRESSED IN HEART, SIGNAL =   2; EST_HUMAN HIT: AW375057.1, EVALUE 3.00e-41; SWISSPROT HIT: P36928, EVALUE 4.90e+00
MVAPVAHTHFNARVTCEAAMSPRRLLFAVGCAVFRAVIFQQLLPTFCIFVQEGPRVQLPQASHRATGLHPWGFGGCSV

SEQ ID NO: 42104 - protein, 39 aa, Homo sapiens
  MAP TO AC009144.4; EXPRESSED IN BRAIN, SIGNAL = 1.9; EXPRESSED IN PLACENTA, SIGNAL = 2.2; EXPRESSED IN HELA, SIGNAL = 1.9; EXPRESSED IN LUNG, SIGNAL =   6; EXPRESSED IN ADULT LIVER, SIGNAL = 1.7; EXPRESSED IN BONE MARROW, SIGNAL = 1.6; EXPRESSED IN FETAL LIVER, SIGNAL =   2; EXPRESSED IN HEART, SIGNAL =   2; EST_HUMAN HIT: AW375057.1, EVALUE 2.00e-19
LTEQPPKPQGWSPVALWLAWGSWTRGPSWTKMQNVGRSC

SEQ ID NO: 42105 - protein, 25 aa, Homo sapiens
  MAP TO AL158841.1; EXPRESSED IN BRAIN, SIGNAL = 1.3; EXPRESSED IN HELA, SIGNAL = 1.7; EXPRESSED IN ADULT LIVER, SIGNAL = 1.7; EXPRESSED IN FETAL LIVER, SIGNAL = 1.6; EXPRESSED IN HEART, SIGNAL = 1.8
RVLKILQTWKSLRKYKSPKILLRRD

SEQ ID NO: 42106 - protein, 68 aa, Homo sapiens
  MAP TO AC008458.3; EXPRESSED IN ADULT LIVER, SIGNAL = 1.9; EXPRESSED IN FETAL LIVER, SIGNAL = 1.8; EXPRESSED IN PLACENTA, SIGNAL = 2.2; EXPRESSED IN BONE MARROW, SIGNAL = 1.7; EXPRESSED IN LUNG, SIGNAL = 2.5; EXPRESSED IN BRAIN, SIGNAL = 1.9; EXPRESSED IN HEART, SIGNAL = 1.7; EXPRESSED IN HELA, SIGNAL =   2; EST_HUMAN HIT: BE280479.1, EVALUE 2.00e-24; SWISSPROT HIT: Q60396, EVALUE 5.10e-01
LSANTAAFAKSAAMLGNSEDHTALSRALSQLAEVEEKIDQLHQEQAFADFYMFSELLSDYIRLIAAVK

SEQ ID NO: 42107 - protein, 41 aa, Homo sapiens
  MAP TO AC008649.3; EXPRESSED IN FETAL LIVER, SIGNAL = 3.4; EXPRESSED IN HELA, SIGNAL = 2.7; EXPRESSED IN ADULT LIVER, SIGNAL = 1.6; EXPRESSED IN BRAIN, SIGNAL = 3.7; EXPRESSED IN PLACENTA, SIGNAL = 1.9; EXPRESSED IN LUNG, SIGNAL = 9.8; EXPRESSED IN HEART, SIGNAL = 7.5; EXPRESSED IN BONE MARROW, SIGNAL =   6; EST_HUMAN HIT: BE562530.1, EVALUE 1.00e-17
SQLKVWMSKYGWSADESGQIFICSQEESIKPKNIVEKIDFD

SEQ ID NO: 42108 - protein, 47 aa, Homo sapiens
  MAP TO AC011298.2; EXPRESSED IN BRAIN, SIGNAL = 3.3; EXPRESSED IN HELA, SIGNAL = 1.8; EXPRESSED IN ADULT LIVER, SIGNAL = 1.8; EXPRESSED IN FETAL LIVER, SIGNAL = 1.6; EXPRESSED IN BONE MARROW, SIGNAL = 3.8; EXPRESSED IN HEART, SIGNAL = 1.7; EXPRESSED IN LUNG, SIGNAL = 4.3; EXPRESSED IN PLACENTA, SIGNAL = 1.9; EST_HUMAN HIT: BF376765.1, EVALUE 4.00e-10; SWISSPROT HIT: Q12756, EVALUE 3.00e-11
SSEKAALDGPLDAALDHLRLGNTFTFRVTVLQASSISAEYADIFCQF

SEQ ID NO: 42109 - protein, 41 aa, Homo sapiens
  MAP TO AC015755.4; EXPRESSED IN BRAIN, SIGNAL = 3.7; EXPRESSED IN HELA, SIGNAL = 3.9; EXPRESSED IN ADULT LIVER, SIGNAL = 4.1; EXPRESSED IN BONE MARROW, SIGNAL = 3.1; EXPRESSED IN FETAL LIVER, SIGNAL = 3.8; EXPRESSED IN HEART, SIGNAL = 4.4; EXPRESSED IN LUNG, SIGNAL = 4.3; EXPRESSED IN PLACENTA, SIGNAL = 2.9
VIADIHNISHFSIFINNNIINAAQRLTAGTFIGAKTTSSHQ

SEQ ID NO: 42110 - protein, 25 aa, Homo sapiens
  MAP TO AC015755.4; EXPRESSED IN BRAIN, SIGNAL = 3.7; EXPRESSED IN HELA, SIGNAL = 3.9; EXPRESSED IN ADULT LIVER, SIGNAL = 4.1; EXPRESSED IN BONE MARROW, SIGNAL = 3.1; EXPRESSED IN FETAL LIVER, SIGNAL = 3.8; EXPRESSED IN HEART, SIGNAL = 4.4; EXPRESSED IN LUNG, SIGNAL = 4.3; EXPRESSED IN PLACENTA, SIGNAL = 2.9
SLLTFITSATFQSLSTTTLSMLHRD

SEQ ID NO: 42111 - protein, 66 aa, Homo sapiens
  MAP TO AC010358.5; EXPRESSED IN ADULT LIVER, SIGNAL = 3.9; EXPRESSED IN FETAL LIVER, SIGNAL = 3.8; EXPRESSED IN PLACENTA, SIGNAL = 3.2; EXPRESSED IN BRAIN, SIGNAL = 3.4; EXPRESSED IN HELA, SIGNAL = 4.5; EXPRESSED IN BONE MARROW, SIGNAL = 2.6; EXPRESSED IN HEART, SIGNAL = 3.8; EXPRESSED IN LUNG, SIGNAL = 4.9; SWISSPROT HIT: P97479, EVALUE 1.00e-12; EST_HUMAN HIT: AW772260.1, EVALUE 2.00e-31
LCLQTYIGSILASVNPYQPIAGLYEPATMEQYSRRHLGELPPHIFAIANECYRCLWKRHDNQCILI

SEQ ID NO: 42112 - protein, 26 aa, Homo sapiens
  MAP TO AP001329.1; EXPRESSED IN FETAL LIVER, SIGNAL = 2.1; EXPRESSED IN HEART, SIGNAL = 1.8; EXPRESSED IN PLACENTA, SIGNAL = 1.8; EXPRESSED IN BRAIN, SIGNAL = 1.6; EXPRESSED IN HELA, SIGNAL = 1.8
MQHEAASADGEAAASYAEDLAKIIDE

SEQ ID NO: 42113 - protein, 52 aa, Homo sapiens
  MAP TO AC022324.2; EXPRESSED IN PLACENTA, SIGNAL = 3.3; EXPRESSED IN BRAIN, SIGNAL = 4.1; EXPRESSED IN BONE MARROW, SIGNAL = 3.3; EXPRESSED IN HELA, SIGNAL = 3.9; EXPRESSED IN LUNG, SIGNAL = 4.1; EXPRESSED IN ADULT LIVER, SIGNAL = 3.8; EXPRESSED IN FETAL LIVER, SIGNAL = 4.1; EXPRESSED IN HEART, SIGNAL = 3.7; EST_HUMAN HIT: BF382499.1, EVALUE 2.20e+00; SWISSPROT HIT: O50439, EVALUE 4.70e+00
FDNQDRIRHEDVLMPRVCRKGNLALGTIDERPTLFGGMAWWSASPWVPAGPG

SEQ ID NO: 42114 - protein, 117 aa, Homo sapiens
  MAP TO AC007845.12; EXPRESSED IN ADULT LIVER, SIGNAL = 1.4; EXPRESSED IN FETAL LIVER, SIGNAL = 1.7; EXPRESSED IN HEART, SIGNAL = 1.8; EXPRESSED IN PLACENTA, SIGNAL = 1.3; EXPRESSED IN BRAIN, SIGNAL = 2.1; EXPRESSED IN LUNG, SIGNAL = 1.7; EST_HUMAN HIT: AW500988.1, EVALUE 9.00e-14; SWISSPROT HIT: O42184, EVALUE 4.50e+00
PCLLSARELELEDRQSRLQQELRERMAVEGEWGKAPMEARVGATSRPLTSCLLLLQDHLKTEEELSEEKQILNEMLEVVEQRDSLVALLEEQRLREREEDKDLEAAMLSKGFSLNWS

SEQ ID NO: 42115 - protein, 130 aa, Homo sapiens
  MAP TO AC005323.1; EXPRESSED IN BONE MARROW, SIGNAL = 4.2; EXPRESSED IN HEART, SIGNAL =  89; SWISSPROT HIT: gi127772, EVALUE 3.00e-33; EST_HUMAN HIT: AA195800.1, EVALUE 3.00e-33
ARIEELEEEIEAERASRAKAEKQRSDLSRELEEISERLEEAGGATSAQIEMNKKREAEFQKMRRDLEEATLQHEATAATLRKKHADSVAELGEQIDNLQRVKQKLEKEKSEMKMEIDDLASNMETVSKAK

SEQ ID NO: 42116 - protein, 50 aa, Homo sapiens
  MAP TO AC005323.1; EXPRESSED IN BONE MARROW, SIGNAL = 4.2; EXPRESSED IN HEART, SIGNAL =  89; SWISSPROT HIT: P54258, EVALUE 1.40e-01; EST_HUMAN HIT: F00884.1, EVALUE 1.00e-16
PALRSWRRKSRQSGPPGPKQRSSALISPGSWRRSARGWKKPVGPPQPRLR

SEQ ID NO: 42117 - protein, 27 aa, Homo sapiens
  MAP TO AC023111.2; EXPRESSED IN BRAIN, SIGNAL = 9.1; EXPRESSED IN FETAL LIVER, SIGNAL = 8.7; EXPRESSED IN ADULT LIVER, SIGNAL = 9.7; EXPRESSED IN BONE MARROW, SIGNAL =   8; EXPRESSED IN HELA, SIGNAL = 8.8; EXPRESSED IN LUNG, SIGNAL =  16; EXPRESSED IN HEART, SIGNAL = 7.9; EXPRESSED IN PLACENTA, SIGNAL = 6.8
FDDFPDGSREDGSECGDSEKNYPIDIR

SEQ ID NO: 42118 - protein, 24 aa, Homo sapiens
  MAP TO AC023111.2; EXPRESSED IN BRAIN, SIGNAL = 9.1; EXPRESSED IN FETAL LIVER, SIGNAL = 8.7; EXPRESSED IN ADULT LIVER, SIGNAL = 9.7; EXPRESSED IN BONE MARROW, SIGNAL =   8; EXPRESSED IN HELA, SIGNAL = 8.8; EXPRESSED IN LUNG, SIGNAL =  16; EXPRESSED IN HEART, SIGNAL = 7.9; EXPRESSED IN PLACENTA, SIGNAL = 6.8
PLMTSQMVPEKMAVNVETLRRIIP

SEQ ID NO: 42119 - protein, 28 aa, Homo sapiens
  MAP TO AL157830.2; EXPRESSED IN FETAL LIVER, SIGNAL = 2.4; EXPRESSED IN HEART, SIGNAL = 2.1; EXPRESSED IN BRAIN, SIGNAL = 1.5; EXPRESSED IN PLACENTA, SIGNAL = 1.6; EXPRESSED IN BONE MARROW, SIGNAL = 1.5; EXPRESSED IN ADULT LIVER, SIGNAL = 1.7; EXPRESSED IN HELA, SIGNAL = 2.6; EST_HUMAN HIT: AA035369.1, EVALUE 2.00e-03
IQGLHVQDCYLDIFRDAEVLGMYDPILQ

SEQ ID NO: 42120 - protein, 27 aa, Homo sapiens
  MAP TO AL157830.2; EXPRESSED IN FETAL LIVER, SIGNAL = 2.4; EXPRESSED IN HEART, SIGNAL = 2.1; EXPRESSED IN BRAIN, SIGNAL = 1.5; EXPRESSED IN PLACENTA, SIGNAL = 1.6; EXPRESSED IN BONE MARROW, SIGNAL = 1.5; EXPRESSED IN ADULT LIVER, SIGNAL = 1.7; EXPRESSED IN HELA, SIGNAL = 2.6; EST_HUMAN HIT: AA035369.1, EVALUE 2.10e-02
FRVYMFRIVTWIYSVMLRFWGCMIPSS

SEQ ID NO: 42121 - protein, 28 aa, Homo sapiens
  MAP TO AC008583.4; EXPRESSED IN PLACENTA, SIGNAL = 1.9; EXPRESSED IN BRAIN, SIGNAL = 2.4; EXPRESSED IN BONE MARROW, SIGNAL = 1.8; EXPRESSED IN FETAL LIVER, SIGNAL = 2.2; EXPRESSED IN HELA, SIGNAL = 2.4; EXPRESSED IN HEART, SIGNAL = 2.6; EXPRESSED IN ADULT LIVER, SIGNAL = 2.6
MVKRAHPEAKVPVSKGGTEKDWQCGLGQ

SEQ ID NO: 42122 - protein, 27 aa, Homo sapiens
  MAP TO AC008583.4; EXPRESSED IN PLACENTA, SIGNAL = 1.9; EXPRESSED IN BRAIN, SIGNAL = 2.4; EXPRESSED IN BONE MARROW, SIGNAL = 1.8; EXPRESSED IN FETAL LIVER, SIGNAL = 2.2; EXPRESSED IN HELA, SIGNAL = 2.4; EXPRESSED IN HEART, SIGNAL = 2.6; EXPRESSED IN ADULT LIVER, SIGNAL = 2.6
WLRERILKLKCLFPKEALRKTGNVALG

SEQ ID NO: 42123 - protein, 32 aa, Homo sapiens
  MAP TO AC011449.3; EXPRESSED IN BONE MARROW, SIGNAL = 2.5; EXPRESSED IN FETAL LIVER, SIGNAL = 3.4; EXPRESSED IN BRAIN, SIGNAL = 3.1; EXPRESSED IN PLACENTA, SIGNAL = 3.1; EXPRESSED IN ADULT LIVER, SIGNAL = 3.7; EXPRESSED IN HELA, SIGNAL = 3.3; EXPRESSED IN HEART, SIGNAL = 3.2; EXPRESSED IN LUNG, SIGNAL = 3.3; EST_HUMAN HIT: BE393813.1, EVALUE 2.30e-01
MKQAMKELQLKLKGMEKEKRKLKEAEKASSQE

SEQ ID NO: 42124 - protein, 36 aa, Homo sapiens
  MAP TO AL157789.1; EXPRESSED IN BRAIN, SIGNAL = 2.7; EXPRESSED IN PLACENTA, SIGNAL = 2.8; EXPRESSED IN FETAL LIVER, SIGNAL = 3.1; EXPRESSED IN BONE MARROW, SIGNAL = 3.4; EXPRESSED IN HELA, SIGNAL =   3; EXPRESSED IN LUNG, SIGNAL = 4.3; EXPRESSED IN ADULT LIVER, SIGNAL = 2.8; EXPRESSED IN HEART, SIGNAL = 3.2; EST_HUMAN HIT: BE387371.1, EVALUE 7.40e+00
GSLGACDLHMGRSHICLLRFSMADSDQPARVARTNA

SEQ ID NO: 42125 - protein, 36 aa, Homo sapiens
  MAP TO AL157789.1; EXPRESSED IN BRAIN, SIGNAL = 2.7; EXPRESSED IN PLACENTA, SIGNAL = 2.8; EXPRESSED IN FETAL LIVER, SIGNAL = 3.1; EXPRESSED IN BONE MARROW, SIGNAL = 3.4; EXPRESSED IN HELA, SIGNAL =   3; EXPRESSED IN LUNG, SIGNAL = 4.3; EXPRESSED IN ADULT LIVER, SIGNAL = 2.8; EXPRESSED IN HEART, SIGNAL = 3.2; EST_HUMAN HIT: BE908115.1, EVALUE 1.50e+00; SWISSPROT HIT: P37680, EVALUE 6.40e+00
DPLVLVTFTWGGVIFVSYASPWLTVINRPGWPGPTL

SEQ ID NO: 42126 - protein, 99 aa, Homo sapiens
  MAP TO AC024007.2; EXPRESSED IN PLACENTA, SIGNAL = 2.3; EXPRESSED IN BRAIN, SIGNAL =   2; EXPRESSED IN HELA, SIGNAL = 2.2; EXPRESSED IN ADULT LIVER, SIGNAL = 1.6; EXPRESSED IN LUNG, SIGNAL = 1.8; EXPRESSED IN FETAL LIVER, SIGNAL = 1.9; EXPRESSED IN HEART, SIGNAL = 1.9; EST_HUMAN HIT: AW340174.1, EVALUE 2.00e-20; SWISSPROT HIT: P32542, EVALUE 5.20e+00
AVEVEVAPLTITPSDPLAKFLLPVPVTLRSGGLEVFVPGGEMPPPGDTMIPLNCKLRLPPGHFGLLLLLNQKAKKGITVFAGMTDPDYPYEISLLPYNG

SEQ ID NO: 42127 - protein, 65 aa, Homo sapiens
  MAP TO AC016886.3; EXPRESSED IN BRAIN, SIGNAL = 1.9; EXPRESSED IN PLACENTA, SIGNAL = 1.5; EXPRESSED IN BONE MARROW, SIGNAL = 1.7; EXPRESSED IN HELA, SIGNAL =   2; EXPRESSED IN ADULT LIVER, SIGNAL = 1.6; EXPRESSED IN FETAL LIVER, SIGNAL =   2; EXPRESSED IN HEART, SIGNAL =   2; EXPRESSED IN LUNG, SIGNAL = 1.8; EST_HUMAN HIT: AW975181.1, EVALUE 2.00e+00; SWISSPROT HIT: Q61137, EVALUE 6.80e-01
DPTPPALHQEPTMGPQQESTEEDAHCLHLNQRLFKVQKNLKRVCYTRNYYKKMAQNHYKKTWPRN

SEQ ID NO: 42128 - protein, 27 aa, Homo sapiens
  MAP TO AC016886.3; EXPRESSED IN BRAIN, SIGNAL = 1.9; EXPRESSED IN PLACENTA, SIGNAL = 1.5; EXPRESSED IN BONE MARROW, SIGNAL = 1.7; EXPRESSED IN HELA, SIGNAL =   2; EXPRESSED IN ADULT LIVER, SIGNAL = 1.6; EXPRESSED IN FETAL LIVER, SIGNAL =   2; EXPRESSED IN HEART, SIGNAL =   2; EXPRESSED IN LUNG, SIGNAL = 1.8
WGLSRSPRRRTPTACTSTRDFSRCKKI

SEQ ID NO: 42129 - protein, 29 aa, Homo sapiens
  MAP TO AC013290.3; EXPRESSED IN BRAIN, SIGNAL = 3.6; EXPRESSED IN PLACENTA, SIGNAL = 3.3; EXPRESSED IN BONE MARROW, SIGNAL = 2.5; EXPRESSED IN FETAL LIVER, SIGNAL = 3.5; EXPRESSED IN HELA, SIGNAL = 4.1; EXPRESSED IN ADULT LIVER, SIGNAL = 3.3; EXPRESSED IN HEART, SIGNAL = 3.4; EXPRESSED IN LUNG, SIGNAL = 3.6
NSRLITMFQERQRTKNTGLSIIKMMGPEI

SEQ ID NO: 42130 - protein, 39 aa, Homo sapiens
  MAP TO AC016025.11; EXPRESSED IN BRAIN, SIGNAL = 2.8; EXPRESSED IN ADULT LIVER, SIGNAL = 2.8; EXPRESSED IN HELA, SIGNAL = 2.8; EXPRESSED IN HEART, SIGNAL = 2.6; EXPRESSED IN PLACENTA, SIGNAL = 1.9; EXPRESSED IN LUNG, SIGNAL =  13; EXPRESSED IN FETAL LIVER, SIGNAL = 3.4; EXPRESSED IN BONE MARROW, SIGNAL = 3.7; EST_HUMAN HIT: AI479829.1, EVALUE 4.00e-08; SWISSPROT HIT: P55957, EVALUE 3.00e-09
DRNRDLATALEQLLQAYPRDMEKEKTMLVLALLLAKKVA

SEQ ID NO: 42131 - protein, 23 aa, Homo sapiens
  MAP TO AC016025.11; EXPRESSED IN BRAIN, SIGNAL = 2.8; EXPRESSED IN ADULT LIVER, SIGNAL = 2.8; EXPRESSED IN HELA, SIGNAL = 2.8; EXPRESSED IN HEART, SIGNAL = 2.6; EXPRESSED IN PLACENTA, SIGNAL = 1.9; EXPRESSED IN LUNG, SIGNAL =  13; EXPRESSED IN FETAL LIVER, SIGNAL = 3.4; EXPRESSED IN BONE MARROW, SIGNAL = 3.7
VPLCAGPEQGPGHCPGAAAAGLP

SEQ ID NO: 42132 - protein, 75 aa, Homo sapiens
  MAP TO AL121965.19; EXPRESSED IN PLACENTA, SIGNAL = 1.9; EXPRESSED IN BRAIN, SIGNAL = 1.8; EXPRESSED IN ADULT LIVER, SIGNAL =   2; EXPRESSED IN BONE MARROW, SIGNAL = 1.5; EXPRESSED IN HELA, SIGNAL = 1.8; EXPRESSED IN FETAL LIVER, SIGNAL = 1.7; EXPRESSED IN HEART, SIGNAL = 1.7; EST_HUMAN HIT: AW500519.1, EVALUE 2.00e-37; SWISSPROT HIT: P53327, EVALUE 3.00e-10
NAARIVRALFEIALRKRWPTMTYRLLNLSKVIDKRLWGWASPLRQFSILPPHILTRLEEKKLTVDKLKDMRKDEI

SEQ ID NO: 42133 - protein, 63 aa, Homo sapiens
  MAP TO AC011467.3; EXPRESSED IN BRAIN, SIGNAL = 3.9; EXPRESSED IN ADULT LIVER, SIGNAL = 2.1; EXPRESSED IN HELA, SIGNAL = 6.1; EXPRESSED IN BONE MARROW, SIGNAL =   2; EXPRESSED IN PLACENTA, SIGNAL =   3; EXPRESSED IN LUNG, SIGNAL = 3.3; EXPRESSED IN HEART, SIGNAL = 3.3; EXPRESSED IN FETAL LIVER, SIGNAL = 3.5; SWISSPROT HIT: O75593, EVALUE 4.50e+00; EST_HUMAN HIT: N66951.1, EVALUE 2.00e-19
AAPRQAKLGPNSSSASAPPPYNLFITSPPHSWSGLQLHSVTSPPPPAQQFTLKKVAGAKGIVK

SEQ ID NO: 42134 - protein, 67 aa, Homo sapiens
  MAP TO AC008417.3; EXPRESSED IN BONE MARROW, SIGNAL = 1.7; EXPRESSED IN FETAL LIVER, SIGNAL =   2; EXPRESSED IN BRAIN, SIGNAL = 1.8; EXPRESSED IN PLACENTA, SIGNAL = 1.6; EXPRESSED IN ADULT LIVER, SIGNAL = 1.7; EXPRESSED IN HELA, SIGNAL =   2; EXPRESSED IN HEART, SIGNAL = 1.9; EST_HUMAN HIT: AU121370.1, EVALUE 1.00e-31; SWISSPROT HIT: Q16706, EVALUE 1.00e-32
IPPLGLKVYKILESASSNSHLADYVLYKNKVEDSGIFTIKNMINTEEGITLENSFVLLRFDQTGLMK

SEQ ID NO: 42135 - protein, 48 aa, Homo sapiens
  MAP TO AC018388.4; EXPRESSED IN BRAIN, SIGNAL = 3.7; EXPRESSED IN HELA, SIGNAL =  10; EXPRESSED IN HEART, SIGNAL = 6.4; EXPRESSED IN PLACENTA, SIGNAL = 8.7; EXPRESSED IN FETAL LIVER, SIGNAL =  15; EXPRESSED IN BONE MARROW, SIGNAL =  19; EXPRESSED IN ADULT LIVER, SIGNAL = 2.2; EXPRESSED IN LUNG, SIGNAL =  17; EST_HUMAN HIT: BE296387.1, EVALUE 1.00e-06
AFLRLGSGFGGAGLADNLMDLLCDSSFTLALSPLASPSAFLLGMVAAG

SEQ ID NO: 42136 - protein, 98 aa, Homo sapiens
  MAP TO AC022325.3; EXPRESSED IN PLACENTA, SIGNAL = 3.1; EXPRESSED IN BRAIN, SIGNAL = 4.8; EXPRESSED IN HELA, SIGNAL = 4.7; EXPRESSED IN ADULT LIVER, SIGNAL = 4.5; EXPRESSED IN BONE MARROW, SIGNAL = 3.4; EXPRESSED IN FETAL LIVER, SIGNAL = 3.9; EXPRESSED IN HEART, SIGNAL = 3.9; EXPRESSED IN LUNG, SIGNAL =   4; EST_HUMAN HIT: AI951624.1, EVALUE 1.00e-09; SWISSPROT HIT: O13798, EVALUE 5.80e-01
PNFYQKQVIARQIYLQNTLIPTIFGLITHTKFSKNHCPYRPSYIGFAGTSHKESVFTFKGLSSPAKDSPTTADTCMKWVNPSLLEDLKKVEVPGPVRK

SEQ ID NO: 42137 - protein, 36 aa, Homo sapiens
  MAP TO AL160006.1; EXPRESSED IN PLACENTA, SIGNAL =   5; EXPRESSED IN FETAL LIVER, SIGNAL = 6.1; EXPRESSED IN HELA, SIGNAL = 6.9; EXPRESSED IN HEART, SIGNAL = 5.6; EXPRESSED IN BRAIN, SIGNAL = 4.1; EXPRESSED IN LUNG, SIGNAL = 3.8; EXPRESSED IN BONE MARROW, SIGNAL = 4.5; EXPRESSED IN ADULT LIVER, SIGNAL = 5.8; SWISSPROT HIT: P75215, EVALUE 8.40e+00
LQENQFCQPQEFGRQFLPCQASRGEHNPVNIFTAAA

SEQ ID NO: 42138 - protein, 42 aa, Homo sapiens; identical to SEQ ID NO: 40729
  MAP TO AP001331.1; EXPRESSED IN BRAIN, SIGNAL = 2.2; EXPRESSED IN PLACENTA, SIGNAL = 1.9; EXPRESSED IN BONE MARROW, SIGNAL = 2.4; EXPRESSED IN HELA, SIGNAL = 2.8; EXPRESSED IN LUNG, SIGNAL = 3.9; EXPRESSED IN ADULT LIVER, SIGNAL = 2.7; EXPRESSED IN HEART, SIGNAL = 2.2; EXPRESSED IN FETAL LIVER, SIGNAL = 2.8; EST_HUMAN HIT: BF700473.1, EVALUE 7.00e-17; SWISSPROT HIT: Q64252, EVALUE 6.00e-18

SEQ ID NO: 42139 - protein, 42 aa, Homo sapiens
  MAP TO AC018720.2; EXPRESSED IN BRAIN, SIGNAL = 2.3; EXPRESSED IN FETAL LIVER, SIGNAL = 2.3; EXPRESSED IN HELA, SIGNAL = 2.3; EXPRESSED IN HEART, SIGNAL =   2; EXPRESSED IN PLACENTA, SIGNAL =   2; EXPRESSED IN LUNG, SIGNAL = 4.4; EXPRESSED IN BONE MARROW, SIGNAL = 2.1; EXPRESSED IN ADULT LIVER, SIGNAL = 1.8; EST_HUMAN HIT: AW134709.1, EVALUE 3.00e-18; SWISSPROT HIT: Q99676, EVALUE 8.00e-11
GPVSFKDVAVDFTQEEWRQLDPDEKITYGDVMLENYSHLVSL

SEQ ID NO: 42140 - protein, 25 aa, Homo sapiens
  MAP TO AC018720.2; EXPRESSED IN BRAIN, SIGNAL = 2.3; EXPRESSED IN FETAL LIVER, SIGNAL = 2.3; EXPRESSED IN HELA, SIGNAL = 2.3; EXPRESSED IN HEART, SIGNAL =   2; EXPRESSED IN PLACENTA, SIGNAL =   2; EXPRESSED IN LUNG, SIGNAL = 4.4; EXPRESSED IN BONE MARROW, SIGNAL = 2.1; EXPRESSED IN ADULT LIVER, SIGNAL = 1.8; EST_HUMAN HIT: AW390296.1, EVALUE 1.00e-09
GQCHSKMWLWISPRRSGGNWTLMRR

SEQ ID NO: 42141 - protein, 108 aa, Homo sapiens
  MAP TO AC007686.5; EXPRESSED IN BRAIN, SIGNAL = 6.2; EXPRESSED IN ADULT LIVER, SIGNAL = 5.6; EXPRESSED IN HELA, SIGNAL =  18; EXPRESSED IN BONE MARROW, SIGNAL =  13; EXPRESSED IN PLACENTA, SIGNAL =  10; EXPRESSED IN LUNG, SIGNAL =  39; EXPRESSED IN HEART, SIGNAL =  19; EXPRESSED IN FETAL LIVER, SIGNAL =  15; SWISSPROT HIT: P19944, EVALUE 3.00e-24; EST_HUMAN HIT: AA379861.1, EVALUE 2.00e-22
MASISELACIYSALILHDNEVTVTEYKIKALIKAAGVNVEPFRPGLFAKAPANVNIRSLICNVGAGGPAPAAGAAPAGGDPPASTSLSAGIIGMSHRGQPRMRILSPF

SEQ ID NO: 42142 - protein, 44 aa, Homo sapiens
  MAP TO AC010582.6; EXPRESSED IN BRAIN, SIGNAL = 1.6; EXPRESSED IN PLACENTA, SIGNAL = 3.6; EXPRESSED IN HELA, SIGNAL = 2.2; EXPRESSED IN BONE MARROW, SIGNAL = 1.5; EXPRESSED IN FETAL LIVER, SIGNAL = 1.9; EXPRESSED IN HEART, SIGNAL = 1.7; SWISSPROT HIT: P34972, EVALUE 8.20e+00; EST_HUMAN HIT: AA148887.1, EVALUE 2.00e-07
LCKRSILLCKLLCHWGHMIQPIQYCLKSQWQTGMLMESLEGSCR

SEQ ID NO: 42143 - protein, 70 aa, Homo sapiens
  MAP TO AL136980.2; EXPRESSED IN ADULT LIVER, SIGNAL = 3.2; EXPRESSED IN BONE MARROW, SIGNAL = 2.6; EXPRESSED IN LUNG, SIGNAL = 2.7; EXPRESSED IN HEART, SIGNAL = 3.2; EXPRESSED IN PLACENTA, SIGNAL = 2.6; EXPRESSED IN BRAIN, SIGNAL = 2.8; EXPRESSED IN HELA, SIGNAL = 3.8; EXPRESSED IN FETAL LIVER, SIGNAL = 3.6; EST_HUMAN HIT: AI367140.1, EVALUE 9.00e-34; SWISSPROT HIT: Q09216, EVALUE 8.00e-04
DNILAVLKHLATSDMLAAASKYRHGNMVFFDVLGLFVIAYPSRIGSIINYMVVMGVVLYLGKKFLQPKHK

SEQ ID NO: 42144 - protein, 75 aa, Homo sapiens
  MAP TO AC018843.2; EXPRESSED IN FETAL LIVER, SIGNAL =   4; EXPRESSED IN HEART, SIGNAL = 5.1; EXPRESSED IN BRAIN, SIGNAL = 3.9; EXPRESSED IN PLACENTA, SIGNAL = 3.3; EXPRESSED IN ADULT LIVER, SIGNAL = 3.7; EXPRESSED IN BONE MARROW, SIGNAL =   3; EXPRESSED IN HELA, SIGNAL = 4.5; EXPRESSED IN LUNG, SIGNAL = 2.9; EST_HUMAN HIT: AU118049.1, EVALUE 5.00e-24; SWISSPROT HIT: P27864, EVALUE 1.10e+00
VKAGSVKQEFEKQDELKRSAMRAVAALLTIPEVGKSPIMADFSSQIRSNPELAALFESIQKDSASAPSTDSMELS

SEQ ID NO: 42145 - protein, 36 aa, Homo sapiens
  MAP TO AC018552.2; EXPRESSED IN BRAIN, SIGNAL = 2.7; EXPRESSED IN PLACENTA, SIGNAL = 2.3; EXPRESSED IN HELA, SIGNAL = 2.8; EXPRESSED IN ADULT LIVER, SIGNAL =   3; EXPRESSED IN BONE MARROW, SIGNAL =   2; EXPRESSED IN FETAL LIVER, SIGNAL = 2.9; EXPRESSED IN HEART, SIGNAL = 2.6; EXPRESSED IN LUNG, SIGNAL = 2.2; EST_HUMAN HIT: AI376042.1, EVALUE 5.70e+00
GYPTVLAPFIEKSTLPSIFRNVTSVINQAATCVLDC

SEQ ID NO: 42146 - protein, 27 aa, Homo sapiens
  MAP TO AC008056.6; EXPRESSED IN BRAIN, SIGNAL =   4; EXPRESSED IN PLACENTA, SIGNAL = 3.8; EXPRESSED IN ADULT LIVER, SIGNAL = 3.1; EXPRESSED IN BONE MARROW, SIGNAL = 2.8; EXPRESSED IN FETAL LIVER, SIGNAL = 3.6; EXPRESSED IN HELA, SIGNAL = 4.3; EXPRESSED IN HEART, SIGNAL = 3.9; EXPRESSED IN LUNG, SIGNAL = 3.7
MSTTVMETTTTMATTTTRKNRSTASIQ

SEQ ID NO: 42147 - protein, 47 aa, Homo sapiens
  MAP TO AC008651.4; EXPRESSED IN BONE MARROW, SIGNAL = 3.4; EXPRESSED IN LUNG, SIGNAL =  18; EXPRESSED IN ADULT LIVER, SIGNAL = 3.3; EXPRESSED IN BRAIN, SIGNAL = 2.7; EXPRESSED IN PLACENTA, SIGNAL =  24; EXPRESSED IN FETAL LIVER, SIGNAL = 8.7; EXPRESSED IN HELA, SIGNAL =  20; EXPRESSED IN HEART, SIGNAL = 4.5; EST_HUMAN HIT: BE019561.1, EVALUE 2.00e-13; SWISSPROT HIT: P08393, EVALUE 7.20e-01
CVGPVPASAPRASPEWAAAVSGVAWVETLAGPVVGEASPQSRSTRAC

SEQ ID NO: 42148 - protein, 87 aa, Homo sapiens
  MAP TO AL136418.1; EXPRESSED IN PLACENTA, SIGNAL =  12; EXPRESSED IN BONE MARROW, SIGNAL =  13; EXPRESSED IN LUNG, SIGNAL = 8.8; EXPRESSED IN HEART, SIGNAL =  16; EXPRESSED IN BRAIN, SIGNAL =  12; EXPRESSED IN HELA, SIGNAL =  21; EXPRESSED IN FETAL LIVER, SIGNAL =  20; EXPRESSED IN ADULT LIVER, SIGNAL =  14; SWISSPROT HIT: P12474, EVALUE 3.90e-01; EST_HUMAN HIT: AW207734.1, EVALUE 3.00e-44
SRSEFLEKLQRARGQVKPSTSSQPILSAPGPTKLTVGNWSLTCLKEGEIAIHNSDGQQATILKEDLPGFVFESNRGTKHSFTAETSL

SEQ ID NO: 42149 - protein, 81 aa, Homo sapiens
  MAP TO AC008481.4; EXPRESSED IN BONE MARROW, SIGNAL = 5.1; EXPRESSED IN LUNG, SIGNAL = 7.9; EXPRESSED IN HEART, SIGNAL = 3.8; SWISSPROT HIT: P51911, EVALUE 2.00e-36; EST_HUMAN HIT: BF348760.1, EVALUE 1.00e-35
AGMTAPGTKRQIFEPGLGMEHCDTLNVSLQMGSNKGASQRGMTVYGLPRQVYDPKYCLTPEYPELGEPAHNHHAHNYYNSA

SEQ ID NO: 42150 - protein, 35 aa, Homo sapiens
  MAP TO AC008481.4; EXPRESSED IN BONE MARROW, SIGNAL = 5.1; EXPRESSED IN LUNG, SIGNAL = 7.9; EXPRESSED IN HEART, SIGNAL = 3.8; EST_HUMAN HIT: AW604975.1, EVALUE 8.00e-04
GPSGRSSSRGWAWSTATRSMSACRWAATRAPRSGA

SEQ ID NO: 42151 - protein, 45 aa, Homo sapiens
  MAP TO AC008865.3; EXPRESSED IN HEART, SIGNAL = 2.3; EXPRESSED IN LUNG, SIGNAL = 2.1; EXPRESSED IN BRAIN, SIGNAL = 1.7; EXPRESSED IN PLACENTA, SIGNAL = 3.2; EXPRESSED IN BONE MARROW, SIGNAL = 2.3; EXPRESSED IN FETAL LIVER, SIGNAL = 1.8; EXPRESSED IN HELA, SIGNAL = 2.2; SWISSPROT HIT: P97449, EVALUE 2.00e-11; EST_HUMAN HIT: AU140225.1, EVALUE 1.00e-08
FEAGAMENWGLLTFREETLLYDSNTSSMADRKLVTKIIAHELAHQ

SEQ ID NO: 42152 - protein, 34 aa, Homo sapiens
  MAP TO AC008865.3; EXPRESSED IN HEART, SIGNAL = 2.3; EXPRESSED IN LUNG, SIGNAL = 2.1; EXPRESSED IN BRAIN, SIGNAL = 1.7; EXPRESSED IN PLACENTA, SIGNAL = 3.2; EXPRESSED IN BONE MARROW, SIGNAL = 2.3; EXPRESSED IN FETAL LIVER, SIGNAL = 1.8; EXPRESSED IN HELA, SIGNAL = 2.2; SWISSPROT HIT: P19474, EVALUE 6.50e+00
TLKQEQWKIGVCSPSERRHFCMTVTLLQWRIESW

SEQ ID NO: 42153 - protein, 61 aa, Homo sapiens
  MAP TO AC007868.2; EXPRESSED IN BRAIN, SIGNAL = 4.2; EXPRESSED IN ADULT LIVER, SIGNAL = 3.2; EXPRESSED IN PLACENTA, SIGNAL = 3.9; EXPRESSED IN LUNG, SIGNAL = 9.4; EXPRESSED IN HEART, SIGNAL = 6.9; EXPRESSED IN HELA, SIGNAL = 6.9; EXPRESSED IN FETAL LIVER, SIGNAL = 6.4; EXPRESSED IN BONE MARROW, SIGNAL = 2.9; EST_HUMAN HIT: BF086478.1, EVALUE 3.00e-20; SWISSPROT HIT: P75065, EVALUE 2.60e+00
ENERDLMHIAHIAELLEVFDLRMMVANILNNEAFMNQEITKAFHVRRTNRVKECLAKGTFS

SEQ ID NO: 42154 - protein, 32 aa, Homo sapiens
  MAP TO AC007868.2; EXPRESSED IN BRAIN, SIGNAL = 4.2; EXPRESSED IN ADULT LIVER, SIGNAL = 3.2; EXPRESSED IN PLACENTA, SIGNAL = 3.9; EXPRESSED IN LUNG, SIGNAL = 9.4; EXPRESSED IN HEART, SIGNAL = 6.9; EXPRESSED IN HELA, SIGNAL = 6.9; EXPRESSED IN FETAL LIVER, SIGNAL = 6.4; EXPRESSED IN BONE MARROW, SIGNAL = 2.9; EST_HUMAN HIT: T03102.1, EVALUE 4.00e-07
QIPADGGGEDGQFHPAGALPGCPQVPVHGGAR

SEQ ID NO: 42155 - protein, 61 aa, Homo sapiens [sequence omitted]

SEQ ID NO: 42156 - protein, 89 aa, Homo sapiens
  MAP TO AC011462.3; EXPRESSED IN BRAIN, SIGNAL = 2.7; EXPRESSED IN FETAL LIVER, SIGNAL = 3.3; EXPRESSED IN HEART, SIGNAL = 2.6; EXPRESSED IN PLACENTA, SIGNAL = 2.6; EXPRESSED IN LUNG, SIGNAL = 9.2; EXPRESSED IN HELA, SIGNAL = 3.2; EXPRESSED IN BONE MARROW, SIGNAL = 3.5; EXPRESSED IN ADULT LIVER, SIGNAL =   5; EST_HUMAN HIT: BE268652.1, EVALUE 2.00e-48; SWISSPROT HIT: Q00839, EVALUE 3.00e-24
DFECGNDVELSFTKNGKWMGIAFRIQKEALGGQALYPHVLVKNCAVEFNFGQRAEPYCSVLPGFTFIQHLPLSERIRGTVGPKSKAECE

SEQ ID NO: 42157 - protein, 40 aa, Homo sapiens
  MAP TO AC011462.3; EXPRESSED IN BRAIN, SIGNAL = 2.7; EXPRESSED IN FETAL LIVER, SIGNAL = 3.3; EXPRESSED IN HEART, SIGNAL = 2.6; EXPRESSED IN PLACENTA, SIGNAL = 2.6; EXPRESSED IN LUNG, SIGNAL = 9.2; EXPRESSED IN HELA, SIGNAL = 3.2; EXPRESSED IN BONE MARROW, SIGNAL = 3.5; EXPRESSED IN ADULT LIVER, SIGNAL =   5; EST_HUMAN HIT: BE268652.1, EVALUE 4.00e-18
ILNVEMTWNCLLPRMESGWALLSESRRKPWGVRPSILMSW

SEQ ID NO: 42158 - protein, 43 aa, Homo sapiens
  MAP TO AL159141.1; EXPRESSED IN BRAIN, SIGNAL = 1.8; EXPRESSED IN PLACENTA, SIGNAL = 2.6; EXPRESSED IN FETAL LIVER, SIGNAL = 2.3; EXPRESSED IN ADULT LIVER, SIGNAL =   3; EXPRESSED IN BONE MARROW, SIGNAL = 3.1; EXPRESSED IN HELA, SIGNAL =   3; EXPRESSED IN LUNG, SIGNAL = 4.4; EXPRESSED IN HEART, SIGNAL = 1.9
EETMVWLAGVEEDRRGDMRDGDVLRCNSKNPMGSFPLTSAPIP

SEQ ID NO: 42159 - protein, 68 aa, Homo sapiens
  MAP TO AC008897.4; EXPRESSED IN ADULT LIVER, SIGNAL = 3.7; EXPRESSED IN BONE MARROW, SIGNAL = 9.7; EXPRESSED IN LUNG, SIGNAL = 8.6; EXPRESSED IN BRAIN, SIGNAL = 8.5; EXPRESSED IN PLACENTA, SIGNAL =   6; EXPRESSED IN FETAL LIVER, SIGNAL = 6.1; EXPRESSED IN HELA, SIGNAL = 6.9; EXPRESSED IN HEART, SIGNAL = 4.9; EST_HUMAN HIT: BE394525.1, EVALUE 4.00e-12; SWISSPROT HIT: P08339, EVALUE 3.50e+00
CLSLPPTPWVPVQPQPLRRAPPPAPRRPVPSTTQGLRSVSARRGTGRQLHLQPWCRIHWVKPSGLLSL

SEQ ID NO: 42160 - protein, 32 aa, Homo sapiens
  MAP TO AC009013.2; EXPRESSED IN PLACENTA, SIGNAL = 2.8; EXPRESSED IN BRAIN, SIGNAL = 2.5; EXPRESSED IN FETAL LIVER, SIGNAL = 6.3; EXPRESSED IN HELA, SIGNAL = 7.8; EXPRESSED IN ADULT LIVER, SIGNAL = 2.3; EXPRESSED IN BONE MARROW, SIGNAL =   2; EXPRESSED IN HEART, SIGNAL = 6.7; EST_HUMAN HIT: BF304683.1, EVALUE 9.00e-09
DVLNDFDKNADSDMNNKVQAQVVSDGDEELVG

SEQ ID NO: 42161 - protein, 33 aa, Homo sapiens
  MAP TO AC009013.2; EXPRESSED IN PLACENTA, SIGNAL = 2.8; EXPRESSED IN BRAIN, SIGNAL = 2.5; EXPRESSED IN FETAL LIVER, SIGNAL = 6.3; EXPRESSED IN HELA, SIGNAL = 7.8; EXPRESSED IN ADULT LIVER, SIGNAL = 2.3; EXPRESSED IN BONE MARROW, SIGNAL =   2; EXPRESSED IN HEART, SIGNAL = 6.7; EST_HUMAN HIT: AL119158.1, EVALUE 2.00e-02
FPTSSSSPSETTCAWTLLFISLSAFLSKSFNTS

SEQ ID NO: 42162 - protein, 76 aa, Homo sapiens
  MAP TO AC011381.3; EXPRESSED IN BRAIN, SIGNAL = 7.9; EXPRESSED IN BONE MARROW, SIGNAL = 5.1; EXPRESSED IN FETAL LIVER, SIGNAL = 6.5; EXPRESSED IN LUNG, SIGNAL = 8.1; EXPRESSED IN HEART, SIGNAL = 6.7; EXPRESSED IN PLACENTA, SIGNAL = 5.6; EXPRESSED IN HELA, SIGNAL = 6.5; EXPRESSED IN ADULT LIVER, SIGNAL = 7.6; SWISSPROT HIT: O35501, EVALUE 4.00e-17; EST_HUMAN HIT: BE887756.1, EVALUE 4.00e-16
VQQTVQDLFGRAPSKAVNPDEAVAIGAAIQGGVLAGDVTDVLLLDVTPLSLGIETLGGVFTKLINRNTTIPTKKSQ

SEQ ID NO: 42163 - protein, 71 aa, Homo sapiens
  MAP TO AC011381.3; EXPRESSED IN BRAIN, SIGNAL = 7.9; EXPRESSED IN BONE MARROW, SIGNAL = 5.1; EXPRESSED IN FETAL LIVER, SIGNAL = 6.5; EXPRESSED IN LUNG, SIGNAL = 8.1; EXPRESSED IN HEART, SIGNAL = 6.7; EXPRESSED IN PLACENTA, SIGNAL = 5.6; EXPRESSED IN HELA, SIGNAL = 6.5; EXPRESSED IN ADULT LIVER, SIGNAL = 7.6; SWISSPROT HIT: Q9XFS9, EVALUE 4.50e+00; EST_HUMAN HIT: AU124837.1, EVALUE 4.00e-28
VVPKCGPTGSFSLMFRFSRLYRIFLAEPQVKLSILMRLWPLELPFREVCWPAMSRMCCSLMSLPCLWVLKL

SEQ ID NO: 42164 - protein, 42 aa, Homo sapiens
  MAP TO AL136038.1; EXPRESSED IN BRAIN, SIGNAL = 3.1; EXPRESSED IN PLACENTA, SIGNAL = 3.2; EXPRESSED IN BONE MARROW, SIGNAL = 4.2; EXPRESSED IN HELA, SIGNAL = 9.2; EXPRESSED IN LUNG, SIGNAL = 3.5; EXPRESSED IN ADULT LIVER, SIGNAL = 3.2; EXPRESSED IN FETAL LIVER, SIGNAL =   7; EXPRESSED IN HEART, SIGNAL = 7.1; EST_HUMAN HIT: AA385284.1, EVALUE 3.00e-06
SLLQRRMARRRAFLPSAFTSASMVWASRSVPLGHSKRSKNVP

SEQ ID NO: 42165 - protein, 68 aa, Homo sapiens
  MAP TO AC007497.2; EXPRESSED IN BRAIN, SIGNAL = 1.6; EXPRESSED IN PLACENTA, SIGNAL = 2.3; EXPRESSED IN LUNG, SIGNAL = 2.8; EXPRESSED IN HEART, SIGNAL = 1.8; SWISSPROT HIT: P41245, EVALUE 5.10e-01; EST_HUMAN HIT: BE279081.1, EVALUE 9.00e-34
RSEGEEKTLTGDVKTSPPRTAPKKQLPSIPKNALPITKPTSPAPAAQSTNGTHASYGPFYLEYSLLAE

SEQ ID NO: 42166 - protein, 23 aa, Homo sapiens
  MAP TO AC007497.2; EXPRESSED IN BRAIN, SIGNAL = 1.6; EXPRESSED IN PLACENTA, SIGNAL = 2.3; EXPRESSED IN LUNG, SIGNAL = 2.8; EXPRESSED IN HEART, SIGNAL = 1.8; EST_HUMAN HIT: BE727307.1, EVALUE 6.00e-07
HSQQMARMRPMDPSTWNTLFLQN

SEQ ID NO: 42167 - protein, 43 aa, Homo sapiens
  MAP TO AC011366.3; EXPRESSED IN ADULT LIVER, SIGNAL = 2.1; EXPRESSED IN FETAL LIVER, SIGNAL = 2.9; EXPRESSED IN LUNG, SIGNAL =  18; EXPRESSED IN PLACENTA, SIGNAL = 1.8; EXPRESSED IN BRAIN, SIGNAL = 1.7; EXPRESSED IN HEART, SIGNAL = 2.7; EXPRESSED IN BONE MARROW, SIGNAL = 1.9; EXPRESSED IN HELA, SIGNAL = 2.7; EST_HUMAN HIT: BE905689.1, EVALUE 1.80e-02; SWISSPROT HIT: P03558, EVALUE 8.20e+00
FPQLDSCFENQFLTPKLQIPDDSGSELIYVIRPLRAQGLTNHT

SEQ ID NO: 42168 - protein, 34 aa, Homo sapiens
  MAP TO AC011366.3; EXPRESSED IN ADULT LIVER, SIGNAL = 2.1; EXPRESSED IN FETAL LIVER, SIGNAL = 2.9; EXPRESSED IN LUNG, SIGNAL =  18; EXPRESSED IN PLACENTA, SIGNAL = 1.8; EXPRESSED IN BRAIN, SIGNAL = 1.7; EXPRESSED IN HEART, SIGNAL = 2.7; EXPRESSED IN BONE MARROW, SIGNAL = 1.9; EXPRESSED IN HELA, SIGNAL = 2.7; EST_HUMAN HIT: BF125431.1, EVALUE 9.90e+00
IFPSWILALKTNFSLQSYRSLMILDLNSSTLLGL

SEQ ID NO: 42169 - protein, 59 aa, Homo sapiens
  MAP TO AC011510.3; EXPRESSED IN PLACENTA, SIGNAL =   2; EXPRESSED IN BRAIN, SIGNAL = 1.9; EXPRESSED IN HELA, SIGNAL = 1.7; EXPRESSED IN ADULT LIVER, SIGNAL = 1.8; EXPRESSED IN HEART, SIGNAL = 1.8; EXPRESSED IN BONE MARROW, SIGNAL = 2.1; EXPRESSED IN FETAL LIVER, SIGNAL = 1.9; SWISSPROT HIT: P30530, EVALUE 8.00e-30; EST_HUMAN HIT: BE548133.1, EVALUE 4.00e-23
TQAEESPFVGNPGNITGARGLTGTLRCQLQVQGEPPEVHWLRDGQILELADSTQTQVPL

SEQ ID NO: 42170 - protein, 60 aa, Homo sapiens
  MAP TO AC011510.3; EXPRESSED IN PLACENTA, SIGNAL =   2; EXPRESSED IN BRAIN, SIGNAL = 1.9; EXPRESSED IN HELA, SIGNAL = 1.7; EXPRESSED IN ADULT LIVER, SIGNAL = 1.8; EXPRESSED IN HEART, SIGNAL = 1.8; EXPRESSED IN BONE MARROW, SIGNAL = 2.1; EXPRESSED IN FETAL LIVER, SIGNAL = 1.9; SWISSPROT HIT: P08558, EVALUE 2.00e+00; EST_HUMAN HIT: BE548133.1, EVALUE 5.00e-26
ARRLKKVPSWATQGISQVPGDSRAPFGVSSRFRESPPRYIGFGMDRSWSSRTAPRPRCPW

SEQ ID NO: 42171 - protein, 30 aa, Homo sapiens
  MAP TO AC010289.2; EXPRESSED IN BRAIN, SIGNAL = 3.8; EXPRESSED IN PLACENTA, SIGNAL = 2.9; EXPRESSED IN BONE MARROW, SIGNAL = 3.9; EXPRESSED IN HEART, SIGNAL = 3.4; EXPRESSED IN LUNG, SIGNAL = 3.1; EXPRESSED IN ADULT LIVER, SIGNAL = 4.6; EXPRESSED IN FETAL LIVER, SIGNAL = 3.9; EXPRESSED IN HELA, SIGNAL = 3.6; SWISSPROT HIT: O00142, EVALUE 2.00e-12; EST_HUMAN HIT: BF304127.1, EVALUE 3.00e-11
GLMYHDASRWGLTLQTYVQLTMLDRHTRPQ

SEQ ID NO: 42172 - protein, 53 aa, Homo sapiens
  MAP TO AC005301.22; EXPRESSED IN HELA, SIGNAL = 3.9; EXPRESSED IN BRAIN, SIGNAL = 3.4; EXPRESSED IN ADULT LIVER, SIGNAL =   4; EXPRESSED IN BONE MARROW, SIGNAL = 5.1; EXPRESSED IN FETAL LIVER, SIGNAL =   5; EXPRESSED IN HEART, SIGNAL = 4.3; EXPRESSED IN LUNG, SIGNAL = 5.2; EXPRESSED IN PLACENTA, SIGNAL = 3.4; SWISSPROT HIT: Q39639, EVALUE 4.70e+00; EST_HUMAN HIT: AL133966.1, EVALUE 2.00e-21
FLVSADCELTFQEFPKSTGSSSTWRLLLVRSLFWMPSKFPHRPHTFSLRDKLR

SEQ ID NO: 42173 - protein, 37 aa, Homo sapiens
  MAP TO AC002523.1; EXPRESSED IN HELA, SIGNAL = 2.1; EXPRESSED IN PLACENTA, SIGNAL = 1.5; EXPRESSED IN BRAIN, SIGNAL = 2.1; EXPRESSED IN ADULT LIVER, SIGNAL =   2; EXPRESSED IN BONE MARROW, SIGNAL = 1.9; EXPRESSED IN FETAL LIVER, SIGNAL = 1.9; EXPRESSED IN HEART, SIGNAL = 1.8; EST_HUMAN HIT: BE207127.1, EVALUE 2.00e-09
MYMPRQAIYSCCWKDSADPTVGDIGHFAIGVGPVHND

SEQ ID NO: 42174 - protein, 36 aa, Homo sapiens
  MAP TO AC002523.1; EXPRESSED IN HELA, SIGNAL = 2.1; EXPRESSED IN PLACENTA, SIGNAL = 1.5; EXPRESSED IN BRAIN, SIGNAL = 2.1; EXPRESSED IN ADULT LIVER, SIGNAL =   2; EXPRESSED IN BONE MARROW, SIGNAL = 1.9; EXPRESSED IN FETAL LIVER, SIGNAL = 1.9; EXPRESSED IN HEART, SIGNAL = 1.8; SWISSPROT HIT: Q03336, EVALUE 5.70e-01; EST_HUMAN HIT: BE207127.1, EVALUE 7.00e-07
HCGQGPHLWQSDQCLQLLDLHCPSSSSCRWPAVACT

SEQ ID NO: 42175 - protein, 41 aa, Homo sapiens
  MAP TO AL139342.2; EXPRESSED IN ADULT LIVER, SIGNAL = 2.5; EXPRESSED IN HELA, SIGNAL = 2.6; EXPRESSED IN BRAIN, SIGNAL = 3.5; EXPRESSED IN PLACENTA, SIGNAL = 2.2; EXPRESSED IN BONE MARROW, SIGNAL = 2.7; EXPRESSED IN FETAL LIVER, SIGNAL = 2.3; EXPRESSED IN HEART, SIGNAL = 2.5; EXPRESSED IN LUNG, SIGNAL = 2.9; EST_HUMAN HIT: AA987768.1, EVALUE 9.30e+00
ELKKIDTVKQTNLNIIKGVENDKDMKVKRVCANKTNRKRLT

SEQ ID NO: 42176 - protein, 97 aa, Homo sapiens
  MAP TO AC005323.1; EXPRESSED IN HEART, SIGNAL = 2.8; EXPRESSED IN BRAIN, SIGNAL = 1.5; EXPRESSED IN PLACENTA, SIGNAL = 1.7; EXPRESSED IN ADULT LIVER, SIGNAL = 2.4; EXPRESSED IN BONE MARROW, SIGNAL = 2.1; EST_HUMAN HIT: AA195905.1, EVALUE 6.00e-44; SWISSPROT HIT: gi127772, EVALUE 3.00e-47
ASLEHEEGKILRIQLELNQVKSEIDRKIAEKDEELDQLKRNHLRVVESMQSTLDAEIRSRNDALRIKKKMEGDLNEMEIQLNHANRQAAEALRNLRN

SEQ ID NO: 42177 - protein, 28 aa, Homo sapiens
  MAP TO AC009396.5; EXPRESSED IN PLACENTA, SIGNAL = 3.8; EXPRESSED IN HELA, SIGNAL = 4.5; EXPRESSED IN LUNG, SIGNAL = 5.9; EXPRESSED IN HEART, SIGNAL = 4.1; EXPRESSED IN BRAIN, SIGNAL = 4.4; EXPRESSED IN FETAL LIVER, SIGNAL = 4.4; EXPRESSED IN BONE MARROW, SIGNAL = 4.1; EXPRESSED IN ADULT LIVER, SIGNAL = 3.6; SWISSPROT HIT: O67887, EVALUE 8.60e+00
FSFHKGEAWNPKKTMKEIWEFKKLIHHM

SEQ ID NO: 42178 - protein, 78 aa, Homo sapiens
  MAP TO AL049829.3; EXPRESSED IN HEART, SIGNAL =  32; SWISSPROT HIT: P13533, EVALUE 2.00e-26; EST_HUMAN HIT: F00725.1, EVALUE 5.00e-22
GHAWLPPLPVPGSPHQPHAQPCLLLQTYSGLFCVTVNPYKWLPVYNAEVVAAYRGKKRSEAPPHIFSISDNAYQYMLT

SEQ ID NO: 42179 - protein, 93 aa, Homo sapiens
  MAP TO AL160008.1; EXPRESSED IN HEART, SIGNAL =   2; EXPRESSED IN LUNG, SIGNAL =  16; EXPRESSED IN PLACENTA, SIGNAL =   2; EXPRESSED IN FETAL LIVER, SIGNAL =   2; EST_HUMAN HIT: BF093687.1, EVALUE 1.00e-43; SWISSPROT HIT: P32455, EVALUE 4.00e-46
LESLVLTYVNAISSGDLPCMENAVLALAQIENSAAVQKAIAHYEQQMGQKVQLPTETLQELLDLHRDSEREAIEVFIRSSFKDVDHLFQKELA

SEQ ID NO: 42180 - protein, 34 aa, Homo sapiens
  MAP TO AL121852.2; EXPRESSED IN PLACENTA, SIGNAL = 2.7; EXPRESSED IN ADULT LIVER, SIGNAL = 3.4; EXPRESSED IN BONE MARROW, SIGNAL = 3.5; EXPRESSED IN FETAL LIVER, SIGNAL = 5.4; EXPRESSED IN HELA, SIGNAL = 4.5; EXPRESSED IN LUNG, SIGNAL = 4.6; EXPRESSED IN HEART, SIGNAL =   4; EXPRESSED IN BRAIN, SIGNAL = 4.2; EST_HUMAN HIT: BE879333.1, EVALUE 8.00e-10; SWISSPROT HIT: P22213, EVALUE 1.30e+00
YCFSPFPEVAESVQQELESYRAQEDEVKRLKSIM

SEQ ID NO: 42181 - protein, 84 aa, Homo sapiens
  MAP TO AC018720.2; EXPRESSED IN BRAIN, SIGNAL = 3.8; EXPRESSED IN PLACENTA, SIGNAL = 4.6; EXPRESSED IN LUNG, SIGNAL = 7.2; EXPRESSED IN HEART, SIGNAL = 2.9; EXPRESSED IN HELA, SIGNAL =   3; EXPRESSED IN FETAL LIVER, SIGNAL = 3.4; EXPRESSED IN BONE MARROW, SIGNAL = 3.7; EXPRESSED IN ADULT LIVER, SIGNAL = 2.4; EST_HUMAN HIT: BE148076.1, EVALUE 3.00e-35
MAWFLYSAPGVDPSPPHRSFCWKRKMEWWDESEESLEEEPRKVLAPEPEEIWVAEMLCGLKMKLKRRRVSLVLPEHHEAFNRLL

SEQ ID NO: 42182 - protein, 43 aa, Homo sapiens
  MAP TO AC018720.2; EXPRESSED IN BRAIN, SIGNAL = 3.8; EXPRESSED IN PLACENTA, SIGNAL = 4.6; EXPRESSED IN LUNG, SIGNAL = 7.2; EXPRESSED IN HEART, SIGNAL = 2.9; EXPRESSED IN HELA, SIGNAL =   3; EXPRESSED IN FETAL LIVER, SIGNAL = 3.4; EXPRESSED IN BONE MARROW, SIGNAL = 3.7; EXPRESSED IN ADULT LIVER, SIGNAL = 2.4; EST_HUMAN HIT: AA078340.1, EVALUE 4.00e-21
PFAGKGRWSGGTNLRSRWRRSHGRCSPLSLRRSGWRRCCVASR

SEQ ID NO: 42183 - protein, 62 aa, Homo sapiens
  MAP TO AC010369.3; EXPRESSED IN HELA, SIGNAL = 1.9; EXPRESSED IN HEART, SIGNAL = 1.9; EXPRESSED IN BRAIN, SIGNAL = 1.6; EXPRESSED IN FETAL LIVER, SIGNAL = 1.7; SWISSPROT HIT: Q09030, EVALUE 2.60e+00; EST_HUMAN HIT: BF530193.1, EVALUE 2.00e+00
LEAAAISGFLSSQQQHFDLCFLPHITSPPQCCHPLPLPVSYKETHGYTNRPIKIIYNRIISL

SEQ ID NO: 42184 - protein, 32 aa, Homo sapiens
  MAP TO AC019219.2; EXPRESSED IN BRAIN, SIGNAL = 1.7; EXPRESSED IN PLACENTA, SIGNAL = 1.9; EXPRESSED IN FETAL LIVER, SIGNAL = 3.4; EXPRESSED IN ADULT LIVER, SIGNAL = 2.2; EXPRESSED IN BONE MARROW, SIGNAL = 1.5; EXPRESSED IN HEART, SIGNAL = 2.9; EXPRESSED IN HELA, SIGNAL = 3.2; EST_HUMAN HIT: BE293796.1, EVALUE 2.00e-06
TGTAWGKLPRGSNHLLPALSPDTWGLLSEMTF

SEQ ID NO: 42185 - protein, 68 aa, Homo sapiens
  MAP TO AC022845.2; EXPRESSED IN ADULT LIVER, SIGNAL = 4.3; EXPRESSED IN HEART, SIGNAL =   5; EXPRESSED IN BRAIN, SIGNAL = 6.6; EXPRESSED IN PLACENTA, SIGNAL = 4.8; EXPRESSED IN FETAL LIVER, SIGNAL = 4.7; EXPRESSED IN BONE MARROW, SIGNAL = 3.6; EXPRESSED IN HELA, SIGNAL = 4.6; EXPRESSED IN LUNG, SIGNAL =   6; SWISSPROT HIT: Q06846, EVALUE 3.00e-06; EST_HUMAN HIT: AW958838.1, EVALUE 4.00e-35
TILPDTSRKSRQKTRAVGKTTNPIFNHTMVYDGFRPEDLMEACVELTVWDHYKLTNQFLGGLRIGFGT

SEQ ID NO: 42186 - protein, 53 aa, Homo sapiens
  MAP TO AC016372.2; EXPRESSED IN BRAIN, SIGNAL = 3.2; EXPRESSED IN PLACENTA, SIGNAL = 4.7; EXPRESSED IN HELA, SIGNAL =   3; EXPRESSED IN FETAL LIVER, SIGNAL = 2.9; EXPRESSED IN ADULT LIVER, SIGNAL = 4.3; EXPRESSED IN BONE MARROW, SIGNAL = 3.4; EXPRESSED IN LUNG, SIGNAL = 4.4; EXPRESSED IN HEART, SIGNAL = 2.2; SWISSPROT HIT: P22214, EVALUE 8.00e-06; EST_HUMAN HIT: BE889761.1, EVALUE 2.00e-23
YIIEQGVCDLVLCEAAFPKTLAFAYLEDLHSEFDEQHGKKVPTVSRPYSFIEF

SEQ ID NO: 42187 - protein, 25 aa, Homo sapiens
  MAP TO AC016372.2; EXPRESSED IN BRAIN, SIGNAL = 3.2; EXPRESSED IN PLACENTA, SIGNAL = 4.7; EXPRESSED IN HELA, SIGNAL =   3; EXPRESSED IN FETAL LIVER, SIGNAL = 2.9; EXPRESSED IN ADULT LIVER, SIGNAL = 4.3; EXPRESSED IN BONE MARROW, SIGNAL = 3.4; EXPRESSED IN LUNG, SIGNAL = 4.4; EXPRESSED IN HEART, SIGNAL = 2.2; EST_HUMAN HIT: BE891858.1, EVALUE 1.00e-07
TLLSRGCVIWFYVKLPSLRRWLLPT

SEQ ID NO: 42188 - protein, 65 aa, Homo sapiens
  MAP TO AC023490.4; EXPRESSED IN BRAIN, SIGNAL = 3.4; EXPRESSED IN HELA, SIGNAL =  11; EXPRESSED IN HEART, SIGNAL = 2.5; EXPRESSED IN PLACENTA, SIGNAL = 1.6; EXPRESSED IN LUNG, SIGNAL = 2.1; EXPRESSED IN FETAL LIVER, SIGNAL = 3.1; EXPRESSED IN BONE MARROW, SIGNAL = 2.4; EXPRESSED IN ADULT LIVER, SIGNAL = 2.1
LLGRRAMAQDYGAMGDLVLLGLGLGLALAVIVLAVVLSRHQAPFDPRPLPTPLLLLTPRSSQILY

SEQ ID NO: 42189 - protein, 83 aa, Homo sapiens
  MAP TO AL158075.2; EXPRESSED IN HELA, SIGNAL = 4.1; EXPRESSED IN BRAIN, SIGNAL = 4.4; EXPRESSED IN PLACENTA, SIGNAL = 3.1; EXPRESSED IN LUNG, SIGNAL =   4; EXPRESSED IN HEART, SIGNAL = 3.9; EXPRESSED IN FETAL LIVER, SIGNAL = 4.2; EXPRESSED IN BONE MARROW, SIGNAL = 3.2; EXPRESSED IN ADULT LIVER, SIGNAL = 3.8; EST_HUMAN HIT: AI791389.1, EVALUE 3.60e+00; SWISSPROT HIT: O65403, EVALUE 4.30e-01
DTARGKGKDISKYGSVQKSFADRGLPKPPKEKLLQVEKLRKESGKGSFLQPTAKPRALAQQQAVIRGFTYYKAGKQEVTEAVA

SEQ ID NO: 42190 - protein, 38 aa, Homo sapiens
  MAP TO AL158075.2; EXPRESSED IN HELA, SIGNAL = 4.1; EXPRESSED IN BRAIN, SIGNAL = 4.4; EXPRESSED IN PLACENTA, SIGNAL = 3.1; EXPRESSED IN LUNG, SIGNAL =   4; EXPRESSED IN HEART, SIGNAL = 3.9; EXPRESSED IN FETAL LIVER, SIGNAL = 4.2; EXPRESSED IN BONE MARROW, SIGNAL = 3.2; EXPRESSED IN ADULT LIVER, SIGNAL = 3.8; EST_HUMAN HIT: BE182887.1, EVALUE 3.20e+00
TQLEEKARTSASMAVCRKALQTEASQNLPRRSCFRWRS

SEQ ID NO: 42191 - protein, 121 aa, Homo sapiens
  MAP TO AC023344.2; EXPRESSED IN BRAIN, SIGNAL = 1.8; EXPRESSED IN PLACENTA, SIGNAL = 2.2; EXPRESSED IN FETAL LIVER, SIGNAL = 1.9; EXPRESSED IN HELA, SIGNAL = 1.8; EXPRESSED IN BONE MARROW, SIGNAL = 1.7; EXPRESSED IN ADULT LIVER, SIGNAL = 2.1; EXPRESSED IN HEART, SIGNAL = 2.8; EST_HUMAN HIT: BF083249.1, EVALUE 8.50e-01; SWISSPROT HIT: P03189, EVALUE 8.80e+00
GHGDGQSSEKAPEVSHIKKKEVSKTVVSKTYERGGDVSHLSHRYERDAGVLEPGQPENDIDRILHSHGSPTRRRKCANLVSELTKGWRVMEQEEPTWRSDSVDTEDSGYGGEAEERPEQDG

SEQ ID NO: 42192 - protein, 37 aa, Homo sapiens
  MAP TO AC023344.2; EXPRESSED IN BRAIN, SIGNAL = 1.8; EXPRESSED IN PLACENTA, SIGNAL = 2.2; EXPRESSED IN FETAL LIVER, SIGNAL = 1.9; EXPRESSED IN HELA, SIGNAL = 1.8; EXPRESSED IN BONE MARROW, SIGNAL = 1.7; EXPRESSED IN ADULT LIVER, SIGNAL = 2.1; EXPRESSED IN HEART, SIGNAL = 2.8; EST_HUMAN HIT: AV696020.1, EVALUE 5.60e+00
KDMEMDKAQRKPLRFLTSKRKRCPKRWSARLMREEGT

SEQ ID NO: 42193 - protein, 103 aa, Homo sapiens
  MAP TO AC005323.1; EXPRESSED IN BONE MARROW, SIGNAL = 7.6; EXPRESSED IN HEART, SIGNAL = 6.5; SWISSPROT HIT: P13535, EVALUE 6.00e-50; EST_HUMAN HIT: AA195905.1, EVALUE 6.00e-50
ASLEHEEGKILRIQLELNQVKSEVDRKIAEKDEEIDQLKRNHIRIVESMQSTLDAEIRSRNDAIRLKKKMEGDLNEMEIQLNHANRMAAEALRNYRNTQGILK

SEQ ID NO: 42194 - protein, 69 aa, Homo sapiens
  MAP TO AC021876.2; EXPRESSED IN PLACENTA, SIGNAL = 8.1; EXPRESSED IN HELA, SIGNAL = 3.8; EXPRESSED IN HEART, SIGNAL = 4.6; EXPRESSED IN BRAIN, SIGNAL =   3; EXPRESSED IN LUNG, SIGNAL =  10; EXPRESSED IN FETAL LIVER, SIGNAL = 3.3; EXPRESSED IN BONE MARROW, SIGNAL =   3; EXPRESSED IN ADULT LIVER, SIGNAL = 2.8; EST_HUMAN HIT: BE739143.1, EVALUE 1.00e-34; SWISSPROT HIT: Q14956, EVALUE 1.00e-35
IPTEVCTIISDPTCEITQNTVCSPVDVDEMCLLTVRRTFNGSGTYCVNLTLGDDTSLALTSTLISVPDR

SEQ ID NO: 42195 - protein, 32 aa, Homo sapiens
  MAP TO AC021876.2; EXPRESSED IN PLACENTA, SIGNAL = 8.1; EXPRESSED IN HELA, SIGNAL = 3.8; EXPRESSED IN HEART, SIGNAL = 4.6; EXPRESSED IN BRAIN, SIGNAL =   3; EXPRESSED IN LUNG, SIGNAL =  10; EXPRESSED IN FETAL LIVER, SIGNAL = 3.3; EXPRESSED IN BONE MARROW, SIGNAL =   3; EXPRESSED IN ADULT LIVER, SIGNAL = 2.8; EST_HUMAN HIT: C03546.1, EVALUE 3.00e-13
FPRRSVPSFLTPPARSPRTQSAALWMWMRCVC

SEQ ID NO: 42196 - protein, 44 aa, Homo sapiens
  MAP TO AC022845.2; EXPRESSED IN BRAIN, SIGNAL = 2.6; EXPRESSED IN ADULT LIVER, SIGNAL = 2.7; EXPRESSED IN BONE MARROW, SIGNAL =   2; EXPRESSED IN FETAL LIVER, SIGNAL = 2.2; EXPRESSED IN HELA, SIGNAL = 2.4; EXPRESSED IN HEART, SIGNAL =   2; EXPRESSED IN PLACENTA, SIGNAL = 2.1
EQSKDRENGAKESWVNNVNKDAFLPPELAGVVEEPEEDAAPASP

SEQ ID NO: 42197 - protein, 25 aa, Homo sapiens
  MAP TO AC008498.3; EXPRESSED IN PLACENTA, SIGNAL =   2; EXPRESSED IN BRAIN, SIGNAL =   2; EXPRESSED IN BONE MARROW, SIGNAL = 1.5; EXPRESSED IN HELA, SIGNAL = 2.2; EXPRESSED IN HEART, SIGNAL = 2.4; EXPRESSED IN LUNG, SIGNAL = 3.6; EXPRESSED IN ADULT LIVER, SIGNAL = 2.8; EXPRESSED IN FETAL LIVER, SIGNAL = 2.2
EMIQLFLRGEHNLIPKIRRGQYKKK

SEQ ID NO: 42198 - protein, 65 aa, Homo sapiens
  MAP TO AC007500.2; EXPRESSED IN ADULT LIVER, SIGNAL = 2.9; EXPRESSED IN FETAL LIVER, SIGNAL = 2.6; EXPRESSED IN PLACENTA, SIGNAL = 3.1; EXPRESSED IN BONE MARROW, SIGNAL = 2.6; EXPRESSED IN HELA, SIGNAL = 3.3; EXPRESSED IN LUNG, SIGNAL = 6.3; EXPRESSED IN BRAIN, SIGNAL = 2.8; EXPRESSED IN HEART, SIGNAL = 2.4; EST_HUMAN HIT: AW274086.1, EVALUE 4.40e+00; SWISSPROT HIT: P35352, EVALUE 3.40e+00
MSARDTGGLDRVMATEMKCRGEILQRRISGTGFEERSLRWLSGFWLIKTARSHVEHKLEFHCSEL

SEQ ID NO: 42199 - protein, 35 aa, Homo sapiens
  MAP TO AL158058.1; EXPRESSED IN PLACENTA, SIGNAL = 3.1; EXPRESSED IN FETAL LIVER, SIGNAL = 6.1; EXPRESSED IN HELA, SIGNAL = 6.1; EXPRESSED IN HEART, SIGNAL = 5.3; EXPRESSED IN BRAIN, SIGNAL = 3.1; EXPRESSED IN LUNG, SIGNAL = 2.6; EXPRESSED IN BONE MARROW, SIGNAL = 3.1; EXPRESSED IN ADULT LIVER, SIGNAL = 3.3; EST_HUMAN HIT: AA720574.1, EVALUE 7.00e-11; SWISSPROT HIT: P53011, EVALUE 8.40e+00
LSNGFDQNADSDMDNKVQADVVSDGDEELVGNWNK

SEQ ID NO: 42200 - protein, 50 aa, Homo sapiens
  MAP TO AL158058.1; EXPRESSED IN PLACENTA, SIGNAL = 3.1; EXPRESSED IN FETAL LIVER, SIGNAL = 6.1; EXPRESSED IN HELA, SIGNAL = 6.1; EXPRESSED IN HEART, SIGNAL = 5.3; EXPRESSED IN BRAIN, SIGNAL = 3.1; EXPRESSED IN LUNG, SIGNAL = 2.6; EXPRESSED IN BONE MARROW, SIGNAL = 3.1; EXPRESSED IN ADULT LIVER, SIGNAL = 3.3; EST_HUMAN HIT: BE391548.1, EVALUE 4.00e-18
KKTGKCGKVWNFLETCRMALIKMLIVIWTIKSRLTWSRMEMRNLLGTGIK

SEQ ID NO: 42201 - protein, 43 aa, Homo sapiens
  MAP TO AC010369.3; EXPRESSED IN BRAIN, SIGNAL = 1.3; EXPRESSED IN HELA, SIGNAL = 1.8; EXPRESSED IN BONE MARROW, SIGNAL = 1.8; EXPRESSED IN HEART, SIGNAL =   2; SWISSPROT HIT: Q10064, EVALUE 2.10e+00
SVISSQKQFVSKNLLPRGPFSSATEFYEKNGRVCLWIQKQDLP

SEQ ID NO: 42202 - protein, 42 aa, Homo sapiens
  MAP TO AC010369.3; EXPRESSED IN BRAIN, SIGNAL = 1.3; EXPRESSED IN HELA, SIGNAL = 1.8; EXPRESSED IN BONE MARROW, SIGNAL = 1.8; EXPRESSED IN HEART, SIGNAL =   2
QLLAARNSLSQRIYFPEDLFQVPQSSMRKMGGSVSGSRSRIC

SEQ ID NO: 42203 - protein, 76 aa, Homo sapiens
  MAP TO AL157951.1; EXPRESSED IN HEART, SIGNAL = 2.4; EXPRESSED IN BRAIN, SIGNAL = 2.5; EXPRESSED IN ADULT LIVER, SIGNAL = 1.6; EXPRESSED IN BONE MARROW, SIGNAL = 5.7; EXPRESSED IN FETAL LIVER, SIGNAL = 1.8; EXPRESSED IN HELA, SIGNAL = 2.6; EXPRESSED IN LUNG, SIGNAL =   3; EXPRESSED IN PLACENTA, SIGNAL = 1.5; SWISSPROT HIT: P34056, EVALUE 3.00e-30; EST_HUMAN HIT: AI275084.1, EVALUE 8.00e-31
QICKEFADLMAQDRSPLGNSRPALILEPGVQSCLTHFSLITHGFGGPAICAALTAFQNYLLESLKGLDKMFLSSVG

SEQ ID NO: 42204 - protein, 59 aa, Homo sapiens
  MAP TO AC002041.1; EXPRESSED IN BRAIN, SIGNAL = 3.2; EXPRESSED IN PLACENTA, SIGNAL = 2.6; EXPRESSED IN HEART, SIGNAL = 3.2; EXPRESSED IN ADULT LIVER, SIGNAL = 2.7; EXPRESSED IN BONE MARROW, SIGNAL = 2.2; EXPRESSED IN HELA, SIGNAL = 3.1; EXPRESSED IN LUNG, SIGNAL = 2.8; EXPRESSED IN FETAL LIVER, SIGNAL = 3.4; SWISSPROT HIT: P21411, EVALUE 2.70e+00; EST_HUMAN HIT: BE871322.1, EVALUE 1.10e-01
VPLLLFHTHSQSPTNAVGITFTTLMATLPSCWAVAFVPSIHLPLGSHLSPQALLCSHLQ

SEQ ID NO: 42205 - protein, 51 aa, Homo sapiens
  MAP TO AC002041.1; EXPRESSED IN BRAIN, SIGNAL = 3.2; EXPRESSED IN PLACENTA, SIGNAL = 2.6; EXPRESSED IN HEART, SIGNAL = 3.2; EXPRESSED IN ADULT LIVER, SIGNAL = 2.7; EXPRESSED IN BONE MARROW, SIGNAL = 2.2; EXPRESSED IN HELA, SIGNAL = 3.1; EXPRESSED IN LUNG, SIGNAL = 2.8; EXPRESSED IN FETAL LIVER, SIGNAL = 3.4; EST_HUMAN HIT: BE742834.1, EVALUE 3.40e-01; SWISSPROT HIT: Q29026, EVALUE 2.10e+00
LGAQVAAKGQMDGGDKSYSPAGGQGGHEGCKSDANSICGGLAVGVKQQQRN

SEQ ID NO: 42206 - protein, 34 aa, Homo sapiens
  MAP TO AC010457.3; EXPRESSED IN BRAIN, SIGNAL = 1.8; EXPRESSED IN PLACENTA, SIGNAL = 2.4; EXPRESSED IN HELA, SIGNAL =   2; EXPRESSED IN HEART, SIGNAL = 2.2; EXPRESSED IN ADULT LIVER, SIGNAL =   2; EXPRESSED IN BONE MARROW, SIGNAL = 1.6; EXPRESSED IN FETAL LIVER, SIGNAL = 1.8; EXPRESSED IN LUNG, SIGNAL = 2.2; EST_HUMAN HIT: BE048172.1, EVALUE 7.00e-13; SWISSPROT HIT: P98160, EVALUE 2.20e+00
DGQSGKITVDDYGARTGKSPGMMRQLNINGALYV

SEQ ID NO: 42207 - protein, 36 aa, Homo sapiens
  MAP TO AC002039.1; EXPRESSED IN BONE MARROW, SIGNAL = 8.3; EXPRESSED IN FETAL LIVER, SIGNAL =  14; EXPRESSED IN LUNG, SIGNAL = 5.1; EXPRESSED IN BRAIN, SIGNAL =  10; EXPRESSED IN ADULT LIVER, SIGNAL =  10; EXPRESSED IN HELA, SIGNAL =  16; EXPRESSED IN HEART, SIGNAL =  13; EXPRESSED IN PLACENTA, SIGNAL = 8.1; EST_HUMAN HIT: AI561056.1, EVALUE 8.00e-14
LQEQKQDENAAAAGFCPLASCLSCKTRQGGAAASLR

SEQ ID NO: 42208 - protein, 36 aa, Homo sapiens
  MAP TO AC002039.1; EXPRESSED IN BONE MARROW, SIGNAL = 8.3; EXPRESSED IN FETAL LIVER, SIGNAL =  14; EXPRESSED IN LUNG, SIGNAL = 5.1; EXPRESSED IN BRAIN, SIGNAL =  10; EXPRESSED IN ADULT LIVER, SIGNAL =  10; EXPRESSED IN HELA, SIGNAL =  16; EXPRESSED IN HEART, SIGNAL =  13; EXPRESSED IN PLACENTA, SIGNAL = 8.1; EST_HUMAN HIT: AI561056.1, EVALUE 6.00e-14
PETGGCPSLSSLAREAAGKRTEAGSCCVFILFLLLE

SEQ ID NO: 42209 - protein, 42 aa, Homo sapiens
  MAP TO AC017004.2; EXPRESSED IN ADULT LIVER, SIGNAL = 2.6; EXPRESSED IN HEART, SIGNAL = 2.4; EXPRESSED IN PLACENTA, SIGNAL = 2.6; EXPRESSED IN BRAIN, SIGNAL = 2.3; EXPRESSED IN HELA, SIGNAL = 2.6; EXPRESSED IN BONE MARROW, SIGNAL = 1.9; EXPRESSED IN FETAL LIVER, SIGNAL = 2.3; EXPRESSED IN LUNG, SIGNAL = 3.2; EST_HUMAN HIT: BF056837.1, EVALUE 1.00e-20; SWISSPROT HIT: Q06141, EVALUE 2.00e-17
GSEPDGDGWEWSSTDVMNYFAWEKNPSTILNPGHCGSLSRST

SEQ ID NO: 42210 - protein, 50 aa, Homo sapiens
  MAP TO AL133391.5; EXPRESSED IN FETAL LIVER, SIGNAL = 2.7; EXPRESSED IN PLACENTA, SIGNAL = 1.9; EXPRESSED IN BRAIN, SIGNAL =   2; EXPRESSED IN HEART, SIGNAL = 2.5; EXPRESSED IN ADULT LIVER, SIGNAL = 2.6; EXPRESSED IN BONE MARROW, SIGNAL = 2.2; EXPRESSED IN HELA, SIGNAL =   3; SWISSPROT HIT: P19022, EVALUE 7.10e-01
WQPSALRPQLSDQAIKEAAKIRQAVFSHSFLQEAKELKGIMTEVACKRNQ

SEQ ID NO: 42211 - protein, 37 aa, Homo sapiens
  MAP TO AC011366.3; EXPRESSED IN BRAIN, SIGNAL = 2.5; EXPRESSED IN HELA, SIGNAL = 2.9; EXPRESSED IN HEART, SIGNAL = 2.5; EXPRESSED IN ADULT LIVER, SIGNAL = 2.4; EXPRESSED IN FETAL LIVER, SIGNAL = 2.5; EXPRESSED IN PLACENTA, SIGNAL = 2.1; EXPRESSED IN LUNG, SIGNAL = 2.4; EXPRESSED IN BONE MARROW, SIGNAL = 1.7; SWISSPROT HIT: Q10231, EVALUE 4.90e+00
YALCFDEAMYYTGQLGGTGQIYENDFCFKTRELMVEE

SEQ ID NO: 42212 - protein, 34 aa, Homo sapiens
  MAP TO AC011366.3; EXPRESSED IN BRAIN, SIGNAL = 2.5; EXPRESSED IN HELA, SIGNAL = 2.9; EXPRESSED IN HEART, SIGNAL = 2.5; EXPRESSED IN ADULT LIVER, SIGNAL = 2.4; EXPRESSED IN FETAL LIVER, SIGNAL = 2.5; EXPRESSED IN PLACENTA, SIGNAL = 2.1; EXPRESSED IN LUNG, SIGNAL = 2.4; EXPRESSED IN BONE MARROW, SIGNAL = 1.7
MHCVLMKQCTIQGNWEELDKYMKMISVLKPENLW

SEQ ID NO: 42213 - protein, 35 aa, Homo sapiens
  MAP TO AC000134.14; EXPRESSED IN BRAIN, SIGNAL = 2.8; EXPRESSED IN ADULT LIVER, SIGNAL = 2.9; EXPRESSED IN PLACENTA, SIGNAL =   3; EXPRESSED IN LUNG, SIGNAL = 3.1; EXPRESSED IN HEART, SIGNAL = 3.3; EXPRESSED IN HELA, SIGNAL = 3.5; EXPRESSED IN FETAL LIVER, SIGNAL =   4; EXPRESSED IN BONE MARROW, SIGNAL = 2.9; EST_HUMAN HIT: BF128701.1, EVALUE 4.00e-15; SWISSPROT HIT: P12349, EVALUE 8.40e+00
PCPSYQELDSPDDTMGTIKRAPFLGPLPTDPPAEE

SEQ ID NO: 42214 - protein, 23 aa, Homo sapiens
  MAP TO AC000134.14; EXPRESSED IN BRAIN, SIGNAL = 2.8; EXPRESSED IN ADULT LIVER, SIGNAL = 2.9; EXPRESSED IN PLACENTA, SIGNAL =   3; EXPRESSED IN LUNG, SIGNAL = 3.1; EXPRESSED IN HEART, SIGNAL = 3.3; EXPRESSED IN HELA, SIGNAL = 3.5; EXPRESSED IN FETAL LIVER, SIGNAL =   4; EXPRESSED IN BONE MARROW, SIGNAL = 2.9; EST_HUMAN HIT: BF128701.1, EVALUE 5.00e-08
PAPPTRSWTPQTIPWEPSSGPRS

SEQ ID NO: 42215 - protein, 110 aa, Homo sapiens
  MAP TO AC018801.2; EXPRESSED IN BRAIN, SIGNAL = 6.2; EXPRESSED IN HELA, SIGNAL = 4.6; EXPRESSED IN ADULT LIVER, SIGNAL = 5.1; EXPRESSED IN PLACENTA, SIGNAL = 4.8; EXPRESSED IN LUNG, SIGNAL = 7.3; EXPRESSED IN HEART, SIGNAL = 4.5; EXPRESSED IN FETAL LIVER, SIGNAL = 5.4; EXPRESSED IN BONE MARROW, SIGNAL = 5.2; EST_HUMAN HIT: BF507876.1, EVALUE 7.00e-55; SWISSPROT HIT: P34657, EVALUE 3.00e-21
GKTPSNEHAAVWVPDSEATVCMRCQKAKFTPVNRRHHCRKCGFVVCGPCSEKRFLLPSQSSKPVRICDFCYDLLSAGDMATCQPARSDSYSQSLKSPLNDMSDDDDDDDS

SEQ ID NO: 42216 - protein, 35 aa, Homo sapiens
  MAP TO AC018801.2; EXPRESSED IN BRAIN, SIGNAL = 6.2; EXPRESSED IN HELA, SIGNAL = 4.6; EXPRESSED IN ADULT LIVER, SIGNAL = 5.1; EXPRESSED IN PLACENTA, SIGNAL = 4.8; EXPRESSED IN LUNG, SIGNAL = 7.3; EXPRESSED IN HEART, SIGNAL = 4.5; EXPRESSED IN FETAL LIVER, SIGNAL = 5.4; EXPRESSED IN BONE MARROW, SIGNAL = 5.2; EST_HUMAN HIT: BF507876.1, EVALUE 2.00e-13
SPLSLCGFVTSAMTCFLLGTWPHASLLDQTLTASH

SEQ ID NO: 42217 - protein, 35 aa, Homo sapiens
  MAP TO AL138828.4; EXPRESSED IN FETAL LIVER, SIGNAL = 3.9; EXPRESSED IN ADULT LIVER, SIGNAL = 3.2; EXPRESSED IN HEART, SIGNAL = 3.1; EXPRESSED IN BRAIN, SIGNAL = 3.1; EXPRESSED IN PLACENTA, SIGNAL = 2.5; EXPRESSED IN LUNG, SIGNAL = 2.2; EXPRESSED IN HELA, SIGNAL = 3.7; EXPRESSED IN BONE MARROW, SIGNAL = 2.7; SWISSPROT HIT: Q15390, EVALUE 6.00e-03; EST_HUMAN HIT: AV715377.1, EVALUE 5.00e-14
VLLIWENKDYGSTRSIVRIIGKMLPLEPCRRPNFE

SEQ ID NO: 42218 - protein, 31 aa, Homo sapiens
  MAP TO AC015971.2; EXPRESSED IN BONE MARROW, SIGNAL = 2.5; EXPRESSED IN HEART, SIGNAL = 4.5; EXPRESSED IN LUNG, SIGNAL = 3.8; EXPRESSED IN PLACENTA, SIGNAL =   3; EXPRESSED IN BRAIN, SIGNAL =   3; EXPRESSED IN HELA, SIGNAL = 4.2; EXPRESSED IN ADULT LIVER, SIGNAL = 2.9; EXPRESSED IN FETAL LIVER, SIGNAL = 5.2; SWISSPROT HIT: P39188, EVALUE 2.00e-05; EST_HUMAN HIT: AI679053.1, EVALUE 2.00e-08
RQGLTMLPRMVWNSWAQVILLPWLPKMLQLQ

SEQ ID NO: 42219 - protein, 36 aa, Homo sapiens
  MAP TO AL135792.3; EXPRESSED IN ADULT LIVER, SIGNAL = 1.7; EXPRESSED IN FETAL LIVER, SIGNAL = 1.7; EXPRESSED IN HEART, SIGNAL = 1.7; EXPRESSED IN BRAIN, SIGNAL = 1.5; EXPRESSED IN HELA, SIGNAL = 1.7; SWISSPROT HIT: P08547, EVALUE 2.00e-04; EST_HUMAN HIT: AW084069.1, EVALUE 1.00e-05
QSQRMRPQENCRSVSLMNMNVKIPNKILANQIQQYL

SEQ ID NO: 42220 - protein, 89 aa, Homo sapiens
  MAP TO AL137852.2; EXPRESSED IN BRAIN, SIGNAL = 1.6; EXPRESSED IN PLACENTA, SIGNAL = 4.7; EXPRESSED IN HEART, SIGNAL = 2.2; EXPRESSED IN ADULT LIVER, SIGNAL = 1.7; EXPRESSED IN BONE MARROW, SIGNAL = 3.5; EXPRESSED IN HELA, SIGNAL = 2.3; EXPRESSED IN LUNG, SIGNAL = 5.7; EXPRESSED IN FETAL LIVER, SIGNAL = 3.8
PKAVSTPAPATTQQSAPASTTAVTSSTTTTVAQAPTPVPALAPTSTPASITPASATASSEPAPASAAKQEKPAEKPAETPVATSPTATD

SEQ ID NO: 42221 - protein, 77 aa, Homo sapiens
  MAP TO AL121716.16; EXPRESSED IN PLACENTA, SIGNAL = 3.3; EXPRESSED IN HEART, SIGNAL = 3.5; EXPRESSED IN ADULT LIVER, SIGNAL = 3.2; EXPRESSED IN BRAIN, SIGNAL =   4; EXPRESSED IN LUNG, SIGNAL = 4.1; EXPRESSED IN HELA, SIGNAL = 3.5; EXPRESSED IN FETAL LIVER, SIGNAL = 3.3; EXPRESSED IN BONE MARROW, SIGNAL = 2.7; SWISSPROT HIT: Q9Y3R5, EVALUE 2.00e-08; EST_HUMAN HIT: AA625526.1, EVALUE 1.00e-35
SLFIMLDSLNSLDGSTSSVGQAWLNQVLQRHDIARVLEPLLLLLLHPKTQRVSVQRVQAERYWNKSPCYPGEESDKH

SEQ ID NO: 42222 - protein, 50 aa, Homo sapiens
  MAP TO AC009144.4; EXPRESSED IN PLACENTA, SIGNAL =  21; EXPRESSED IN BRAIN, SIGNAL =  27; EXPRESSED IN HEART, SIGNAL =  51; EXPRESSED IN HELA, SIGNAL =  22; EXPRESSED IN BONE MARROW, SIGNAL =  20; EXPRESSED IN FETAL LIVER, SIGNAL =  23; EXPRESSED IN LUNG, SIGNAL =  26; EXPRESSED IN ADULT LIVER, SIGNAL =  33; EST_HUMAN HIT: N42483.1, EVALUE 7.00e-25; SWISSPROT HIT: Q56308, EVALUE 8.20e-02
YYGCGLVIPEHLENCWILDLGSGSGRDCYVLSQLVGEKGHVTGIDMTKGQ

SEQ ID NO: 42223 - protein, 51 aa, Homo sapiens
  MAP TO AC008882.3; EXPRESSED IN BRAIN, SIGNAL = 6.2; EXPRESSED IN PLACENTA, SIGNAL = 4.5; EXPRESSED IN FETAL LIVER, SIGNAL = 6.3; EXPRESSED IN BONE MARROW, SIGNAL = 4.4; EXPRESSED IN HELA, SIGNAL = 6.2; EXPRESSED IN HEART, SIGNAL =   5; EXPRESSED IN LUNG, SIGNAL = 2.4; EXPRESSED IN ADULT LIVER, SIGNAL = 6.7; SWISSPROT HIT: P09122, EVALUE 3.60e+00
  unsure 39
  unsure 41
  unsure 43
  unsure 46
  unsure 51
AGVQLDWLNFVKAAADSPSRPSPRLCKGRKFACAWAACXAXCXRKXGWDYX

SEQ ID NO: 42224 - protein, 19 aa, Homo sapiens
  MAP TO AL132821.17; EXPRESSED IN BONE MARROW, SIGNAL =  17; EXPRESSED IN LUNG, SIGNAL =  31; EXPRESSED IN BRAIN, SIGNAL = 5.5; EXPRESSED IN PLACENTA, SIGNAL = 4.1; EXPRESSED IN ADULT LIVER, SIGNAL = 7.1; EXPRESSED IN FETAL LIVER, SIGNAL = 8.6; EXPRESSED IN HELA, SIGNAL =  11; EXPRESSED IN HEART, SIGNAL = 5.6; SWISSPROT HIT: P30050, EVALUE 1.00e-04; EST_HUMAN HIT: BF541382.1, EVALUE 2.00e-03
MLPKFDPNEIKVVYLRCTG

SEQ ID NO: 42225 - protein, 27 aa, Homo sapiens
  MAP TO AL132821.17; EXPRESSED IN BONE MARROW, SIGNAL =  17; EXPRESSED IN LUNG, SIGNAL =  31; EXPRESSED IN BRAIN, SIGNAL = 5.5; EXPRESSED IN PLACENTA, SIGNAL = 4.1; EXPRESSED IN ADULT LIVER, SIGNAL = 7.1; EXPRESSED IN FETAL LIVER, SIGNAL = 8.6; EXPRESSED IN HELA, SIGNAL =  11; EXPRESSED IN HEART, SIGNAL = 5.6; EST_HUMAN HIT: AW134816.1, EVALUE 3.00e-08
SDTSCLHHAAEVRPERDQSRIPEVHRR

SEQ ID NO: 42226 - protein, 62 aa, Homo sapiens
  MAP TO AC017016.3; EXPRESSED IN BRAIN, SIGNAL = 2.1; EXPRESSED IN ADULT LIVER, SIGNAL =   2; EXPRESSED IN BONE MARROW, SIGNAL = 1.9; EXPRESSED IN FETAL LIVER, SIGNAL = 1.8; EXPRESSED IN HEART, SIGNAL = 1.8; EXPRESSED IN PLACENTA, SIGNAL =   2; SWISSPROT HIT: P26810, EVALUE 4.00e-09; EST_HUMAN HIT: H61604.1, EVALUE 7.00e-24
DEEPIEHDSQQIIVQTYATRDDLLEVPLANPDLNLYADGSSFVENGIRRSGYAIVTDVAVLE

SEQ ID NO: 42227 - protein, 60 aa, Homo sapiens
  MAP TO AL136080.6; EXPRESSED IN PLACENTA, SIGNAL = 1.4; EXPRESSED IN HEART, SIGNAL = 1.8; EXPRESSED IN ADULT LIVER, SIGNAL =   2; EXPRESSED IN BONE MARROW, SIGNAL = 1.6; EXPRESSED IN FETAL LIVER, SIGNAL = 2.1; EXPRESSED IN HELA, SIGNAL = 2.2; EXPRESSED IN BRAIN, SIGNAL = 1.6; SWISSPROT HIT: Q14031, EVALUE 5.00e-18; EST_HUMAN HIT: AV692713.1, EVALUE 4.00e-06
DKGEAGRPGPPGLPGAPGLPGIIKGVSGKPGPPGFMGIRGLPGLKGSSGITGFPGMPGES

SEQ ID NO: 42228 - protein, 35 aa, Homo sapiens
  MAP TO AC007501.2; EXPRESSED IN BRAIN, SIGNAL =  12; EXPRESSED IN PLACENTA, SIGNAL = 9.3; EXPRESSED IN HEART, SIGNAL =  13; EXPRESSED IN HELA, SIGNAL =  12; EXPRESSED IN ADULT LIVER, SIGNAL = 8.4; EXPRESSED IN BONE MARROW, SIGNAL = 8.2; EXPRESSED IN FETAL LIVER, SIGNAL =  18; EXPRESSED IN LUNG, SIGNAL = 5.7
NVHGFDAVIAINMKNTTTVLIRTSQLFCLIAQVIV

SEQ ID NO: 42229 - protein, 66 aa, Homo sapiens
  MAP TO AC011467.3; EXPRESSED IN PLACENTA, SIGNAL = 2.3; EXPRESSED IN FETAL LIVER, SIGNAL = 4.1; EXPRESSED IN ADULT LIVER, SIGNAL = 2.5; EXPRESSED IN BRAIN, SIGNAL = 2.7; EXPRESSED IN LUNG, SIGNAL = 1.7; EXPRESSED IN HEART, SIGNAL = 3.1; EXPRESSED IN HELA, SIGNAL = 3.5; EXPRESSED IN BONE MARROW, SIGNAL = 2.4; SWISSPROT HIT: P22607, EVALUE 2.60e+00; EST_HUMAN HIT: AW892130.1, EVALUE 9.80e+00
RSRPALMCPCRVLSSLAILHTWLLVNQTVVLGGEVKLRCEVCRDLAFGGEQQQGGHQCHALLTMLK

SEQ ID NO: 42230 - protein, 54 aa, Homo sapiens
  MAP TO AL117692.1; EXPRESSED IN BRAIN, SIGNAL = 5.4; EXPRESSED IN PLACENTA, SIGNAL = 5.6; EXPRESSED IN BONE MARROW, SIGNAL = 8.2; EXPRESSED IN FETAL LIVER, SIGNAL =   7; EXPRESSED IN HELA, SIGNAL = 3.1; EXPRESSED IN HEART, SIGNAL =  13; EXPRESSED IN LUNG, SIGNAL =  28; EXPRESSED IN ADULT LIVER, SIGNAL =  12; EST_HUMAN HIT: AA130933.1, EVALUE 1.00e-04
LTPGSSQTSTTTQLASTLLKIYPTSTTPWSQTATSGVEANMLSLQSALSSTKNL

SEQ ID NO: 42231 - protein, 80 aa, Homo sapiens; identical to SEQ ID NO: 41025
  MAP TO AL157957.1; EXPRESSED IN PLACENTA, SIGNAL = 1.5; EXPRESSED IN FETAL LIVER, SIGNAL = 1.8; EXPRESSED IN HELA, SIGNAL = 2.1; EXPRESSED IN HEART, SIGNAL = 1.8; EST_HUMAN HIT: AA504795.1, EVALUE 1.00e-27; SWISSPROT HIT: P32542, EVALUE 1.60e+00

SEQ ID NO: 42232 - protein, 53 aa, Homo sapiens; identical to SEQ ID NO: 41026
  MAP TO AL157957.1; EXPRESSED IN PLACENTA, SIGNAL = 1.5; EXPRESSED IN FETAL LIVER, SIGNAL = 1.8; EXPRESSED IN HELA, SIGNAL = 2.1; EXPRESSED IN HEART, SIGNAL = 1.8; EST_HUMAN HIT: AW665795.1, EVALUE 3.00e-03

SEQ ID NO: 42233 - protein, 35 aa, Homo sapiens [sequence omitted]

SEQ ID NO: 42234 - protein, 48 aa, Homo sapiens
  MAP TO AL138725.4; EXPRESSED IN BRAIN, SIGNAL = 3.4; EXPRESSED IN PLACENTA, SIGNAL =   3; EXPRESSED IN ADULT LIVER, SIGNAL = 2.8; EXPRESSED IN BONE MARROW, SIGNAL = 2.7; EXPRESSED IN FETAL LIVER, SIGNAL = 3.4; EXPRESSED IN HELA, SIGNAL = 3.2; EXPRESSED IN HEART, SIGNAL = 3.2; EXPRESSED IN LUNG, SIGNAL = 5.2; SWISSPROT HIT: P50876, EVALUE 2.00e-18; EST_HUMAN HIT: BF331571.1, EVALUE 3.00e-20
ALFGTDAEAPIKQCPVCRVYIERNEGCAQMMCKNCKHTFCWYCLQNLD

SEQ ID NO: 42235 - protein, 29 aa, Homo sapiens
  MAP TO AL138725.4; EXPRESSED IN BRAIN, SIGNAL = 3.4; EXPRESSED IN PLACENTA, SIGNAL =   3; EXPRESSED IN ADULT LIVER, SIGNAL = 2.8; EXPRESSED IN BONE MARROW, SIGNAL = 2.7; EXPRESSED IN FETAL LIVER, SIGNAL = 3.4; EXPRESSED IN HELA, SIGNAL = 3.2; EXPRESSED IN HEART, SIGNAL = 3.2; EXPRESSED IN LUNG, SIGNAL = 5.2; EST_HUMAN HIT: BF038505.1, EVALUE 7.00e-09
PSLGQMQKPPLSSAQFAGFISNAMKAALR

SEQ ID NO: 42236 - protein, 32 aa, Homo sapiens
  MAP TO AF233439.1; EXPRESSED IN ADULT LIVER, SIGNAL = 3.1; EXPRESSED IN HELA, SIGNAL = 2.8; EXPRESSED IN HEART, SIGNAL = 2.4; EXPRESSED IN BRAIN, SIGNAL = 2.9; EXPRESSED IN PLACENTA, SIGNAL = 1.8; EXPRESSED IN BONE MARROW, SIGNAL = 4.1; EXPRESSED IN LUNG, SIGNAL = 4.8; EXPRESSED IN FETAL LIVER, SIGNAL =   3
MSREITLTRMGGRLNRMGGRLNRMGGRLNRMG

SEQ ID NO: 42237 - protein, 30 aa, Homo sapiens
  MAP TO AC023404.2; EXPRESSED IN PLACENTA, SIGNAL = 1.6; EXPRESSED IN BRAIN, SIGNAL = 1.9; EXPRESSED IN BONE MARROW, SIGNAL = 2.6; EXPRESSED IN FETAL LIVER, SIGNAL = 2.5; EXPRESSED IN HELA, SIGNAL = 2.3; EXPRESSED IN LUNG, SIGNAL = 2.9; EXPRESSED IN ADULT LIVER, SIGNAL = 2.1; EXPRESSED IN HEART, SIGNAL = 2.1; EST_HUMAN HIT: AA251511.1, EVALUE 2.00e-09
WIQTKKKSLNCQKKNSEGQLLSYSRRHQRK

SEQ ID NO: 42238 - protein, 35 aa, Homo sapiens
  MAP TO AC020557.2; EXPRESSED IN BRAIN, SIGNAL = 4.6; EXPRESSED IN HELA, SIGNAL =   4; EXPRESSED IN ADULT LIVER, SIGNAL = 2.7; EXPRESSED IN HEART, SIGNAL = 3.6; EXPRESSED IN LUNG, SIGNAL = 3.5; EXPRESSED IN PLACENTA, SIGNAL =   3; EXPRESSED IN FETAL LIVER, SIGNAL = 4.7; EXPRESSED IN BONE MARROW, SIGNAL = 2.5
SVIGVRLAVGEEKEEEVMAPVKLQGLGASGAGSGL

SEQ ID NO: 42239 - protein, 35 aa, Homo sapiens
  MAP TO AC020557.2; EXPRESSED IN BRAIN, SIGNAL = 4.6; EXPRESSED IN HELA, SIGNAL =   4; EXPRESSED IN ADULT LIVER, SIGNAL = 2.7; EXPRESSED IN HEART, SIGNAL = 3.6; EXPRESSED IN LUNG, SIGNAL = 3.5; EXPRESSED IN PLACENTA, SIGNAL =   3; EXPRESSED IN FETAL LIVER, SIGNAL = 4.7; EXPRESSED IN BONE MARROW, SIGNAL = 2.5
WRPLPAPLAPSPCSFTGAITSSSFSSPTAKRTPMT

SEQ ID NO: 42240 - protein, 30 aa, Homo sapiens
  MAP TO AC024496.2; EXPRESSED IN BRAIN, SIGNAL = 1.5; EXPRESSED IN PLACENTA, SIGNAL = 1.5; EXPRESSED IN BONE MARROW, SIGNAL = 1.7; EXPRESSED IN HELA, SIGNAL = 1.9; EXPRESSED IN HEART, SIGNAL = 1.8; EXPRESSED IN FETAL LIVER, SIGNAL = 1.9; EXPRESSED IN ADULT LIVER, SIGNAL = 1.8
TYLLLLTPSSPLCSITSLSPSPTDFTSQTL

SEQ ID NO: 42241 - protein, 82 aa, Homo sapiens
  MAP TO AL136418.1; EXPRESSED IN BRAIN, SIGNAL =   2; EXPRESSED IN PLACENTA, SIGNAL = 1.8; EXPRESSED IN HEART, SIGNAL =   3; EXPRESSED IN ADULT LIVER, SIGNAL = 2.2; EXPRESSED IN BONE MARROW, SIGNAL = 1.7; EXPRESSED IN FETAL LIVER, SIGNAL =   3; EXPRESSED IN LUNG, SIGNAL = 2.3; EXPRESSED IN HELA, SIGNAL = 3.3; EST_HUMAN HIT: AW178490.1, EVALUE 3.00e-15; SWISSPROT HIT: Q09929, EVALUE 7.20e+00
GAFYTAETSENAKLHYYNSWALILHATALWLTSTGFVVADPDEGASNLSRPVTPTSMCQGSSSGATIKSPEDVYTDRFHLIL

SEQ ID NO: 42242 - protein, 52 aa, Homo sapiens
  MAP TO AL136418.1; EXPRESSED IN BRAIN, SIGNAL =   2; EXPRESSED IN PLACENTA, SIGNAL = 1.8; EXPRESSED IN HEART, SIGNAL =   3; EXPRESSED IN ADULT LIVER, SIGNAL = 2.2; EXPRESSED IN BONE MARROW, SIGNAL = 1.7; EXPRESSED IN FETAL LIVER, SIGNAL =   3; EXPRESSED IN LUNG, SIGNAL = 2.3; EXPRESSED IN HELA, SIGNAL = 3.3; SWISSPROT HIT: P47122, EVALUE 3.60e+00
VVLSTQQRLVKMQNCIITTPGHLSSMLQHCGLQARVLLLLTQMKEHLISPGL

SEQ ID NO: 42243 - protein, 68 aa, Homo sapiens
  MAP TO AC021097.3; EXPRESSED IN BRAIN, SIGNAL = 2.6; EXPRESSED IN LUNG, SIGNAL = 3.7; EXPRESSED IN PLACENTA, SIGNAL = 2.8; EXPRESSED IN HEART, SIGNAL = 2.6; EXPRESSED IN HELA, SIGNAL = 2.6; EXPRESSED IN FETAL LIVER, SIGNAL = 2.7; EXPRESSED IN BONE MARROW, SIGNAL = 2.5; EXPRESSED IN ADULT LIVER, SIGNAL = 2.6; EST_HUMAN HIT: AA922198.1, EVALUE 7.40e-02; SWISSPROT HIT: Q00071, EVALUE 2.30e-01
SHVLEELTCSFGPQLPPRGSLLELFLPGPATGEGPRQRGSSSPAASLMPPVFPSQSIQGNRQGSHEHE

SEQ ID NO: 42244 - protein, 33 aa, Homo sapiens
  MAP TO AC006946.20; EXPRESSED IN BRAIN, SIGNAL = 1.5; EXPRESSED IN HELA, SIGNAL = 2.1; EXPRESSED IN ADULT LIVER, SIGNAL = 1.7; EXPRESSED IN HEART, SIGNAL = 1.7; EXPRESSED IN PLACENTA, SIGNAL = 1.8; EXPRESSED IN LUNG, SIGNAL = 1.7; EXPRESSED IN FETAL LIVER, SIGNAL = 1.8; EXPRESSED IN BONE MARROW, SIGNAL = 1.6
YMPLWVYWFITGISILLVGSVILLIVCMTWRLA

SEQ ID NO: 42245 - protein, 79 aa, Homo sapiens
  MAP TO AC007342.2; EXPRESSED IN ADULT LIVER, SIGNAL = 3.4; EXPRESSED IN BONE MARROW, SIGNAL = 3.4; EXPRESSED IN FETAL LIVER, SIGNAL = 3.6; EXPRESSED IN BRAIN, SIGNAL = 4.2; EXPRESSED IN PLACENTA, SIGNAL = 3.1; EXPRESSED IN HELA, SIGNAL = 4.1; EXPRESSED IN HEART, SIGNAL = 3.5; EXPRESSED IN LUNG, SIGNAL = 6.1; SWISSPROT HIT: Q08999, EVALUE 8.00e-34; EST_HUMAN HIT: BE925857.1, EVALUE 1.00e-31
YSSPPASTTRRRLFVENDSPSDGGTPGRMPPQPLVNAVPVQNVSGETVSVTPVPGQTLVTMATATVTANNGQTVTIPVQ

SEQ ID NO: 42246 - protein, 33 aa, Homo sapiens
  MAP TO AC007342.2; EXPRESSED IN ADULT LIVER, SIGNAL = 3.4; EXPRESSED IN BONE MARROW, SIGNAL = 3.4; EXPRESSED IN FETAL LIVER, SIGNAL = 3.6; EXPRESSED IN BRAIN, SIGNAL = 4.2; EXPRESSED IN PLACENTA, SIGNAL = 3.1; EXPRESSED IN HELA, SIGNAL = 4.1; EXPRESSED IN HEART, SIGNAL = 3.5; EXPRESSED IN LUNG, SIGNAL = 6.1; EST_HUMAN HIT: BE925857.1, EVALUE 7.00e-13
TAPHQPALPEGGYLLRMIAPLMEGRLGACPHSP

SEQ ID NO: 42247 - protein, 27 aa, Homo sapiens
  MAP TO AL133380.3; EXPRESSED IN PLACENTA, SIGNAL = 2.1; EXPRESSED IN BRAIN, SIGNAL = 2.4; EXPRESSED IN HELA, SIGNAL = 2.3; EXPRESSED IN FETAL LIVER, SIGNAL = 1.9; EXPRESSED IN ADULT LIVER, SIGNAL = 2.1; EXPRESSED IN BONE MARROW, SIGNAL =   2; EXPRESSED IN HEART, SIGNAL = 3.6; EXPRESSED IN LUNG, SIGNAL = 1.8; SWISSPROT HIT: P49263, EVALUE 3.80e+00
YKEEIGTRLAAVFQDKDCCHTGERMGP

SEQ ID NO: 42248 - protein, 28 aa, Homo sapiens
  MAP TO AL133380.3; EXPRESSED IN PLACENTA, SIGNAL = 2.1; EXPRESSED IN BRAIN, SIGNAL = 2.4; EXPRESSED IN HELA, SIGNAL = 2.3; EXPRESSED IN FETAL LIVER, SIGNAL = 1.9; EXPRESSED IN ADULT LIVER, SIGNAL = 2.1; EXPRESSED IN BONE MARROW, SIGNAL =   2; EXPRESSED IN HEART, SIGNAL = 3.6; EXPRESSED IN LUNG, SIGNAL = 1.8
FTRRKLEQGWLLCFKTKTAATPGRGWGQ

SEQ ID NO: 42249 - protein, 81 aa, Homo sapiens
  MAP TO AC011465.4; EXPRESSED IN BONE MARROW, SIGNAL = 2.9; EXPRESSED IN HEART, SIGNAL = 3.4; EXPRESSED IN LUNG, SIGNAL = 2.7; EXPRESSED IN PLACENTA, SIGNAL = 2.9; EXPRESSED IN BRAIN, SIGNAL = 2.8; EXPRESSED IN HELA, SIGNAL = 3.6; EXPRESSED IN ADULT LIVER, SIGNAL = 3.2; EXPRESSED IN FETAL LIVER, SIGNAL = 3.5; SWISSPROT HIT: O15303, EVALUE 1.20e+00; EST_HUMAN HIT: BE292968.1, EVALUE 4.00e-34
AATHSQRDSINLWVRSCPSSAQNPPPIHVRKRPQSLADLLWNSLTSAPPCPLFIVATEAGVSRYLTVIITRFSMMMITDGE

SEQ ID NO: 42250 - protein, 36 aa, Homo sapiens
  MAP TO AC008407.3; EXPRESSED IN PLACENTA, SIGNAL = 5.2; EXPRESSED IN FETAL LIVER, SIGNAL =  11; EXPRESSED IN HELA, SIGNAL =  12; EXPRESSED IN ADULT LIVER, SIGNAL = 6.4; EXPRESSED IN HEART, SIGNAL =  11; EXPRESSED IN BRAIN, SIGNAL = 6.9; EXPRESSED IN LUNG, SIGNAL = 4.9; EXPRESSED IN BONE MARROW, SIGNAL = 5.8
TDLNVLQAAIKNGSSCMTLLWSSLYYVEKCVGGNEE

SEQ ID NO: 42251 - protein, 40 aa, Homo sapiens
  MAP TO AC008649.3; EXPRESSED IN BRAIN, SIGNAL = 2.8; EXPRESSED IN PLACENTA, SIGNAL = 2.4; EXPRESSED IN FETAL LIVER, SIGNAL = 2.5; EXPRESSED IN HELA, SIGNAL = 2.3; EXPRESSED IN BONE MARROW, SIGNAL = 2.2; EXPRESSED IN LUNG, SIGNAL = 8.7; EXPRESSED IN HEART, SIGNAL = 4.9; SWISSPROT HIT: P47107, EVALUE 4.80e+00; EST_HUMAN HIT: AV711036.1, EVALUE 2.00e-17
YQFNPAFFQTTVTAQILLKALTNLPHTDFTLCKCMIDQAH

SEQ ID NO: 42252 - protein, 17 aa, Homo sapiens
  MAP TO AC008649.3; EXPRESSED IN BRAIN, SIGNAL = 2.8; EXPRESSED IN PLACENTA, SIGNAL = 2.4; EXPRESSED IN FETAL LIVER, SIGNAL = 2.5; EXPRESSED IN HELA, SIGNAL = 2.3; EXPRESSED IN BONE MARROW, SIGNAL = 2.2; EXPRESSED IN LUNG, SIGNAL = 8.7; EXPRESSED IN HEART, SIGNAL = 4.9
TSSTQPSFRPRSPPRSC

SEQ ID NO: 42253 - protein, 28 aa, Homo sapiens
  MAP TO AL136117.2; EXPRESSED IN BRAIN, SIGNAL = 8.4; EXPRESSED IN HELA, SIGNAL =  15; EXPRESSED IN ADULT LIVER, SIGNAL =  11; EXPRESSED IN FETAL LIVER, SIGNAL =  14; EXPRESSED IN BONE MARROW, SIGNAL = 9.3; EXPRESSED IN HEART, SIGNAL =  11; EXPRESSED IN LUNG, SIGNAL = 8.1; EXPRESSED IN PLACENTA, SIGNAL = 9.1; SWISSPROT HIT: P53894, EVALUE 1.00e-04; EST_HUMAN HIT: BE886996.1, EVALUE 2.00e-08
VRLVQKKDTGHVYAMKILRKADMLEKEQ

SEQ ID NO: 42254 - protein, 78 aa, Homo sapiens
  MAP TO AC023109.2; EXPRESSED IN BRAIN, SIGNAL = 1.6; EXPRESSED IN ADULT LIVER, SIGNAL = 1.9; EXPRESSED IN HEART, SIGNAL = 2.1; EXPRESSED IN LUNG, SIGNAL = 2.3; SWISSPROT HIT: P20840, EVALUE 1.20e+00; EST_HUMAN HIT: BF036073.1, EVALUE 1.00e-03
SCQHWGTVRGRFAGVCICTHTGSSSAVGVLVGMGITGLHVHIHGGHSTGLGKVTGVHVCVYNGGGVIMGGAEPLASMH

SEQ ID NO: 42255 - protein, 48 aa, Homo sapiens
  MAP TO AL121953.10; EXPRESSED IN BRAIN, SIGNAL = 1.8; EXPRESSED IN HELA, SIGNAL = 2.1; EXPRESSED IN ADULT LIVER, SIGNAL = 1.9; EXPRESSED IN FETAL LIVER, SIGNAL = 1.9; EXPRESSED IN HEART, SIGNAL = 2.4; EXPRESSED IN BONE MARROW, SIGNAL = 1.7; EST_HUMAN HIT: AA022616.1, EVALUE 4.00e-10
AEENLGMVMIFTLVTAVQEKLNEIVDQIKTRREEEKKQKEKEAEEAEK

SEQ ID NO: 42256 - protein, 17 aa, Homo sapiens
  MAP TO AL122023.2; EXPRESSED IN HEART, SIGNAL = 2.2; EXPRESSED IN BRAIN, SIGNAL = 1.5; EXPRESSED IN PLACENTA, SIGNAL = 2.3; EXPRESSED IN FETAL LIVER, SIGNAL = 1.9; EXPRESSED IN HELA, SIGNAL = 2.7; EST_HUMAN HIT: AA403053.1, EVALUE 1.90e-01
LVSSCGHFPSARMHNWH

SEQ ID NO: 42257 - protein, 37 aa, Homo sapiens
  MAP TO AC008891.4; EXPRESSED IN PLACENTA, SIGNAL = 1.5; EXPRESSED IN BONE MARROW, SIGNAL = 1.9; EXPRESSED IN HELA, SIGNAL = 2.5; EXPRESSED IN LUNG, SIGNAL = 2.4; EXPRESSED IN ADULT LIVER, SIGNAL = 2.3; EXPRESSED IN HEART, SIGNAL = 2.2; EXPRESSED IN BRAIN, SIGNAL = 2.4; EXPRESSED IN FETAL LIVER, SIGNAL =   2; EST_HUMAN HIT: AA455860.1, EVALUE 1.70e-01; SWISSPROT HIT: O94759, EVALUE 1.00e-04
CGSSEASAYLDELRLAVAWNRVDIAQSELFRGDIQWR

SEQ ID NO: 42258 - protein, 37 aa, Homo sapiens
  MAP TO AC008891.4; EXPRESSED IN PLACENTA, SIGNAL = 1.5; EXPRESSED IN BONE MARROW, SIGNAL = 1.9; EXPRESSED IN HELA, SIGNAL = 2.5; EXPRESSED IN LUNG, SIGNAL = 2.4; EXPRESSED IN ADULT LIVER, SIGNAL = 2.3; EXPRESSED IN HEART, SIGNAL = 2.2; EXPRESSED IN BRAIN, SIGNAL = 2.4; EXPRESSED IN FETAL LIVER, SIGNAL =   2; EST_HUMAN HIT: BE613975.1, EVALUE 4.90e-01
PVGARRPQPTWMSCVWLWLGTAWTLPRVNSFGGTSNG

SEQ ID NO: 42259 - protein, 69 aa, Homo sapiens
  MAP TO AC023154.3; EXPRESSED IN BRAIN, SIGNAL = 3.8; EXPRESSED IN HELA, SIGNAL = 5.7; EXPRESSED IN LUNG, SIGNAL = 3.3; EXPRESSED IN PLACENTA, SIGNAL = 3.5; EXPRESSED IN HEART, SIGNAL = 4.3; EXPRESSED IN FETAL LIVER, SIGNAL = 4.2; EXPRESSED IN BONE MARROW, SIGNAL = 3.3; EXPRESSED IN ADULT LIVER, SIGNAL =   4; EST_HUMAN HIT: AW966185.1, EVALUE 2.00e-25; SWISSPROT HIT: P55041, EVALUE 8.00e-04
VHENSLSCSEQLNRCIRWADAVVIVFSITDYKSYELISQLHQHVQQLHLGTRLPVVVVANKADLLHIKQ

SEQ ID NO: 42260 - protein, 71 aa, Homo sapiens
  MAP TO AC011497.3; EXPRESSED IN BRAIN, SIGNAL = 3.3; EXPRESSED IN PLACENTA, SIGNAL = 2.5; EXPRESSED IN FETAL LIVER, SIGNAL = 3.5; EXPRESSED IN HELA, SIGNAL = 2.7; EXPRESSED IN ADULT LIVER, SIGNAL = 2.7; EXPRESSED IN BONE MARROW, SIGNAL = 2.7; EXPRESSED IN HEART, SIGNAL =   4; EXPRESSED IN LUNG, SIGNAL = 2.7; EST_HUMAN HIT: AW499676.1, EVALUE 8.00e-15; SWISSPROT HIT: P98164, EVALUE 9.90e-02
ASTPRCKWCTNCPEGACIGRNGSCTSENDCRINQREVFWAGNCSEAACGAADCEQCTREGKCMWTRQFKRT

SEQ ID NO: 42261 - protein, 71 aa, Homo sapiens
  MAP TO AC011497.3; EXPRESSED IN BRAIN, SIGNAL = 3.3; EXPRESSED IN PLACENTA, SIGNAL = 2.5; EXPRESSED IN FETAL LIVER, SIGNAL = 3.5; EXPRESSED IN HELA, SIGNAL = 2.7; EXPRESSED IN ADULT LIVER, SIGNAL = 2.7; EXPRESSED IN BONE MARROW, SIGNAL = 2.7; EXPRESSED IN HEART, SIGNAL =   4; EXPRESSED IN LUNG, SIGNAL = 2.7; SWISSPROT HIT: P53624, EVALUE 8.70e-01; EST_HUMAN HIT: AW499676.1, EVALUE 9.40e-02
RPPPAVSGVPTAPKVLALDAMGPAPLRMTVGSTSERSSGQGTAPRLRAGLLTASSARGRASACGRGSSRGQ

SEQ ID NO: 42262 - protein, 71 aa, Homo sapiens
  MAP TO AC011489.3; EXPRESSED IN ADULT LIVER, SIGNAL = 9.1; EXPRESSED IN PLACENTA, SIGNAL = 6.1; EXPRESSED IN BONE MARROW, SIGNAL = 6.4; EXPRESSED IN FETAL LIVER, SIGNAL = 9.1; EXPRESSED IN LUNG, SIGNAL =   7; EXPRESSED IN HEART, SIGNAL = 6.1; EXPRESSED IN BRAIN, SIGNAL = 6.2; EXPRESSED IN HELA, SIGNAL =  10; EST_HUMAN HIT: AA311427.1, EVALUE 5.00e-24; SWISSPROT HIT: P51724, EVALUE 3.40e+00
CSAQHYVTLASWCSKAGPVRSLRCLLGRLASTAASRSTWLVLTSLLGRNIKITACHLIMWVSPASKGMTPS

SEQ ID NO: 42263 - protein, 50 aa, Homo sapiens
  MAP TO AL117258.2; EXPRESSED IN BRAIN, SIGNAL = 8.7; EXPRESSED IN ADULT LIVER, SIGNAL = 9.1; EXPRESSED IN BONE MARROW, SIGNAL = 8.3; EXPRESSED IN HELA, SIGNAL =  12; EXPRESSED IN HEART, SIGNAL =  11; EXPRESSED IN PLACENTA, SIGNAL = 7.6; EXPRESSED IN LUNG, SIGNAL = 7.1; EXPRESSED IN FETAL LIVER, SIGNAL =  11; EST_HUMAN HIT: N46160.1, EVALUE 3.00e-19; SWISSPROT HIT: P77504, EVALUE 2.70e+00
FLRLWIAVLVIYPTNQAVIALTFSNYVLQPLFPTCFPPESRFGSWLPSAY

SEQ ID NO: 42264 - protein, 49 aa, Homo sapiens [sequence omitted]

SEQ ID NO: 42265 - protein, 51 aa, Homo sapiens
  MAP TO AC010582.6; EXPRESSED IN BRAIN, SIGNAL =  10; EXPRESSED IN PLACENTA, SIGNAL = 3.8; EXPRESSED IN FETAL LIVER, SIGNAL = 4.9; EXPRESSED IN HELA, SIGNAL = 5.5; EXPRESSED IN ADULT LIVER, SIGNAL = 1.5; EXPRESSED IN BONE MARROW, SIGNAL = 6.5; EXPRESSED IN HEART, SIGNAL = 3.1; EXPRESSED IN LUNG, SIGNAL =  11; EST_HUMAN HIT: AA092795.1, EVALUE 1.00e-20
FLHGNHVRPKGRDQKCGHVGGDATELSGVRSSGAGEIQHREEHCGSYQEGM

SEQ ID NO: 42266 - protein, 32 aa, Homo sapiens
  MAP TO AC008458.3; EXPRESSED IN BRAIN, SIGNAL = 2.5; EXPRESSED IN ADULT LIVER, SIGNAL = 4.4; EXPRESSED IN BONE MARROW, SIGNAL =   2; EXPRESSED IN HELA, SIGNAL = 2.6; EXPRESSED IN LUNG, SIGNAL = 2.6; EXPRESSED IN HEART, SIGNAL = 2.9; EXPRESSED IN PLACENTA, SIGNAL = 3.4; EXPRESSED IN FETAL LIVER, SIGNAL = 3.7; EST_HUMAN HIT: AI798167.1, EVALUE 4.00e-14
VSHFSHQHYQQSWRAYHLWDIHLGSEDKKAAC

SEQ ID NO: 42267 - protein, 63 aa, Homo sapiens
  MAP TO AL135931.4; EXPRESSED IN BRAIN, SIGNAL = 4.2; EXPRESSED IN FETAL LIVER, SIGNAL = 4.7; EXPRESSED IN HELA, SIGNAL = 4.9; EXPRESSED IN HEART, SIGNAL = 3.7; EXPRESSED IN PLACENTA, SIGNAL = 3.8; EXPRESSED IN LUNG, SIGNAL = 6.3; EXPRESSED IN BONE MARROW, SIGNAL = 4.1; EXPRESSED IN ADULT LIVER, SIGNAL = 4.8; EST_HUMAN HIT: R62689.1, EVALUE 3.00e-08
DLNSLPCPLKKERSSWEGSTLTPTSRCWKTTSAASGLSLRWSLSRRLSGPGVLVSSPSPTQTP

SEQ ID NO: 42268 - protein, 64 aa, Homo sapiens
  MAP TO AC008917.3; EXPRESSED IN BRAIN, SIGNAL = 2.4; EXPRESSED IN PLACENTA, SIGNAL = 1.9; EXPRESSED IN ADULT LIVER, SIGNAL =   2; EXPRESSED IN BONE MARROW, SIGNAL = 2.9; EXPRESSED IN HELA, SIGNAL = 2.3; EXPRESSED IN FETAL LIVER, SIGNAL = 2.1; EXPRESSED IN HEART, SIGNAL = 2.1; EST_HUMAN HIT: BE893569.1, EVALUE 4.00e-31; SWISSPROT HIT: P54316, EVALUE 5.90e+00
LLDFLDQHPFSFTPLIQRSLEFSVSYVFTEVGEGVTFERFIVQCMNLIKMIVKNYAYKPSKNFE

SEQ ID NO: 42269 - protein, 148 aa, Homo sapiens
  MAP TO AL132819.1; EXPRESSED IN PLACENTA, SIGNAL = 2.1; EXPRESSED IN BRAIN, SIGNAL = 1.4; EXPRESSED IN BONE MARROW, SIGNAL = 2.3; EXPRESSED IN FETAL LIVER, SIGNAL = 1.7; EXPRESSED IN HELA, SIGNAL = 1.8; EXPRESSED IN LUNG, SIGNAL =   6; EXPRESSED IN HEART, SIGNAL = 2.5; EST_HUMAN HIT: AA228113.1, EVALUE 9.00e-72; SWISSPROT HIT: Q10411, EVALUE 3.00e-01
EDKSVLKNHDLSVRAKMAIKLRLGEKEILEKAVKSAAVNREYYRQQMEEKAPLPKYEESNLGLLESSVGDSRLPLVLRNLEEEAGVQDALNIREAISKAKATENGLVNGENSIPNGTRSENESLNQESKRAVEDAKGSSSDSTAGVKE

SEQ ID NO: 42270 - protein, 50 aa, Homo sapiens
  MAP TO AL109938.8; EXPRESSED IN BRAIN, SIGNAL = 1.6; EXPRESSED IN FETAL LIVER, SIGNAL = 1.9; EXPRESSED IN ADULT LIVER, SIGNAL = 1.6; EXPRESSED IN HELA, SIGNAL = 1.9; EXPRESSED IN HEART, SIGNAL = 1.8; EXPRESSED IN PLACENTA, SIGNAL = 1.9; EST_HUMAN HIT: BF689938.1, EVALUE 5.10e+00
PYHPVLYLLLNHHTLIILLSGASQISLPPDFCGDHSSLGPGHLAGMPDIC

SEQ ID NO: 42271 - protein, 26 aa, Homo sapiens
  MAP TO AL109938.8; EXPRESSED IN BRAIN, SIGNAL = 1.6; EXPRESSED IN FETAL LIVER, SIGNAL = 1.9; EXPRESSED IN ADULT LIVER, SIGNAL = 1.6; EXPRESSED IN HELA, SIGNAL = 1.9; EXPRESSED IN HEART, SIGNAL = 1.8; EXPRESSED IN PLACENTA, SIGNAL = 1.9; EST_HUMAN HIT: BF686027.1, EVALUE 7.00e-01
QMSGIPARWPGPRLEWSPQKSGGREI

SEQ ID NO: 42272 - protein, 108 aa, Homo sapiens
  MAP TO AC007226.2; EXPRESSED IN BONE MARROW, SIGNAL = 5.5; EXPRESSED IN HEART, SIGNAL = 5.4; EXPRESSED IN LUNG, SIGNAL = 6.4; EXPRESSED IN PLACENTA, SIGNAL = 3.5; EXPRESSED IN HELA, SIGNAL = 7.5; EXPRESSED IN ADULT LIVER, SIGNAL = 3.2; EXPRESSED IN BRAIN, SIGNAL = 5.8; EXPRESSED IN FETAL LIVER, SIGNAL = 6.4; SWISSPROT HIT: P22845, EVALUE 1.10e+00; EST_HUMAN HIT: AI167428.1, EVALUE 4.00e-34
IQKHATGKKSPAKSPNPSTPRGKKRKALPASETPKAAESETPGKSPEKKPKIKEEAVKEKSPSLGKKDARQTPKKPEAKFFTTPSKSVRKASHTPKKWPKKPKVPQST

SEQ ID NO: 42273 - protein, 51 aa, Homo sapiens
  MAP TO AC008569.3; EXPRESSED IN PLACENTA, SIGNAL = 1.5; EXPRESSED IN BONE MARROW, SIGNAL = 1.8; EXPRESSED IN HELA, SIGNAL = 3.6; EXPRESSED IN FETAL LIVER, SIGNAL = 2.6; EXPRESSED IN LUNG, SIGNAL =  10; EXPRESSED IN HEART, SIGNAL = 2.1; SWISSPROT HIT: P48960, EVALUE 1.00e-27; EST_HUMAN HIT: BE867045.1, EVALUE 1.00e-26
INECATPSKVSCGKFSDCWNTEGSYDCVCSPGYEPVSGAKTFKNESENTCQ

SEQ ID NO: 42274 - protein, 64 aa, Homo sapiens
  MAP TO AC008569.3; EXPRESSED IN PLACENTA, SIGNAL = 1.5; EXPRESSED IN BONE MARROW, SIGNAL = 1.8; EXPRESSED IN HELA, SIGNAL = 3.6; EXPRESSED IN FETAL LIVER, SIGNAL = 2.6; EXPRESSED IN LUNG, SIGNAL =  10; EXPRESSED IN HEART, SIGNAL = 2.1; EST_HUMAN HIT: BE867045.1, EVALUE 2.00e-14
TSTSVQHRRKCHAENSRTAGTQRGATTACAARDMSLFLGQKHSRMRARTPVKVRTTPRPLTFHP

SEQ ID NO: 42275 - protein, 29 aa, Homo sapiens
  MAP TO AC019140.2; EXPRESSED IN BRAIN, SIGNAL = 1.6; EXPRESSED IN FETAL LIVER, SIGNAL = 2.5; EXPRESSED IN BONE MARROW, SIGNAL = 1.5; EXPRESSED IN HEART, SIGNAL = 1.9; EXPRESSED IN LUNG, SIGNAL = 1.8; EXPRESSED IN PLACENTA, SIGNAL =   2; EXPRESSED IN HELA, SIGNAL = 1.7; EXPRESSED IN ADULT LIVER, SIGNAL = 8.7; EST_HUMAN HIT: AI948497.1, EVALUE 1.80e-01
TCEHVTFNDKRDFADVMKDLEKEGYFGYA

SEQ ID NO: 42276 - protein, 85 aa, Homo sapiens
  MAP TO AC005323.1; EXPRESSED IN BRAIN, SIGNAL = 1.7; EXPRESSED IN PLACENTA, SIGNAL = 2.1; EXPRESSED IN ADULT LIVER, SIGNAL = 1.9; EXPRESSED IN BONE MARROW, SIGNAL = 2.1; EXPRESSED IN HELA, SIGNAL = 1.8; EXPRESSED IN HEART, SIGNAL = 2.9; EXPRESSED IN LUNG, SIGNAL = 2.5; EXPRESSED IN FETAL LIVER, SIGNAL = 1.6; SWISSPROT HIT: P02565, EVALUE 1.00e-26; EST_HUMAN HIT: F00516.1, EVALUE 9.00e-17
ESIFCIQYNVRAFMNVKHWPWMKLYFKIKPLLKSAETEKEMANMKEEFEKTKEELAKTEAKRKELEEKMVTLMQEKNDLQLQVQA

SEQ ID NO: 42277 - protein, 46 aa, Homo sapiens
  MAP TO AC011478.2; EXPRESSED IN BRAIN, SIGNAL = 8.9; EXPRESSED IN FETAL LIVER, SIGNAL =  14; EXPRESSED IN BONE MARROW, SIGNAL = 6.4; EXPRESSED IN LUNG, SIGNAL = 3.2; EXPRESSED IN PLACENTA, SIGNAL = 7.2; EXPRESSED IN HEART, SIGNAL =  11; EXPRESSED IN HELA, SIGNAL =  12; EXPRESSED IN ADULT LIVER, SIGNAL = 8.5
DFTATRDDPKPTPQVKVKQPEQCHSAQITRTGSPGKFPSEISLLRN

SEQ ID NO: 42278 - protein, 114 aa, Homo sapiens
  MAP TO AL122127.3; EXPRESSED IN PLACENTA, SIGNAL = 1.8; EXPRESSED IN BONE MARROW, SIGNAL = 1.6e+02; EXPRESSED IN LUNG, SIGNAL = 1.9e+02; EXPRESSED IN ADULT LIVER, SIGNAL = 2.9; EXPRESSED IN HEART, SIGNAL = 3.2; EST_HUMAN HIT: AI660968.1, EVALUE 7.00e-55; SWISSPROT HIT: P01857, EVALUE 1.00e-48
EGHMDRGRLGPPSALRVTAVPTSVPTGQPREPQVYTLPPSRDELTKNQVSLTCLVKGFYPSDIAVEWESNGQPENNYKTTPPVLDSDGSFFLYSKLTVDKSRWQQGNVFSCSVM

SEQ ID NO: 42279 - protein, 79 aa, Homo sapiens
  MAP TO AL158802.1; EXPRESSED IN BRAIN, SIGNAL = 1.7; EXPRESSED IN FETAL LIVER, SIGNAL = 1.8; EXPRESSED IN ADULT LIVER, SIGNAL = 1.8; EXPRESSED IN HELA, SIGNAL = 2.1; EXPRESSED IN HEART, SIGNAL = 1.9; EXPRESSED IN PLACENTA, SIGNAL = 1.9; EST_HUMAN HIT: AI268012.1, EVALUE 4.20e+00
IRTSKIMNHEKNWRLFNIPVRILNCFYDSQRGSVQTKQDRLQTLPATYTILQLIQSYVAFRKRLSVMILISSNKCHCEK

SEQ ID NO: 42280 - protein, 94 aa, Homo sapiens; identical to SEQ ID NO: 39752
  MAP TO AC005664.2; EXPRESSED IN BRAIN, SIGNAL = 2.9; EXPRESSED IN PLACENTA, SIGNAL = 3.4; EXPRESSED IN ADULT LIVER, SIGNAL = 2.5; EXPRESSED IN BONE MARROW, SIGNAL = 2.3; EXPRESSED IN HELA, SIGNAL = 3.5; EXPRESSED IN HEART, SIGNAL = 3.6; EXPRESSED IN LUNG, SIGNAL = 2.9; EXPRESSED IN FETAL LIVER, SIGNAL = 5.5; EST_HUMAN HIT: BF306996.1, EVALUE 4.00e-38; SWISSPROT HIT: O54693, EVALUE 1.10e+00

SEQ ID NO: 42281 - protein, 22 aa, Homo sapiens
  MAP TO AC005664.2; EXPRESSED IN BRAIN, SIGNAL = 2.9; EXPRESSED IN PLACENTA, SIGNAL = 3.4; EXPRESSED IN ADULT LIVER, SIGNAL = 2.5; EXPRESSED IN BONE MARROW, SIGNAL = 2.3; EXPRESSED IN HELA, SIGNAL = 3.5; EXPRESSED IN HEART, SIGNAL = 3.6; EXPRESSED IN LUNG, SIGNAL = 2.9; EXPRESSED IN FETAL LIVER, SIGNAL = 5.5; EST_HUMAN HIT: BF306996.1, EVALUE 9.00e-06
TTRNGSKAVTSPLVGMCPPSSP

SEQ ID NO: 42282 - protein, 49 aa, Homo sapiens
  MAP TO AL049829.3; EXPRESSED IN PLACENTA, SIGNAL = 5.3; EXPRESSED IN BONE MARROW, SIGNAL =   5; EXPRESSED IN FETAL LIVER, SIGNAL = 6.4; EXPRESSED IN LUNG, SIGNAL =  11; EXPRESSED IN HEART, SIGNAL = 5.1; EXPRESSED IN BRAIN, SIGNAL = 4.8; EXPRESSED IN HELA, SIGNAL =   6; EXPRESSED IN ADULT LIVER, SIGNAL = 3.4; EST_HUMAN HIT: AA412599.1, EVALUE 7.00e-23; SWISSPROT HIT: Q16629, EVALUE 1.20e+00
IPKRTNRPGISTTDRGFPRARYRARTTNYNSSRSRFYSGFNSRPRGRVY

SEQ ID NO: 42283 - protein, 65 aa, Homo sapiens
  MAP TO AC018720.2; EXPRESSED IN FETAL LIVER, SIGNAL = 2.4; EXPRESSED IN LUNG, SIGNAL = 4.4; EXPRESSED IN BRAIN, SIGNAL = 2.1; EXPRESSED IN ADULT LIVER, SIGNAL = 2.4; EXPRESSED IN BONE MARROW, SIGNAL = 3.1; EXPRESSED IN HELA, SIGNAL = 1.9; EXPRESSED IN HEART, SIGNAL = 1.8; EXPRESSED IN PLACENTA, SIGNAL =  45; EST_HUMAN HIT: BE720191.1, EVALUE 3.00e-31; SWISSPROT HIT: P53972, EVALUE 6.00e-02
KIFAFDLDAKRLASMATLLAWVGVSCCELAEEDFLAVSPLDPRYREVHYVLLDPSCSGSGEMVRR

SEQ ID NO: 42284 - protein, 39 aa, Homo sapiens
  MAP TO AC018720.2; EXPRESSED IN FETAL LIVER, SIGNAL = 2.4; EXPRESSED IN LUNG, SIGNAL = 4.4; EXPRESSED IN BRAIN, SIGNAL = 2.1; EXPRESSED IN ADULT LIVER, SIGNAL = 2.4; EXPRESSED IN BONE MARROW, SIGNAL = 3.1; EXPRESSED IN HELA, SIGNAL = 1.9; EXPRESSED IN HEART, SIGNAL = 1.8; EXPRESSED IN PLACENTA, SIGNAL =  45; EST_HUMAN HIT: BE880162.1, EVALUE 1.00e-20; SWISSPROT HIT: Q07092, EVALUE 4.90e+00
RSLPLTWMPSGWHPWPRCWPGLASPAVSWLRRTSWRSPP

SEQ ID NO: 42285 - protein, 69 aa, Homo sapiens
  MAP TO AC023000.2; EXPRESSED IN PLACENTA, SIGNAL = 1.6; EXPRESSED IN ADULT LIVER, SIGNAL = 1.4; EXPRESSED IN HEART, SIGNAL = 1.8; EXPRESSED IN FETAL LIVER, SIGNAL = 2.2; EXPRESSED IN HELA, SIGNAL = 1.9
KMIIIMVMMMVMVLMAIMLMMVTMMMMMMMMIMVIVMIMMMMMIVMVMMVIMMMVMMMMMMVIVMMMMM

SEQ ID NO: 42286 - protein, 162 aa, Homo sapiens
  MAP TO AC007216.2; EXPRESSED IN BRAIN, SIGNAL = 1.1e+02; EXPRESSED IN ADULT LIVER, SIGNAL =  42; EXPRESSED IN BONE MARROW, SIGNAL =  60; EXPRESSED IN HEART, SIGNAL =  27; EXPRESSED IN PLACENTA, SIGNAL =  47; EXPRESSED IN LUNG, SIGNAL =  99; EXPRESSED IN HELA, SIGNAL =  26; EXPRESSED IN FETAL LIVER, SIGNAL =  45; EST_HUMAN HIT: AI034136.1, EVALUE 1.00e-37; SWISSPROT HIT: P30640, EVALUE 9.00e-05
VRMAAAEHRHSSGLPYWPYLTAETLKNRMGHQPPPPTQQHSITDNSLSLKTPPECLLTPLPPSADDNLKTPPECLLTPLPPSAPPSADDNLKTPPLATQEAEAEKPPKPKRWRAAEMESPPEPKRRRAAEVESPPEPKRRRAAEVEPSSPEPKRRRLSKLRT

SEQ ID NO: 42287 - protein, 67 aa, Homo sapiens
  MAP TO AL136980.2; EXPRESSED IN BRAIN, SIGNAL =   2; EXPRESSED IN PLACENTA, SIGNAL = 1.4; EXPRESSED IN BONE MARROW, SIGNAL = 1.5; EXPRESSED IN ADULT LIVER, SIGNAL = 1.8; EXPRESSED IN HELA, SIGNAL = 2.4; EXPRESSED IN HEART, SIGNAL = 2.3; EXPRESSED IN LUNG, SIGNAL =   2; EXPRESSED IN FETAL LIVER, SIGNAL =   2; EST_HUMAN HIT: AA337561.1, EVALUE 1.00e-13; SWISSPROT HIT: Q09216, EVALUE 2.00e-03
HMTRTFHDLEGNAVKRDSGIWINGFDYTGISHITPHIPEINDSIRAHCEENAPLCGFPWYLPVHFLI

SEQ ID NO: 42288 - protein, 36 aa, Homo sapiens
  MAP TO AC004548.1; EXPRESSED IN BRAIN, SIGNAL =   2; EXPRESSED IN PLACENTA, SIGNAL = 9.9; EXPRESSED IN LUNG, SIGNAL = 2.7; EXPRESSED IN ADULT LIVER, SIGNAL = 1.8; EXPRESSED IN BONE MARROW, SIGNAL = 2.2; EXPRESSED IN HELA, SIGNAL = 2.9; EXPRESSED IN FETAL LIVER, SIGNAL = 2.4; EXPRESSED IN HEART, SIGNAL =   2
MGEGVKCDKTMTKELEKTFQEQRELINSNIRFISLC

SEQ ID NO: 42289 - protein, 20 aa, Homo sapiens
  MAP TO AC008417.3; EXPRESSED IN FETAL LIVER, SIGNAL = 1.7; EXPRESSED IN LUNG, SIGNAL = 1.7; EXPRESSED IN BRAIN, SIGNAL = 1.7; EXPRESSED IN HEART, SIGNAL = 1.8; EXPRESSED IN HELA, SIGNAL = 1.7; EST_HUMAN HIT: N23712.1, EVALUE 8.40e-02
YSISCYNSSKKCFRILIPLI

SEQ ID NO: 42290 - protein, 59 aa, Homo sapiens; identical to SEQ ID NO: 36904
  MAP TO AL049837.4; EXPRESSED IN PLACENTA, SIGNAL = 2.7; EXPRESSED IN BONE MARROW, SIGNAL =   3; EXPRESSED IN HELA, SIGNAL = 6.3; EXPRESSED IN LUNG, SIGNAL =   2; EXPRESSED IN HEART, SIGNAL = 5.6; EXPRESSED IN BRAIN, SIGNAL = 3.1; EXPRESSED IN FETAL LIVER, SIGNAL = 5.4; EXPRESSED IN ADULT LIVER, SIGNAL = 3.5; EST_HUMAN HIT: BE161026.1, EVALUE 1.10e-01; SWISSPROT HIT: P02564, EVALUE 4.00e-01

SEQ ID NO: 42291 - protein, 21 aa, Homo sapiens
  MAP TO AC007686.5; EXPRESSED IN BRAIN, SIGNAL = 2.8; EXPRESSED IN PLACENTA, SIGNAL = 3.2; EXPRESSED IN HEART, SIGNAL = 2.8; EXPRESSED IN BONE MARROW, SIGNAL = 3.7; EXPRESSED IN HELA, SIGNAL = 3.4; EXPRESSED IN ADULT LIVER, SIGNAL = 2.6; EXPRESSED IN LUNG, SIGNAL = 4.6; EXPRESSED IN FETAL LIVER, SIGNAL =   3
PGWWFSVLAHQAHQRPCWSFH

SEQ ID NO: 42292 - protein, 28 aa, Homo sapiens
  MAP TO AC008392.3; EXPRESSED IN BRAIN, SIGNAL = 2.5; EXPRESSED IN ADULT LIVER, SIGNAL = 2.3; EXPRESSED IN BONE MARROW, SIGNAL = 2.7; EXPRESSED IN HELA, SIGNAL = 2.5; EXPRESSED IN HEART, SIGNAL = 2.3; EXPRESSED IN PLACENTA, SIGNAL = 2.8; EXPRESSED IN LUNG, SIGNAL = 3.5; EXPRESSED IN FETAL LIVER, SIGNAL = 2.3
MDRLLKGRAQVQAEIEELQEQTRALDKQ

SEQ ID NO: 42293 - protein, 39 aa, Homo sapiens
  MAP TO AC008392.3; EXPRESSED IN BRAIN, SIGNAL = 2.5; EXPRESSED IN ADULT LIVER, SIGNAL = 2.3; EXPRESSED IN BONE MARROW, SIGNAL = 2.7; EXPRESSED IN HELA, SIGNAL = 2.5; EXPRESSED IN HEART, SIGNAL = 2.3; EXPRESSED IN PLACENTA, SIGNAL = 2.8; EXPRESSED IN LUNG, SIGNAL = 3.5; EXPRESSED IN FETAL LIVER, SIGNAL = 2.3; SWISSPROT HIT: P37890, EVALUE 8.30e+00
RRSGAWRRYGAISRCRSAQPRTRSSGFGTVSGWRTWTAC

SEQ ID NO: 42294 - protein, 170 aa, Homo sapiens
  MAP TO AC007501.2; EXPRESSED IN FETAL LIVER, SIGNAL =   9; EXPRESSED IN HEART, SIGNAL =   7; EXPRESSED IN BRAIN, SIGNAL = 4.4; EXPRESSED IN PLACENTA, SIGNAL = 2.6; EXPRESSED IN BONE MARROW, SIGNAL = 2.3; EXPRESSED IN LUNG, SIGNAL = 2.5; EXPRESSED IN ADULT LIVER, SIGNAL = 1.4; EXPRESSED IN HELA, SIGNAL = 5.2; EST_HUMAN HIT: AW602304.1, EVALUE 9.00e-06
IAANMPSNIGAPLISSMGTTMVGSAPSTQVSPSVQTQQHQMQLQQQQQQQQQQMQQMQQQQLQQHQMHQQIQQQMQQQHFQHHMQQHLQQQQQHLQQQINQQQLQQQLQQRLQLQQLQHMQHQSQPSPRQHSPVASQITSPIPAIGSPQPASQQHQSQIQSQTQTQVLSQ

SEQ ID NO: 42295 - protein, 30 aa, Homo sapiens
  MAP TO AC007501.2; EXPRESSED IN FETAL LIVER, SIGNAL =   9; EXPRESSED IN HEART, SIGNAL =   7; EXPRESSED IN BRAIN, SIGNAL = 4.4; EXPRESSED IN PLACENTA, SIGNAL = 2.6; EXPRESSED IN BONE MARROW, SIGNAL = 2.3; EXPRESSED IN LUNG, SIGNAL = 2.5; EXPRESSED IN ADULT LIVER, SIGNAL = 1.4; EXPRESSED IN HELA, SIGNAL = 5.2
ANPAADAAAAFPAPHAAAPAAAAAASPAAN

SEQ ID NO: 42296 - protein, 59 aa, Homo sapiens
  MAP TO AC011449.3; EXPRESSED IN BRAIN, SIGNAL =   2; EXPRESSED IN BONE MARROW, SIGNAL = 1.7; EXPRESSED IN FETAL LIVER, SIGNAL = 3.5; EXPRESSED IN ADULT LIVER, SIGNAL = 1.7; EXPRESSED IN HELA, SIGNAL = 3.6; EXPRESSED IN HEART, SIGNAL = 2.8; EXPRESSED IN PLACENTA, SIGNAL = 1.4; EST_HUMAN HIT: AA553761.1, EVALUE 3.00e-26; SWISSPROT HIT: Q03410, EVALUE 1.60e+00
SKLTKQLMLLEAKTHGQEKELAENREQLEILRAKCQELKTHSDGKIAVEVHKSIVNELK

SEQ ID NO: 42297 - protein, 32 aa, Homo sapiens
  MAP TO AC020714.2; EXPRESSED IN PLACENTA, SIGNAL = 2.9; EXPRESSED IN BRAIN, SIGNAL = 3.3; EXPRESSED IN BONE MARROW, SIGNAL = 3.1; EXPRESSED IN LUNG, SIGNAL = 4.3; EXPRESSED IN ADULT LIVER, SIGNAL = 5.9; EXPRESSED IN HELA, SIGNAL =   4; EXPRESSED IN HEART, SIGNAL = 3.9; EXPRESSED IN FETAL LIVER, SIGNAL = 3.5; EST_HUMAN HIT: AW368228.1, EVALUE 2.00e-09
FKGKSKPNLLKQETSSLACGCAFSSGCTWMRA

SEQ ID NO: 42298 - protein, 50 aa, Homo sapiens
  MAP TO AL079306.2; EXPRESSED IN HEART, SIGNAL = 1.8; EXPRESSED IN BRAIN, SIGNAL = 2.6; EXPRESSED IN PLACENTA, SIGNAL = 1.5; EXPRESSED IN ADULT LIVER, SIGNAL = 1.7; EXPRESSED IN BONE MARROW, SIGNAL = 1.8; EXPRESSED IN FETAL LIVER, SIGNAL = 1.8; EXPRESSED IN HELA, SIGNAL = 2.2; EST_HUMAN HIT: BF696285.1, EVALUE 3.90e+00
LASPSLLACGCMCTHHAIAAVVSAPPALHHDAAIAGANTCTDTSNTTPTP

SEQ ID NO: 42299 - protein, 37 aa, Homo sapiens
  MAP TO AC002045.1; EXPRESSED IN BRAIN, SIGNAL = 6.4; EXPRESSED IN PLACENTA, SIGNAL = 4.6; EXPRESSED IN LUNG, SIGNAL =  11; EXPRESSED IN ADULT LIVER, SIGNAL = 1.8; EXPRESSED IN BONE MARROW, SIGNAL = 4.6; EXPRESSED IN FETAL LIVER, SIGNAL = 6.3; EXPRESSED IN HELA, SIGNAL = 5.2; EXPRESSED IN HEART, SIGNAL = 3.9; EST_HUMAN HIT: AW580733.1, EVALUE 7.00e-15
VINTLADHRHRGTDFGGSPWLLIITVFLRSYKFAISL

SEQ ID NO: 42300 - protein, 27 aa, Homo sapiens
  MAP TO AC002045.1; EXPRESSED IN BRAIN, SIGNAL = 6.4; EXPRESSED IN PLACENTA, SIGNAL = 4.6; EXPRESSED IN LUNG, SIGNAL =  11; EXPRESSED IN ADULT LIVER, SIGNAL = 1.8; EXPRESSED IN BONE MARROW, SIGNAL = 4.6; EXPRESSED IN FETAL LIVER, SIGNAL = 6.3; EXPRESSED IN HELA, SIGNAL = 5.2; EXPRESSED IN HEART, SIGNAL = 3.9; EST_HUMAN HIT: BF308636.1, EVALUE 1.00e-07
LSILWLTIVIVGLTLVEVLGYLSLLCF

SEQ ID NO: 42301 - protein, 25 aa, Homo sapiens
  MAP TO AC023202.2; EXPRESSED IN BRAIN, SIGNAL = 4.1; EXPRESSED IN PLACENTA, SIGNAL = 3.5; EXPRESSED IN BONE MARROW, SIGNAL = 3.4; EXPRESSED IN HEART, SIGNAL = 3.7; EXPRESSED IN ADULT LIVER, SIGNAL = 4.3; EXPRESSED IN FETAL LIVER, SIGNAL = 3.8; EXPRESSED IN HELA, SIGNAL = 4.2; EXPRESSED IN LUNG, SIGNAL = 2.3; EST_HUMAN HIT: AI251748.1, EVALUE 1.80e-01
LKGKEILPFMTTSMNLEDIMASKVK

SEQ ID NO: 42302 - protein, 39 aa, Homo sapiens
  MAP TO AC007857.2; EXPRESSED IN BRAIN, SIGNAL = 2.4; EXPRESSED IN PLACENTA, SIGNAL = 3.1; EXPRESSED IN BONE MARROW, SIGNAL = 3.2; EXPRESSED IN HELA, SIGNAL = 4.5; EXPRESSED IN HEART, SIGNAL = 3.6; EXPRESSED IN ADULT LIVER, SIGNAL =   3; EXPRESSED IN LUNG, SIGNAL = 1.7; EXPRESSED IN FETAL LIVER, SIGNAL = 4.6; EST_HUMAN HIT: AA465610.1, EVALUE 3.00e-08
MLQLSKMARAELFLPPGGFMVLLTSGMKPQTFAVSVTAL

SEQ ID NO: 42303 - protein, 58 aa, Homo sapiens
  MAP TO AC020752.3; EXPRESSED IN BRAIN, SIGNAL = 2.8; EXPRESSED IN PLACENTA, SIGNAL = 1.9; EXPRESSED IN BONE MARROW, SIGNAL = 1.9; EXPRESSED IN FETAL LIVER, SIGNAL = 2.1; EXPRESSED IN LUNG, SIGNAL = 2.3; EXPRESSED IN ADULT LIVER, SIGNAL = 2.4; EXPRESSED IN HELA, SIGNAL = 2.5; EXPRESSED IN HEART, SIGNAL = 2.2; SWISSPROT HIT: Q12860, EVALUE 7.00e-12; EST_HUMAN HIT: AI272244.1, EVALUE 2.00e-29
PTRVMVPPSSMDVTVGESIVLPCQVTHDHSLDIVFTWSFNGHLIDFDRDGDHFERVGG

SEQ ID NO: 42304 - protein, 122 aa, Homo sapiens [sequence omitted]

SEQ ID NO: 42305 - protein, 28 aa, Homo sapiens
  MAP TO AC011477.2; EXPRESSED IN ADULT LIVER, SIGNAL = 1.4; EXPRESSED IN BONE MARROW, SIGNAL = 1.7; EXPRESSED IN FETAL LIVER, SIGNAL = 2.2; EXPRESSED IN PLACENTA, SIGNAL = 2.9; EXPRESSED IN BRAIN, SIGNAL = 1.3; EXPRESSED IN HELA, SIGNAL = 2.4; EXPRESSED IN HEART, SIGNAL = 1.9; EST_HUMAN HIT: BE973829.1, EVALUE 2.70e+00; SWISSPROT HIT: P23132, EVALUE 8.60e+00
SRSARRWASLGEWMWVSKTNTGYVAWSG

SEQ ID NO: 42306 - protein, 36 aa, Homo sapiens
  MAP TO AC011683.3; EXPRESSED IN HELA, SIGNAL =   2; EXPRESSED IN BRAIN, SIGNAL = 1.8; EXPRESSED IN ADULT LIVER, SIGNAL = 1.8; EXPRESSED IN BONE MARROW, SIGNAL = 1.8; EXPRESSED IN FETAL LIVER, SIGNAL = 2.6; EXPRESSED IN HEART, SIGNAL =   2; EXPRESSED IN LUNG, SIGNAL = 2.4; EXPRESSED IN PLACENTA, SIGNAL = 1.6; EST_HUMAN HIT: AI052450.1, EVALUE 3.30e+00
VKILLQMSKGLQITLWVTVIRIESICLSVTRKSSCW

SEQ ID NO: 42307 - protein, 69 aa, Homo sapiens
  MAP TO AC018506.3; EXPRESSED IN BRAIN, SIGNAL = 6.7; EXPRESSED IN PLACENTA, SIGNAL = 3.9; EXPRESSED IN ADULT LIVER, SIGNAL = 7.8; EXPRESSED IN BONE MARROW, SIGNAL = 4.8; EXPRESSED IN FETAL LIVER, SIGNAL = 4.4; EXPRESSED IN LUNG, SIGNAL = 6.4; EXPRESSED IN HELA, SIGNAL = 4.2; EXPRESSED IN HEART, SIGNAL = 9.1; EST_HUMAN HIT: BF369727.1, EVALUE 8.00e-27
DHNYGAPPPPTPPASPPVQTIIPRSDLNGLPSPVEERCGDSPNSEGETVPTWCPCGLSQDGFLLNCDKC

SEQ ID NO: 42308 - protein, 69 aa, Homo sapiens
  MAP TO AC004624.6; EXPRESSED IN BONE MARROW, SIGNAL = 1.8; EXPRESSED IN LUNG, SIGNAL = 1.8; EXPRESSED IN HEART, SIGNAL = 1.5; EXPRESSED IN FETAL LIVER, SIGNAL = 1.3; EXPRESSED IN HELA, SIGNAL = 1.8; EXPRESSED IN BRAIN, SIGNAL = 1.9; EXPRESSED IN PLACENTA, SIGNAL = 1.2; EST_HUMAN HIT: N21429.1, EVALUE 8.30e-01; SWISSPROT HIT: P35366, EVALUE 6.50e+00
RMVTWGYGPRFAGWSLRPITSILARGRQRGLSLGMAVWPPVWDCMQLAPKMKAGPGAQECSSRPGEDQE

SEQ ID NO: 42309 - protein, 46 aa, Homo sapiens
  MAP TO AP000350.1; EXPRESSED IN ADULT LIVER, SIGNAL =   5; EXPRESSED IN FETAL LIVER, SIGNAL = 6.5; EXPRESSED IN PLACENTA, SIGNAL = 6.6; EXPRESSED IN HELA, SIGNAL = 6.2; EXPRESSED IN BRAIN, SIGNAL = 4.3; EXPRESSED IN BONE MARROW, SIGNAL = 6.1; EXPRESSED IN LUNG, SIGNAL = 9.5; EXPRESSED IN HEART, SIGNAL = 5.5; SWISSPROT HIT: P47842, EVALUE 4.00e-06; EST_HUMAN HIT: AI084557.1, EVALUE 1.00e-07
GGPQAWPLLLASCLVPGALQLASLPLLPESPRYLLIDCGDTEACLA

SEQ ID NO: 42310 - protein, 46 aa, Homo sapiens
  MAP TO AP000350.1; EXPRESSED IN ADULT LIVER, SIGNAL =   5; EXPRESSED IN FETAL LIVER, SIGNAL = 6.5; EXPRESSED IN PLACENTA, SIGNAL = 6.6; EXPRESSED IN HELA, SIGNAL = 6.2; EXPRESSED IN BRAIN, SIGNAL = 4.3; EXPRESSED IN BONE MARROW, SIGNAL = 6.1; EXPRESSED IN LUNG, SIGNAL = 9.5; EXPRESSED IN HEART, SIGNAL = 5.5; EST_HUMAN HIT: AI084557.1, EVALUE 5.00e-05
VALRPGPCCWPAAWCPGRSSSPPCLCSLKARATSSLTVETPRPAWQ

SEQ ID NO: 42311 - protein, 63 aa, Homo sapiens
  MAP TO AC005212.1; EXPRESSED IN BRAIN, SIGNAL =   5; EXPRESSED IN PLACENTA, SIGNAL = 4.1; EXPRESSED IN HELA, SIGNAL = 5.3; EXPRESSED IN ADULT LIVER, SIGNAL = 2.6; EXPRESSED IN FETAL LIVER, SIGNAL = 5.3; EXPRESSED IN LUNG, SIGNAL =  10; EXPRESSED IN BONE MARROW, SIGNAL = 3.5; EXPRESSED IN HEART, SIGNAL = 4.5
SRSSSTSSSGSSTSTGSSSGSSSSSASSRSGSSSTSRSSSSSSSSGSPSPSRRRHDNRRRSRS

SEQ ID NO: 42312 - protein, 45 aa, Homo sapiens
  MAP TO AC009818.4; EXPRESSED IN PLACENTA, SIGNAL = 1.7; EXPRESSED IN BRAIN, SIGNAL = 1.7; EXPRESSED IN ADULT LIVER, SIGNAL =   2; EXPRESSED IN BONE MARROW, SIGNAL = 2.1; EXPRESSED IN FETAL LIVER, SIGNAL = 1.9; EXPRESSED IN HELA, SIGNAL =   2; EXPRESSED IN HEART, SIGNAL = 1.8; EST_HUMAN HIT: BE259456.1, EVALUE 3.00e-05; SWISSPROT HIT: Q44052, EVALUE 8.20e+00
SSEGRHPKWTEGRHRSCTKEGESWEHCMGLLHTWTHSWPQWLQGN

SEQ ID NO: 42313 - protein, 44 aa, Homo sapiens
  MAP TO AL035681.13; EXPRESSED IN HELA, SIGNAL = 1.4; EXPRESSED IN PLACENTA, SIGNAL = 1.9; EXPRESSED IN BRAIN, SIGNAL = 1.7; EXPRESSED IN BONE MARROW, SIGNAL = 1.9; EXPRESSED IN LUNG, SIGNAL = 1.8; EXPRESSED IN HEART, SIGNAL = 1.5; EXPRESSED IN ADULT LIVER, SIGNAL = 1.5; EXPRESSED IN FETAL LIVER, SIGNAL = 1.6; EST_HUMAN HIT: BE890564.1, EVALUE 1.00e-08
VCEMCGIVGTREAFFSKTKRFCSVSCSRSYSSNSKKASILARLQ

SEQ ID NO: 42314 - protein, 66 aa, Homo sapiens
  MAP TO AC017093.2; EXPRESSED IN BRAIN, SIGNAL = 2.1; EXPRESSED IN PLACENTA, SIGNAL = 2.2; EXPRESSED IN ADULT LIVER, SIGNAL = 1.9; EXPRESSED IN FETAL LIVER, SIGNAL = 5.3; EXPRESSED IN BONE MARROW, SIGNAL = 1.8; EXPRESSED IN HELA, SIGNAL = 5.4; EXPRESSED IN HEART, SIGNAL = 4.2; EST_HUMAN HIT: AA777621.1, EVALUE 6.00e-15
FPTSSSSPTETTSAWTILSISLSTFSSKPFNKSLGSSKLSHIFLSSFEPSKLFQPLPVTQFQSCFH

SEQ ID NO: 42315 - protein, 24 aa, Homo sapiens
  MAP TO AL022238.1; EXPRESSED IN HEART, SIGNAL = 2.5
ICFFFFFSFDLLPTSLPLSMFKGC

SEQ ID NO: 42316 - protein, 74 aa, Homo sapiens
  MAP TO AC009330.5; EXPRESSED IN PLACENTA, SIGNAL = 3.9; EXPRESSED IN BRAIN, SIGNAL = 3.5; EXPRESSED IN HELA, SIGNAL = 3.5; EXPRESSED IN ADULT LIVER, SIGNAL = 3.5; EXPRESSED IN BONE MARROW, SIGNAL =   6; EXPRESSED IN HEART, SIGNAL = 2.2; EXPRESSED IN FETAL LIVER, SIGNAL = 3.8; EXPRESSED IN LUNG, SIGNAL = 6.7; EST_HUMAN HIT: AW665663.1, EVALUE 5.00e-40; SWISSPROT HIT: Q60610, EVALUE 2.60e+00
GPSLMADSPGGYKECGTNEGPQEDENGSSASGSSKVRQLWSEDSCESGKWSRGLHDLGQVFQPRQNSKMGGCFS

SEQ ID NO: 42317 - protein, 48 aa, Homo sapiens
  MAP TO AC004032.7; EXPRESSED IN HEART, SIGNAL = 1.6; EXPRESSED IN BONE MARROW, SIGNAL = 1.8; EXPRESSED IN LUNG, SIGNAL = 1.6; EXPRESSED IN FETAL LIVER, SIGNAL =   2; EXPRESSED IN BRAIN, SIGNAL = 1.7; EXPRESSED IN PLACENTA, SIGNAL = 1.8; EXPRESSED IN HELA, SIGNAL = 1.6; EST_HUMAN HIT: BF678707.1, EVALUE 1.70e+00
LRIYLPHACAAMWEPRAPQGKLGQEPSVLCDGRHQPPSNSYTLSLAQV

SEQ ID NO: 42318 - protein, 34 aa, Homo sapiens
  MAP TO AC007463.3; EXPRESSED IN FETAL LIVER, SIGNAL =  13; EXPRESSED IN PLACENTA, SIGNAL = 8.9; EXPRESSED IN BRAIN, SIGNAL = 2.2; EXPRESSED IN HELA, SIGNAL = 4.4; EXPRESSED IN BONE MARROW, SIGNAL = 2.1; EXPRESSED IN HEART, SIGNAL = 4.8; EXPRESSED IN LUNG, SIGNAL = 5.7; EXPRESSED IN ADULT LIVER, SIGNAL = 4.9; EST_HUMAN HIT: AW501022.1, EVALUE 3.90e-01; SWISSPROT HIT: P10342, EVALUE 1.70e+00
KSWTSGSQLGWFSPQGCFWLSQPGTGTSSCRYPV

SEQ ID NO: 42319 - protein, 60 aa, Homo sapiens
  MAP TO AC013827.4; EXPRESSED IN FETAL LIVER, SIGNAL =  15; EXPRESSED IN HEART, SIGNAL =  12; EXPRESSED IN BRAIN, SIGNAL = 9.3; EXPRESSED IN PLACENTA, SIGNAL = 6.2; EXPRESSED IN LUNG, SIGNAL =   4; EXPRESSED IN HELA, SIGNAL =  14; EXPRESSED IN BONE MARROW, SIGNAL =   7; EXPRESSED IN ADULT LIVER, SIGNAL = 8.4; SWISSPROT HIT: Q06461, EVALUE 1.50e+00; EST_HUMAN HIT: N76697.1, EVALUE 6.00e-06
NVKAVEINKFPDKEFEAILSRKLSLLQANMERKFYEIRKTVTDQNEKCNREMKKKNRNSG

SEQ ID NO: 42320 - protein, 40 aa, Homo sapiens
  MAP TO Z83844.5; EXPRESSED IN HELA, SIGNAL = 2.1; EXPRESSED IN BRAIN, SIGNAL = 2.8; EXPRESSED IN PLACENTA, SIGNAL = 1.2; EXPRESSED IN BONE MARROW, SIGNAL = 3.4; EXPRESSED IN LUNG, SIGNAL =   2; EXPRESSED IN HEART, SIGNAL = 2.9
MESSHQQVMEELQRHHERELQRLQQEKEWLLAEETAATAS

SEQ ID NO: 42321 - protein, 29 aa, Homo sapiens
  MAP TO AC010931.5; EXPRESSED IN BRAIN, SIGNAL = 3.6; EXPRESSED IN PLACENTA, SIGNAL = 2.3; EXPRESSED IN BONE MARROW, SIGNAL = 1.5; EXPRESSED IN HELA, SIGNAL = 3.2; EXPRESSED IN LUNG, SIGNAL =  12; EXPRESSED IN ADULT LIVER, SIGNAL = 1.8; EXPRESSED IN FETAL LIVER, SIGNAL = 2.8; EXPRESSED IN HEART, SIGNAL = 2.9; SWISSPROT HIT: Q08379, EVALUE 2.30e-02; EST_HUMAN HIT: AI918098.1, EVALUE 4.60e-02
EPPSLAPPAVTSVVEQLQDEAKHLRQEVE

SEQ ID NO: 42322 - protein, 54 aa, Homo sapiens
  MAP TO AP000353.1; EXPRESSED IN PLACENTA, SIGNAL = 1.4; EXPRESSED IN BRAIN, SIGNAL = 1.6; EXPRESSED IN HELA, SIGNAL = 1.6; EXPRESSED IN BONE MARROW, SIGNAL = 1.7; EXPRESSED IN LUNG, SIGNAL = 1.9; EXPRESSED IN HEART, SIGNAL = 1.7; EXPRESSED IN FETAL LIVER, SIGNAL = 1.3; EST_HUMAN HIT: H28089.1, EVALUE 1.50e-01; SWISSPROT HIT: P38935, EVALUE 3.50e+00
MLWRWLLGYVGLRLQTARPKPTWRSISSQVVNEPSQVGGSPRVAKGPGSAPSLC

SEQ ID NO: 42323 - protein, 43 aa, Homo sapiens
  MAP TO AC007539.8; EXPRESSED IN ADULT LIVER, SIGNAL = 5.3; EXPRESSED IN FETAL LIVER, SIGNAL = 5.3; EXPRESSED IN PLACENTA, SIGNAL = 3.9; EXPRESSED IN LUNG, SIGNAL = 2.7; EXPRESSED IN BONE MARROW, SIGNAL = 6.8; EXPRESSED IN BRAIN, SIGNAL = 5.3; EXPRESSED IN HELA, SIGNAL =   4; EXPRESSED IN HEART, SIGNAL = 2.3; EST_HUMAN HIT: BE142936.1, EVALUE 5.40e+00; SWISSPROT HIT: P96086, EVALUE 6.30e+00
HSQQQTSGLRNYSADTYVALKYAPDTVLSGFTSANSLHLHTRS

SEQ ID NO: 42324 - protein, 37 aa, Homo sapiens
  MAP TO AC007841.1; EXPRESSED IN PLACENTA, SIGNAL = 1.6; EXPRESSED IN HELA, SIGNAL = 1.5; EXPRESSED IN HEART, SIGNAL = 1.5; EXPRESSED IN LUNG, SIGNAL =   2; EXPRESSED IN BONE MARROW, SIGNAL = 1.5; EXPRESSED IN ADULT LIVER, SIGNAL = 1.7; EXPRESSED IN FETAL LIVER, SIGNAL = 1.9; EST_HUMAN HIT: BF184891.1, EVALUE 1.50e-02
TARPTLHFLLLLLLLNLLNVKMMKIKTFMMIYFHLMN

SEQ ID NO: 42325 - protein, 30 aa, Homo sapiens
  MAP TO AC007841.1; EXPRESSED IN PLACENTA, SIGNAL = 1.6; EXPRESSED IN HELA, SIGNAL = 1.5; EXPRESSED IN HEART, SIGNAL = 1.5; EXPRESSED IN LUNG, SIGNAL =   2; EXPRESSED IN BONE MARROW, SIGNAL = 1.5; EXPRESSED IN ADULT LIVER, SIGNAL = 1.7; EXPRESSED IN FETAL LIVER, SIGNAL = 1.9
VKFLLPLPPLRQQDQPSTSSSSSSSSTCST

SEQ ID NO: 42326 - protein, 96 aa, Homo sapiens
  MAP TO AC011462.3; EXPRESSED IN BRAIN, SIGNAL = 7.1; EXPRESSED IN ADULT LIVER, SIGNAL = 5.4; EXPRESSED IN HELA, SIGNAL =  10; EXPRESSED IN HEART, SIGNAL = 7.5; EXPRESSED IN PLACENTA, SIGNAL = 7.4; EXPRESSED IN LUNG, SIGNAL =  17; EXPRESSED IN FETAL LIVER, SIGNAL = 9.3; EXPRESSED IN BONE MARROW, SIGNAL = 7.5; EST_HUMAN HIT: BE397591.1, EVALUE 3.00e-04
VSTAAEVVAIARTAGVTTTGITTTPTTEAATTGLPSNSRHHSSLRHHSHHPSSHRHHPATALLGTPQGPAPTIRTATSLAQAPIPAPPPSAATALH

SEQ ID NO: 42327 - protein, 41 aa, Homo sapiens
  MAP TO AC024593.1; EXPRESSED IN BRAIN, SIGNAL = 2.1; EXPRESSED IN HELA, SIGNAL = 2.6; EXPRESSED IN BONE MARROW, SIGNAL = 1.8; EXPRESSED IN FETAL LIVER, SIGNAL = 2.7; EXPRESSED IN HEART, SIGNAL =   2; EXPRESSED IN ADULT LIVER, SIGNAL = 2.4; EXPRESSED IN PLACENTA, SIGNAL = 1.9
FWIVVVMVIVGGKGYPTTFEGMLTFGFKTRLSNPLLGSFSN

SEQ ID NO: 42328 - protein, 94 aa, Homo sapiens
  MAP TO AC006146.2; EXPRESSED IN ADULT LIVER, SIGNAL = 4.3; EXPRESSED IN BRAIN, SIGNAL = 4.5; EXPRESSED IN PLACENTA, SIGNAL = 3.8; EXPRESSED IN HEART, SIGNAL = 4.7; EXPRESSED IN BONE MARROW, SIGNAL = 3.7; EXPRESSED IN FETAL LIVER, SIGNAL = 4.6; EXPRESSED IN HELA, SIGNAL = 4.9; EXPRESSED IN LUNG, SIGNAL = 5.3; SWISSPROT HIT: Q9QY05, EVALUE 7.00e+00; EST_HUMAN HIT: BE185656.1, EVALUE 1.00e-50
RKNGHRQIFPLPWPIYKISKRQILPKRRELTSTSLGWVLYKFESMLINLLWRSLMSSFSRGKLRLCCYRARSKIQIFILCLPSPCSFHHPPRKI

SEQ ID NO: 42329 - protein, 69 aa, Homo sapiens
  MAP TO AF223391.1; EXPRESSED IN BRAIN, SIGNAL = 2.3; EXPRESSED IN HELA, SIGNAL = 2.6; EXPRESSED IN HEART, SIGNAL = 2.3; EXPRESSED IN PLACENTA, SIGNAL = 2.4; EXPRESSED IN LUNG, SIGNAL = 2.5; EXPRESSED IN FETAL LIVER, SIGNAL = 2.6; EXPRESSED IN BONE MARROW, SIGNAL = 2.1; EXPRESSED IN ADULT LIVER, SIGNAL = 2.3; SWISSPROT HIT: Q15878, EVALUE 6.00e-35; EST_HUMAN HIT: T59742.1, EVALUE 7.00e-19
TPLARASIKSAKVDGVSYFRHKERLLRISIRHMVKSQVFYWIVLSLVALNTACVAIVHHNQPQWLTHLL

SEQ ID NO: 42330 - protein, 40 aa, Homo sapiens
  MAP TO AC006111.2; EXPRESSED IN PLACENTA, SIGNAL = 3.4; EXPRESSED IN BRAIN, SIGNAL = 4.5; EXPRESSED IN FETAL LIVER, SIGNAL = 4.1; EXPRESSED IN HELA, SIGNAL = 4.2; EXPRESSED IN HEART, SIGNAL = 3.9; EXPRESSED IN ADULT LIVER, SIGNAL = 4.4; EXPRESSED IN BONE MARROW, SIGNAL =   6; EXPRESSED IN LUNG, SIGNAL =  11
MWTIISLIVYIQKEIATEEIRSILFHQGGPSRELCCSRMQ

SEQ ID NO: 42331 - protein, 40 aa, Homo sapiens
  MAP TO AL158148.1; EXPRESSED IN PLACENTA, SIGNAL = 3.6; EXPRESSED IN BRAIN, SIGNAL = 5.2; EXPRESSED IN HELA, SIGNAL = 4.7; EXPRESSED IN FETAL LIVER, SIGNAL =   5; EXPRESSED IN ADULT LIVER, SIGNAL = 4.8; EXPRESSED IN BONE MARROW, SIGNAL = 3.2; EXPRESSED IN LUNG, SIGNAL = 5.8; EXPRESSED IN HEART, SIGNAL = 4.4
VWKFPLPTRRNTNTLRRQCRRGRKGHRGLLLGPSSPVMKE

SEQ ID NO: 42332 - protein, 76 aa, Homo sapiens
  MAP TO AL157996.1; EXPRESSED IN HELA, SIGNAL = 3.2; EXPRESSED IN BRAIN, SIGNAL = 1.9; EXPRESSED IN PLACENTA, SIGNAL = 2.3; EXPRESSED IN LUNG, SIGNAL =   2; EXPRESSED IN HEART, SIGNAL = 2.5; EXPRESSED IN FETAL LIVER, SIGNAL =   3; EXPRESSED IN BONE MARROW, SIGNAL = 1.7; EXPRESSED IN ADULT LIVER, SIGNAL = 2.2; SWISSPROT HIT: P40544, EVALUE 4.80e-02; EST_HUMAN HIT: BE842684.1, EVALUE 3.00e-37
SSKEALSEVNATGVAMLFSAGTFLYVATVHVLPEVGGIGHSHKPDATGGRGLSRLEVAALVLGCLIPLILSVGHQH

SEQ ID NO: 42333 - protein, 30 aa, Homo sapiens
  MAP TO AL133551.4; EXPRESSED IN BRAIN, SIGNAL = 3.2; EXPRESSED IN PLACENTA, SIGNAL = 3.5; EXPRESSED IN HELA, SIGNAL = 3.8; EXPRESSED IN HEART, SIGNAL = 3.8; EXPRESSED IN ADULT LIVER, SIGNAL = 3.7; EXPRESSED IN BONE MARROW, SIGNAL = 3.4; EXPRESSED IN FETAL LIVER, SIGNAL = 3.7; EXPRESSED IN LUNG, SIGNAL =   4; SWISSPROT HIT: P50988, EVALUE 3.80e+00
SSSWRTPMHSSKASTDIHTSMKTSLIPPPQ

SEQ ID NO: 42334 - protein, 68 aa, Homo sapiens
  MAP TO AL158137.1; EXPRESSED IN BRAIN, SIGNAL = 4.9; EXPRESSED IN HELA, SIGNAL = 4.1; EXPRESSED IN BONE MARROW, SIGNAL = 5.3; EXPRESSED IN HEART, SIGNAL = 3.6; EXPRESSED IN LUNG, SIGNAL = 3.3; EXPRESSED IN PLACENTA, SIGNAL = 3.4; EXPRESSED IN FETAL LIVER, SIGNAL = 4.3; EXPRESSED IN ADULT LIVER, SIGNAL = 4.1; EST_HUMAN HIT: AA322390.1, EVALUE 5.60e+00; SWISSPROT HIT: P07866, EVALUE 8.80e-01
MSIKLTQVAGSRSACSGCLNSVLDGGRALKSAVELKPKKTKNTFLAPALGILIQKLWDEAENLCSKFH

SEQ ID NO: 42335 - protein, 62 aa, Homo sapiens
  MAP TO AC011510.3; EXPRESSED IN BRAIN, SIGNAL =   3; EXPRESSED IN PLACENTA, SIGNAL = 2.5; EXPRESSED IN BONE MARROW, SIGNAL = 2.7; EXPRESSED IN FETAL LIVER, SIGNAL = 3.6; EXPRESSED IN HELA, SIGNAL = 3.5; EXPRESSED IN HEART, SIGNAL = 2.8; EXPRESSED IN ADULT LIVER, SIGNAL = 2.9; EXPRESSED IN LUNG, SIGNAL = 2.8; EST_HUMAN HIT: BE149548.1, EVALUE 6.00e-30; SWISSPROT HIT: P24461, EVALUE 1.00e-14
WVREELNRELGAGQAPSLGDRTRLPYTDAVLHEAQRLLALVPMGIPRTLMRTTRFRGYTLPQ

SEQ ID NO: 42336 - protein, 36 aa, Homo sapiens
  MAP TO AC019248.3; EXPRESSED IN BRAIN, SIGNAL = 4.4; EXPRESSED IN ADULT LIVER, SIGNAL = 5.4; EXPRESSED IN HELA, SIGNAL = 3.8; EXPRESSED IN HEART, SIGNAL = 5.2; EXPRESSED IN PLACENTA, SIGNAL = 3.5; EXPRESSED IN LUNG, SIGNAL = 3.3; EXPRESSED IN FETAL LIVER, SIGNAL = 3.9; EXPRESSED IN BONE MARROW, SIGNAL = 2.8
DLHHYTQLRATFWEQTFPGTTAMDLELELRSKSCGC

SEQ ID NO: 42337 - protein, 26 aa, Homo sapiens
  MAP TO AC019248.3; EXPRESSED IN BRAIN, SIGNAL = 4.4; EXPRESSED IN ADULT LIVER, SIGNAL = 5.4; EXPRESSED IN HELA, SIGNAL = 3.8; EXPRESSED IN HEART, SIGNAL = 5.2; EXPRESSED IN PLACENTA, SIGNAL = 3.5; EXPRESSED IN LUNG, SIGNAL = 3.3; EXPRESSED IN FETAL LIVER, SIGNAL = 3.9; EXPRESSED IN BONE MARROW, SIGNAL = 2.8
STPLYAATGHILGANISWHNCDGPGA

SEQ ID NO: 42338 - protein, 29 aa, Homo sapiens
  MAP TO AL138831.2; EXPRESSED IN HELA, SIGNAL = 6.2; EXPRESSED IN BRAIN, SIGNAL =  12; EXPRESSED IN PLACENTA, SIGNAL = 4.5; EXPRESSED IN LUNG, SIGNAL = 4.2; EXPRESSED IN HEART, SIGNAL = 4.8; EXPRESSED IN FETAL LIVER, SIGNAL = 6.8; EXPRESSED IN BONE MARROW, SIGNAL = 5.5; EXPRESSED IN ADULT LIVER, SIGNAL = 4.7; EST_HUMAN HIT: AU120988.1, EVALUE 2.00e-09; SWISSPROT HIT: Q61136, EVALUE 1.00e-10
EKVTVMSTINPTKDLLADLIGCQRLPEDQ

SEQ ID NO: 42339 - protein, 48 aa, Homo sapiens
  MAP TO AC010093.2; EXPRESSED IN BRAIN, SIGNAL = 1.3; EXPRESSED IN HEART, SIGNAL = 2.1; EXPRESSED IN HELA, SIGNAL = 1.7; SWISSPROT HIT: P52501, EVALUE 8.10e+00; EST_HUMAN HIT: AA633467.1, EVALUE 6.00e-12
MWELIQALGLKHALLIQDVIDGKIHKGELSPANHENFSQEHGELFQLF

SEQ ID NO: 42340 - protein, 77 aa, Homo sapiens
  MAP TO AC018552.2; EXPRESSED IN ADULT LIVER, SIGNAL = 5.7; EXPRESSED IN HEART, SIGNAL = 4.7; EXPRESSED IN BRAIN, SIGNAL = 7.8; EXPRESSED IN BONE MARROW, SIGNAL = 5.4; EXPRESSED IN FETAL LIVER, SIGNAL = 5.8; EXPRESSED IN HELA, SIGNAL = 6.3; EXPRESSED IN LUNG, SIGNAL = 6.5; EXPRESSED IN PLACENTA, SIGNAL = 7.2; SWISSPROT HIT: P28984, EVALUE 1.40e-01; EST_HUMAN HIT: BE019655.1, EVALUE 2.00e-41
GLYHFCLYWNRHAGRLHLLYGKRDFLLSDKASSLLCFQHQEESLAQGPPLLATSVTSWWSPQNISLPSAASFTFSFH

SEQ ID NO: 42341 - protein, 90 aa, Homo sapiens
  MAP TO AC018552.2; EXPRESSED IN ADULT LIVER, SIGNAL = 5.7; EXPRESSED IN HEART, SIGNAL = 4.7; EXPRESSED IN BRAIN, SIGNAL = 7.8; EXPRESSED IN BONE MARROW, SIGNAL = 5.4; EXPRESSED IN FETAL LIVER, SIGNAL = 5.8; EXPRESSED IN HELA, SIGNAL = 6.3; EXPRESSED IN LUNG, SIGNAL = 6.5; EXPRESSED IN PLACENTA, SIGNAL = 7.2; SWISSPROT HIT: Q06848, EVALUE 9.10e-01; EST_HUMAN HIT: BE244425.1, EVALUE 2.00e-36
VPTAGATGKTFASAASGTRHTGAASTTNPHQTCASPSRTPKRPSQSMPLSLQPTLLPDPSLTPGASTTSASTGTDMLGDYIFSMASVTSC

SEQ ID NO: 42342 - protein, 29 aa, Homo sapiens
  MAP TO AC007341.3; EXPRESSED IN BRAIN, SIGNAL = 7.3; EXPRESSED IN HELA, SIGNAL =  12; EXPRESSED IN HEART, SIGNAL =  10; EXPRESSED IN ADULT LIVER, SIGNAL =   8; EXPRESSED IN PLACENTA, SIGNAL = 7.5; EXPRESSED IN LUNG, SIGNAL = 4.6; EXPRESSED IN FETAL LIVER, SIGNAL =  11; EXPRESSED IN BONE MARROW, SIGNAL = 6.6
MNFISTSVKPTLGDRHTKKLIPQGDLADL

SEQ ID NO: 42343 - protein, 54 aa, Homo sapiens
  MAP TO AC007611.2; EXPRESSED IN BRAIN, SIGNAL = 1.5; EXPRESSED IN PLACENTA, SIGNAL = 1.7; EXPRESSED IN FETAL LIVER, SIGNAL = 3.5; EXPRESSED IN HELA, SIGNAL = 3.5; EXPRESSED IN HEART, SIGNAL = 3.2; EXPRESSED IN BONE MARROW, SIGNAL = 2.7; EST_HUMAN HIT: H82572.1, EVALUE 2.00e-14; SWISSPROT HIT: P12957, EVALUE 2.10e+00
LTRLREMRRLQKKSLKLAEVSSLGLRKEAISITQKCKMKQQVLMEKLQQVTQKL

SEQ ID NO: 42344 - protein, 27 aa, Homo sapiens
  MAP TO AC003677.1; EXPRESSED IN FETAL LIVER, SIGNAL = 1.6; EXPRESSED IN BONE MARROW, SIGNAL = 1.9; EXPRESSED IN HEART, SIGNAL = 5.6
MSSTQDNTEPQITAFPSQKSSNASQSF

SEQ ID NO: 42345 - protein, 60 aa, Homo sapiens
  MAP TO AC010198.8; EXPRESSED IN BRAIN, SIGNAL = 2.1; EXPRESSED IN PLACENTA, SIGNAL = 1.7; EXPRESSED IN BONE MARROW, SIGNAL = 1.8; EXPRESSED IN FETAL LIVER, SIGNAL =   2; EXPRESSED IN HELA, SIGNAL = 2.2; EXPRESSED IN HEART, SIGNAL = 1.8; EXPRESSED IN LUNG, SIGNAL = 2.2; EST_HUMAN HIT: AA134604.1, EVALUE 1.00e-30; SWISSPROT HIT: Q14444, EVALUE 5.00e-06
NYHPDGTIQVSNGSLAFYPAQTNVFPRPTQPFVNSRGSVRGCTRGGRLITNSYRSPGGYK

SEQ ID NO: 42346 - protein, 70 aa, Homo sapiens
  MAP TO AL133475.14; EXPRESSED IN BRAIN, SIGNAL = 2.2; EXPRESSED IN PLACENTA, SIGNAL = 2.2; EXPRESSED IN HELA, SIGNAL = 2.5; EXPRESSED IN ADULT LIVER, SIGNAL = 2.3; EXPRESSED IN BONE MARROW, SIGNAL = 1.9; EXPRESSED IN FETAL LIVER, SIGNAL = 2.6; EXPRESSED IN HEART, SIGNAL = 2.3; EST_HUMAN HIT: AA397602.1, EVALUE 1.10e-02; SWISSPROT HIT: Q01341, EVALUE 3.40e+00
TLTNTTTTLENNLSVSSKVAYTPSRRYSHSTPRYLLKRRGNIVLKIIYMNVLNSFTCNHTKLKTIQVCIN

SEQ ID NO: 42347 - protein, 65 aa, Homo sapiens
  MAP TO AC021881.2; EXPRESSED IN BONE MARROW, SIGNAL = 2.5; EXPRESSED IN FETAL LIVER, SIGNAL = 3.2; EXPRESSED IN LUNG, SIGNAL = 2.8; EXPRESSED IN PLACENTA, SIGNAL = 2.6; EXPRESSED IN BRAIN, SIGNAL = 3.4; EXPRESSED IN HELA, SIGNAL = 3.2; EXPRESSED IN ADULT LIVER, SIGNAL = 3.2; EXPRESSED IN HEART, SIGNAL = 2.6; EST_HUMAN HIT: AU160252.1, EVALUE 9.00e-24; SWISSPROT HIT: Q13206, EVALUE 4.00e-24
EEEEDDEEEMEEKLAKAKGSQAPSLPNTSEAQKIKEVPTQFLDRDEEEEDADFLKVKRHNVFGLD

SEQ ID NO: 42348 - protein, 44 aa, Homo sapiens
  MAP TO AC021881.2; EXPRESSED IN BONE MARROW, SIGNAL = 2.5; EXPRESSED IN FETAL LIVER, SIGNAL = 3.2; EXPRESSED IN LUNG, SIGNAL = 2.8; EXPRESSED IN PLACENTA, SIGNAL = 2.6; EXPRESSED IN BRAIN, SIGNAL = 3.4; EXPRESSED IN HELA, SIGNAL = 3.2; EXPRESSED IN ADULT LIVER, SIGNAL = 3.2; EXPRESSED IN HEART, SIGNAL = 2.6; EST_HUMAN HIT: BE747617.1, EVALUE 3.00e-11
SNPNTLCRFTFKKSASSSSSSLSKNCVGTSLIFCASLVLGRDGA

SEQ ID NO: 42349 - protein, 119 aa, Homo sapiens
  MAP TO AC020557.2; EXPRESSED IN ADULT LIVER, SIGNAL =   2; EXPRESSED IN FETAL LIVER, SIGNAL = 1.8; EXPRESSED IN HEART, SIGNAL =   2; EXPRESSED IN LUNG, SIGNAL = 2.2; EXPRESSED IN BRAIN, SIGNAL = 2.1; EXPRESSED IN PLACENTA, SIGNAL = 1.5; EXPRESSED IN BONE MARROW, SIGNAL = 1.6; EXPRESSED IN HELA, SIGNAL =   2; SWISSPROT HIT: Q28824, EVALUE 4.00e-11; EST_HUMAN HIT: BE272045.1, EVALUE 2.00e-11
SWPRPPSSCSPASWPRPPSSCSPASWPRPPSSCSPASWPRPPSSCSPASWPRPPSSCSPASWPRPPSSCSPASWPRPEQHSDSGSHPASKPQKFSYRERQRRERVIKIREKNNKKRKTN

SEQ ID NO: 42350 - protein, 49 aa, Homo sapiens
  MAP TO Z97197.2; EXPRESSED IN BONE MARROW, SIGNAL = 1.6; EXPRESSED IN HEART, SIGNAL =   2; EXPRESSED IN LUNG, SIGNAL = 2.3; EXPRESSED IN BRAIN, SIGNAL = 5.2; EXPRESSED IN PLACENTA, SIGNAL = 1.8; EXPRESSED IN ADULT LIVER, SIGNAL = 2.3; EXPRESSED IN FETAL LIVER, SIGNAL = 2.1; EXPRESSED IN HELA, SIGNAL = 2.2; SWISSPROT HIT: P24044, EVALUE 6.00e-07; EST_HUMAN HIT: AF149229.1, EVALUE 1.00e-15
FDTNGDGEISTSELREAMRKLLGHQVGHRDIEEIIRDVDLNGDGRVDFE

SEQ ID NO: 42351 - protein, 131 aa, Homo sapiens; identical to SEQ ID NO: 34821
  MAP TO AC007376.8; EXPRESSED IN BRAIN, SIGNAL = 5.9; EXPRESSED IN HELA, SIGNAL =  25; EXPRESSED IN HEART, SIGNAL =  13; EXPRESSED IN ADULT LIVER, SIGNAL = 7.6; EXPRESSED IN PLACENTA, SIGNAL =  10; EXPRESSED IN LUNG, SIGNAL =  36; EXPRESSED IN FETAL LIVER, SIGNAL =  17; EXPRESSED IN BONE MARROW, SIGNAL =  19; SWISSPROT HIT: P42003, EVALUE 3.40e-01; EST_HUMAN HIT: AW967530.1, EVALUE 2.00e-54

SEQ ID NO: 42352 - protein, 34 aa, Homo sapiens
  MAP TO AL137852.2; EXPRESSED IN BRAIN, SIGNAL = 4.8; EXPRESSED IN HELA, SIGNAL = 5.4; EXPRESSED IN ADULT LIVER, SIGNAL = 5.4; EXPRESSED IN PLACENTA, SIGNAL = 5.1; EXPRESSED IN LUNG, SIGNAL = 3.2; EXPRESSED IN HEART, SIGNAL = 4.9; EXPRESSED IN FETAL LIVER, SIGNAL = 5.6; EXPRESSED IN BONE MARROW, SIGNAL = 3.8
ISAAGSRPGPQLQTRLYPDTATTTTTATAAIMVT

SEQ ID NO: 42353 - protein, 68 aa, Homo sapiens
  MAP TO AC021097.3; EXPRESSED IN BRAIN, SIGNAL = 3.2; EXPRESSED IN HELA, SIGNAL = 4.9; EXPRESSED IN ADULT LIVER, SIGNAL = 4.6; EXPRESSED IN FETAL LIVER, SIGNAL =   5; EXPRESSED IN HEART, SIGNAL = 3.9; EXPRESSED IN LUNG, SIGNAL = 5.4; EXPRESSED IN BONE MARROW, SIGNAL = 3.2; EXPRESSED IN PLACENTA, SIGNAL = 3.7; EST_HUMAN HIT: AI522212.1, EVALUE 3.00e-06; SWISSPROT HIT: P34383, EVALUE 2.60e+00
LPSPNQVEHLSIISQPCLVEDVQRLRQMEKEEEFRAAMVKAHDSLVETEGPDMKEKMKEQIRQWFIEC

SEQ ID NO: 42354 - protein, 43 aa, Homo sapiens
  MAP TO AL136298.1; EXPRESSED IN ADULT LIVER, SIGNAL = 1.7; EXPRESSED IN HELA, SIGNAL = 2.4; EXPRESSED IN HEART, SIGNAL =   2; EXPRESSED IN BRAIN, SIGNAL = 3.8; EXPRESSED IN PLACENTA, SIGNAL = 1.5; EXPRESSED IN BONE MARROW, SIGNAL = 1.9; EXPRESSED IN FETAL LIVER, SIGNAL = 2.2; EXPRESSED IN LUNG, SIGNAL = 2.4
IFFLFSQQPVQTLPQTPPHYLTSPLLLEEDHAPYFTEQLLIIE

SEQ ID NO: 42355 - protein, 37 aa, Homo sapiens
  MAP TO AC025286.1; EXPRESSED IN PLACENTA, SIGNAL = 1.5; EXPRESSED IN BRAIN, SIGNAL = 1.5; EXPRESSED IN HELA, SIGNAL =   2; EXPRESSED IN FETAL LIVER, SIGNAL = 1.9; EXPRESSED IN HEART, SIGNAL = 1.8; EXPRESSED IN LUNG, SIGNAL = 2.4; SWISSPROT HIT: Q07071, EVALUE 1.70e+00
PHVLLSTVEDQERGSPQPSFQRLHSASVASILLQIWS

SEQ ID NO: 42356 - protein, 36 aa, Homo sapiens
  MAP TO AC021012.2; EXPRESSED IN BRAIN, SIGNAL = 9.6; EXPRESSED IN FETAL LIVER, SIGNAL =  12; EXPRESSED IN HELA, SIGNAL =  13; EXPRESSED IN BONE MARROW, SIGNAL = 7.4; EXPRESSED IN HEART, SIGNAL =  11; EXPRESSED IN LUNG, SIGNAL = 5.4; EXPRESSED IN PLACENTA, SIGNAL = 6.8; EXPRESSED IN ADULT LIVER, SIGNAL = 8.8
SRMLFLFLPLDIQLQLLQLLDSGTCSSGLLRVLGPD

SEQ ID NO: 42357 - protein, 48 aa, Homo sapiens
  MAP TO AC007216.2; EXPRESSED IN BRAIN, SIGNAL = 7.1; EXPRESSED IN PLACENTA, SIGNAL = 4.1; EXPRESSED IN FETAL LIVER, SIGNAL = 5.7; EXPRESSED IN ADULT LIVER, SIGNAL = 1.6; EXPRESSED IN BONE MARROW, SIGNAL = 9.4; EXPRESSED IN HELA, SIGNAL = 4.3; EXPRESSED IN LUNG, SIGNAL = 9.5; EXPRESSED IN HEART, SIGNAL =   4; EST_HUMAN HIT: BF592449.1, EVALUE 1.00e-11
VINTLADHHHRGTDFGGSPWLRIIIAFPRSYKVVLTLWTVYLWVSVLT

SEQ ID NO: 42358 - protein, 34 aa, Homo sapiens
  MAP TO AL133286.5; EXPRESSED IN PLACENTA, SIGNAL = 2.4; EXPRESSED IN BRAIN, SIGNAL =   3; EXPRESSED IN FETAL LIVER, SIGNAL = 2.5; EXPRESSED IN HELA, SIGNAL = 2.2; EXPRESSED IN ADULT LIVER, SIGNAL = 3.1; EXPRESSED IN LUNG, SIGNAL = 3.8; EXPRESSED IN BONE MARROW, SIGNAL = 2.6; EXPRESSED IN HEART, SIGNAL = 2.4
KTDPVFLGFLKGDQVRAKPNFLGKSSQRSECYIR

SEQ ID NO: 42359 - protein, 27 aa, Homo sapiens
  MAP TO AF111170.3; EXPRESSED IN BRAIN, SIGNAL = 4.5; EXPRESSED IN ADULT LIVER, SIGNAL = 4.7; EXPRESSED IN HEART, SIGNAL = 4.6; EXPRESSED IN PLACENTA, SIGNAL = 3.9; EXPRESSED IN LUNG, SIGNAL = 4.9; EXPRESSED IN HELA, SIGNAL = 4.3; EXPRESSED IN FETAL LIVER, SIGNAL = 4.3; EXPRESSED IN BONE MARROW, SIGNAL = 3.6
RHIHHLGNQLQLNQHCLDTAFNFFKMA

SEQ ID NO: 42360 - protein, 57 aa, Homo sapiens
  MAP TO AF111170.3; EXPRESSED IN BRAIN, SIGNAL = 4.5; EXPRESSED IN ADULT LIVER, SIGNAL = 4.7; EXPRESSED IN HEART, SIGNAL = 4.6; EXPRESSED IN PLACENTA, SIGNAL = 3.9; EXPRESSED IN LUNG, SIGNAL = 4.9; EXPRESSED IN HELA, SIGNAL = 4.3; EXPRESSED IN FETAL LIVER, SIGNAL = 4.3; EXPRESSED IN BONE MARROW, SIGNAL = 3.6; SWISSPROT HIT: P08345, EVALUE 4.60e+00; EST_HUMAN HIT: AW025419.1, EVALUE 5.50e-01
PPGEPAAAEPALPGHRLQLLQDGREQAPDPRPEDGPRDCCLPLPGLPYGGHAAYPLV

SEQ ID NO: 42361 - protein, 89 aa, Homo sapiens; identical to SEQ ID NO: 42156
  MAP TO AC011510.3; EXPRESSED IN BRAIN, SIGNAL =   4; EXPRESSED IN PLACENTA, SIGNAL = 4.5; EXPRESSED IN BONE MARROW, SIGNAL = 4.1; EXPRESSED IN ADULT LIVER, SIGNAL =   4; EXPRESSED IN HELA, SIGNAL = 4.8; EXPRESSED IN LUNG, SIGNAL = 8.4; EXPRESSED IN FETAL LIVER, SIGNAL = 5.5; EXPRESSED IN HEART, SIGNAL = 4.6; SWISSPROT HIT: Q00839, EVALUE 3.00e-24; EST_HUMAN HIT: BE268652.1, EVALUE 2.00e-48

SEQ ID NO: 42362 - protein, 40 aa, Homo sapiens; identical to SEQ ID NO: 42157
  MAP TO AC011510.3; EXPRESSED IN BRAIN, SIGNAL =   4; EXPRESSED IN PLACENTA, SIGNAL = 4.5; EXPRESSED IN BONE MARROW, SIGNAL = 4.1; EXPRESSED IN ADULT LIVER, SIGNAL =   4; EXPRESSED IN HELA, SIGNAL = 4.8; EXPRESSED IN LUNG, SIGNAL = 8.4; EXPRESSED IN FETAL LIVER, SIGNAL = 5.5; EXPRESSED IN HEART, SIGNAL = 4.6; EST_HUMAN HIT: BE268652.1, EVALUE 4.00e-18

SEQ ID NO: 42363 - protein, 30 aa, Homo sapiens
  MAP TO AL158148.1; EXPRESSED IN BRAIN, SIGNAL = 4.6; EXPRESSED IN HELA, SIGNAL = 5.2; EXPRESSED IN PLACENTA, SIGNAL =   4; EXPRESSED IN FETAL LIVER, SIGNAL =   6; EXPRESSED IN ADULT LIVER, SIGNAL = 4.2; EXPRESSED IN BONE MARROW, SIGNAL = 3.4; EXPRESSED IN LUNG, SIGNAL = 6.3; EXPRESSED IN HEART, SIGNAL = 4.7; SWISSPROT HIT: P54069, EVALUE 6.50e+00
MGVFPHGTPLVGGFCLELWGRAHLSEKGTK

SEQ ID NO: 42364 - protein, 161 aa, Homo sapiens
  MAP TO AC011447.2; EXPRESSED IN PLACENTA, SIGNAL = 3.6; EXPRESSED IN BONE MARROW, SIGNAL = 3.8; EXPRESSED IN FETAL LIVER, SIGNAL = 4.6; EXPRESSED IN LUNG, SIGNAL =   2; EXPRESSED IN HEART, SIGNAL =   3; EXPRESSED IN BRAIN, SIGNAL = 3.9; EXPRESSED IN HELA, SIGNAL = 5.1; EXPRESSED IN ADULT LIVER, SIGNAL = 1.8; SWISSPROT HIT: P11227, EVALUE 9.00e-14; EST_HUMAN HIT: AW753028.1, EVALUE 7.00e-61
WPSCLRAAAAAALILVEALKITNYAQLTLYSSHNFQNLFSSSHLTHILSAPRLLLLYSLFVESPTITIVPGLDLNAASHIIPDTTPDPHDCISLIHLTFTFPQISFFPVSHPDHTWFIDGSSTRPNHHSPAKAGYAIVSSTSIIEATALPPSTTSQQAELV

SEQ ID NO: 42365 - protein, 30 aa, Homo sapiens
  MAP TO AL157915.1; EXPRESSED IN BRAIN, SIGNAL = 2.7; EXPRESSED IN PLACENTA, SIGNAL = 2.3; EXPRESSED IN FETAL LIVER, SIGNAL = 2.7; EXPRESSED IN ADULT LIVER, SIGNAL = 2.5; EXPRESSED IN BONE MARROW, SIGNAL = 2.1; EXPRESSED IN HELA, SIGNAL = 2.9; EXPRESSED IN HEART, SIGNAL = 2.3; EXPRESSED IN LUNG, SIGNAL = 1.9
DTDQPATLYPQQKTADFPIVGTYNQTAFET

SEQ ID NO: 42366 - protein, 19 aa, Homo sapiens
  MAP TO AL157915.1; EXPRESSED IN BRAIN, SIGNAL = 2.7; EXPRESSED IN PLACENTA, SIGNAL = 2.3; EXPRESSED IN FETAL LIVER, SIGNAL = 2.7; EXPRESSED IN ADULT LIVER, SIGNAL = 2.5; EXPRESSED IN BONE MARROW, SIGNAL = 2.1; EXPRESSED IN HELA, SIGNAL = 2.9; EXPRESSED IN HEART, SIGNAL = 2.3; EXPRESSED IN LUNG, SIGNAL = 1.9
TQINLLPYTHNRKLPTSPL

SEQ ID NO: 42367 - protein, 25 aa, Homo sapiens
  MAP TO AC018499.2; EXPRESSED IN BRAIN, SIGNAL = 2.2; EXPRESSED IN FETAL LIVER, SIGNAL = 2.3; EXPRESSED IN LUNG, SIGNAL = 2.1; EXPRESSED IN PLACENTA, SIGNAL = 2.4; EXPRESSED IN HEART, SIGNAL = 2.5; EXPRESSED IN HELA, SIGNAL = 2.7; EXPRESSED IN BONE MARROW, SIGNAL = 2.1; EXPRESSED IN ADULT LIVER, SIGNAL = 2.5
GGLNAGRMLRSYDVKGRVVIQGLGL

SEQ ID NO: 42368 - protein, 37 aa, Homo sapiens
  MAP TO AL133257.2; EXPRESSED IN PLACENTA, SIGNAL = 1.7; EXPRESSED IN BRAIN, SIGNAL =   2; EXPRESSED IN FETAL LIVER, SIGNAL = 2.7; EXPRESSED IN HELA, SIGNAL = 2.5; EXPRESSED IN BONE MARROW, SIGNAL = 1.8; EXPRESSED IN LUNG, SIGNAL = 1.8; EXPRESSED IN HEART, SIGNAL = 2.9; EXPRESSED IN ADULT LIVER, SIGNAL = 2.1
TVREKRRRRGRGRRRRGRGIGVRVVRSRRRKKRERRE

SEQ ID NO: 42369 - protein, 56 aa, Homo sapiens
  MAP TO AC006530.4; EXPRESSED IN BRAIN, SIGNAL = 1.6; EXPRESSED IN ADULT LIVER, SIGNAL = 1.4; EXPRESSED IN BONE MARROW, SIGNAL = 1.7; EXPRESSED IN HELA, SIGNAL = 2.3; EXPRESSED IN HEART, SIGNAL = 3.2; EXPRESSED IN PLACENTA, SIGNAL = 1.9; EXPRESSED IN LUNG, SIGNAL = 4.2; EXPRESSED IN FETAL LIVER, SIGNAL = 2.6; SWISSPROT HIT: P36957, EVALUE 2.00e-27; EST_HUMAN HIT: AA262060.1, EVALUE 2.00e-26
ARKNELAIEDMDGGTFTISNGGVFGSLFGTPIINPPQSAILGMHGIFDRPVAIGGK

SEQ ID NO: 42370 - protein, 32 aa, Homo sapiens
  MAP TO AL133380.3; EXPRESSED IN PLACENTA, SIGNAL = 7.5; EXPRESSED IN LUNG, SIGNAL =  24; EXPRESSED IN BRAIN, SIGNAL = 7.5; EXPRESSED IN HELA, SIGNAL =  11; EXPRESSED IN HEART, SIGNAL = 7.4; EXPRESSED IN FETAL LIVER, SIGNAL = 9.5; EXPRESSED IN BONE MARROW, SIGNAL = 9.3; EXPRESSED IN ADULT LIVER, SIGNAL =  12
WSCLKGILLLFLSRRSASSPRRRPCSVRAPRS

SEQ ID NO: 42371 - protein, 77 aa, Homo sapiens; identical to SEQ ID NO: 41016
  MAP TO AL157955.1; EXPRESSED IN ADULT LIVER, SIGNAL = 2.2; EXPRESSED IN FETAL LIVER, SIGNAL = 1.9; EXPRESSED IN BRAIN, SIGNAL = 2.1; EXPRESSED IN PLACENTA, SIGNAL = 1.7; EXPRESSED IN BONE MARROW, SIGNAL = 1.6; EXPRESSED IN HELA, SIGNAL =   2; EXPRESSED IN HEART, SIGNAL =   2; EXPRESSED IN LUNG, SIGNAL = 3.9; EST_HUMAN HIT: H94215.1, EVALUE 2.00e-16; SWISSPROT HIT: P16522, EVALUE 8.30e+00

SEQ ID NO: 42372 - protein, 38 aa, Homo sapiens
  MAP TO AH009158.1; EXPRESSED IN ADULT LIVER, SIGNAL = 4.2; EXPRESSED IN BONE MARROW, SIGNAL = 3.3; EXPRESSED IN HEART, SIGNAL = 3.2; EXPRESSED IN PLACENTA, SIGNAL = 3.1; EXPRESSED IN HELA, SIGNAL = 3.9; EXPRESSED IN LUNG, SIGNAL = 4.7; EXPRESSED IN BRAIN, SIGNAL = 4.8; EXPRESSED IN FETAL LIVER, SIGNAL = 3.7; EST_HUMAN HIT: BE888589.1, EVALUE 1.00e-12; SWISSPROT HIT: Q15878, EVALUE 4.00e-16
EFAKERERVENRRAFMKLRRQQQIERELNGYRAWIDKA

SEQ ID NO: 42373 - protein, 21 aa, Homo sapiens
  MAP TO AL121975.3; EXPRESSED IN FETAL LIVER, SIGNAL = 2.5; EXPRESSED IN BRAIN, SIGNAL =   2; EXPRESSED IN PLACENTA, SIGNAL = 2.3; EXPRESSED IN HEART, SIGNAL = 2.1; EXPRESSED IN ADULT LIVER, SIGNAL = 2.2; EXPRESSED IN BONE MARROW, SIGNAL = 2.4; EXPRESSED IN HELA, SIGNAL = 2.6; EXPRESSED IN LUNG, SIGNAL = 2.8
SILVANTVIIKGNLFPKCTVM

SEQ ID NO: 42374 - protein, 62 aa, Homo sapiens
  MAP TO AC018553.2; EXPRESSED IN FETAL LIVER, SIGNAL =   2; EXPRESSED IN HELA, SIGNAL = 2.1; EXPRESSED IN HEART, SIGNAL =   2; EXPRESSED IN LUNG, SIGNAL = 3.4; EXPRESSED IN BRAIN, SIGNAL =   2; EXPRESSED IN ADULT LIVER, SIGNAL = 1.9; EXPRESSED IN BONE MARROW, SIGNAL = 2.1; EXPRESSED IN PLACENTA, SIGNAL = 1.9; EST_HUMAN HIT: AI539290.1, EVALUE 7.80e+00; SWISSPROT HIT: O19113, EVALUE 3.00e-01
MHRDTAMNRTDAASQEQMIQATRRQLQQHVNKGKMCSSSVRTGEESNPVLWEPVGQKSLVSK

SEQ ID NO: 42375 - protein, 38 aa, Homo sapiens
  MAP TO AL138734.2; EXPRESSED IN PLACENTA, SIGNAL = 2.9; EXPRESSED IN BRAIN, SIGNAL = 3.3; EXPRESSED IN HELA, SIGNAL = 3.1; EXPRESSED IN FETAL LIVER, SIGNAL = 4.4; EXPRESSED IN ADULT LIVER, SIGNAL = 2.8; EXPRESSED IN LUNG, SIGNAL = 4.3; EXPRESSED IN BONE MARROW, SIGNAL = 2.1; EXPRESSED IN HEART, SIGNAL = 3.3; EST_HUMAN HIT: AA393362.1, EVALUE 2.00e-13
TLSYSPSHWLKSSSGLTPIHQRRQDSPCWLLPALLTSA

SEQ ID NO: 42376 - protein, 66 aa, Homo sapiens
  MAP TO AL121997.7; EXPRESSED IN ADULT LIVER, SIGNAL =   3; EXPRESSED IN BONE MARROW, SIGNAL = 2.8; EXPRESSED IN PLACENTA, SIGNAL = 2.2; EXPRESSED IN FETAL LIVER, SIGNAL = 2.8; EXPRESSED IN LUNG, SIGNAL = 1.9; EXPRESSED IN HEART, SIGNAL = 2.2; EXPRESSED IN BRAIN, SIGNAL = 2.7; EXPRESSED IN HELA, SIGNAL = 2.2; EST_HUMAN HIT: BE813298.1, EVALUE 2.00e-10; SWISSPROT HIT: Q99698, EVALUE 1.00e-34
NLLEYGNITALTNLWYTGQITNFEYLTHLNKHAGRSFNDLMQYPVFPFILADYVSETLDLNDLLIY

SEQ ID NO: 42377 - protein, 47 aa, Homo sapiens
  MAP TO AC005137.1; EXPRESSED IN BRAIN, SIGNAL = 2.2; EXPRESSED IN ADULT LIVER, SIGNAL = 2.1; EXPRESSED IN HELA, SIGNAL = 3.2; EXPRESSED IN FETAL LIVER, SIGNAL = 2.9; EXPRESSED IN BONE MARROW, SIGNAL = 2.3; EXPRESSED IN HEART, SIGNAL = 2.5; EXPRESSED IN PLACENTA, SIGNAL = 1.9; EST_HUMAN HIT: R90988.1, EVALUE 5.20e+00
EAAQTLLKDNDLALVQEFSRSSGYEKLRAWAIPSGWEKAGDGLEKGG

SEQ ID NO: 42378 - protein, 29 aa, Homo sapiens
  MAP TO AL138970.2; EXPRESSED IN BRAIN, SIGNAL =   5; EXPRESSED IN HELA, SIGNAL = 2.7; EXPRESSED IN ADULT LIVER, SIGNAL = 3.2; EXPRESSED IN FETAL LIVER, SIGNAL = 2.7; EXPRESSED IN HEART, SIGNAL = 2.4; EXPRESSED IN BONE MARROW, SIGNAL = 2.2; EXPRESSED IN LUNG, SIGNAL = 2.5; EXPRESSED IN PLACENTA, SIGNAL = 2.6
MAVLMMVTAAIMEEWWGRSLGGEGSGENG

SEQ ID NO: 42379 - protein, 55 aa, Homo sapiens
  MAP TO AC002401.1; EXPRESSED IN BONE MARROW, SIGNAL = 2.6; EXPRESSED IN HEART, SIGNAL = 2.6; EXPRESSED IN LUNG, SIGNAL = 8.8; EXPRESSED IN BRAIN, SIGNAL = 2.8; EXPRESSED IN PLACENTA, SIGNAL = 2.6; EXPRESSED IN ADULT LIVER, SIGNAL = 2.5; EXPRESSED IN FETAL LIVER, SIGNAL = 2.6; EXPRESSED IN HELA, SIGNAL = 3.3; SWISSPROT HIT: P26006, EVALUE 5.00e-20; EST_HUMAN HIT: BE879423.1, EVALUE 6.00e-19
VGPMGEGLVGLGTLVLGLEWPYEVSNGKWLLYPTEITVHGNGSWPCRPPGDLINP

SEQ ID NO: 42380 - protein, 63 aa, Homo sapiens
  MAP TO AL158137.1; EXPRESSED IN BRAIN, SIGNAL = 2.8; EXPRESSED IN PLACENTA, SIGNAL = 2.7; EXPRESSED IN FETAL LIVER, SIGNAL = 2.5; EXPRESSED IN ADULT LIVER, SIGNAL = 9.9; EXPRESSED IN HELA, SIGNAL = 2.7; EXPRESSED IN LUNG, SIGNAL = 2.9; EXPRESSED IN BONE MARROW, SIGNAL = 2.6; EXPRESSED IN HEART, SIGNAL = 2.6; EST_HUMAN HIT: AU136283.1, EVALUE 3.00e-34
DYCWEDHGYSLVNRLYPDVGQLIDEKFHIAYNLTYNTMAMHKDVDTSMLRRAIWNYIHCMFGI

SEQ ID NO: 42381 - protein, 33 aa, Homo sapiens
  MAP TO AL139342.2; EXPRESSED IN PLACENTA, SIGNAL = 1.5; EXPRESSED IN ADULT LIVER, SIGNAL = 1.6; EXPRESSED IN BONE MARROW, SIGNAL = 1.5; EXPRESSED IN FETAL LIVER, SIGNAL = 2.9; EXPRESSED IN HELA, SIGNAL =   3; EXPRESSED IN HEART, SIGNAL = 2.4; EXPRESSED IN BRAIN, SIGNAL = 1.7
SRRRWQRRGTVKERGQSSISISFCLLVQKRSNA

SEQ ID NO: 42382 - protein, 61 aa, Homo sapiens
  MAP TO AC007497.2; EXPRESSED IN BRAIN, SIGNAL = 2.8; EXPRESSED IN PLACENTA, SIGNAL = 2.8; EXPRESSED IN BONE MARROW, SIGNAL = 2.2; EXPRESSED IN FETAL LIVER, SIGNAL = 2.9; EXPRESSED IN HELA, SIGNAL = 2.7; EXPRESSED IN HEART, SIGNAL = 2.4; EXPRESSED IN LUNG, SIGNAL = 3.8; EXPRESSED IN ADULT LIVER, SIGNAL = 3.3; SWISSPROT HIT: Q91437, EVALUE 3.50e+00; EST_HUMAN HIT: AV700924.1, EVALUE 2.70e+00
PSEKIRIEIIALSLNDSQVTMDDTIQRLFVECRFYSLPAEETPVSLPKPKSGQWVYYNYSN

SEQ ID NO: 42383 - protein, 35 aa, Homo sapiens
  MAP TO AL133444.1; EXPRESSED IN BRAIN, SIGNAL =  11; EXPRESSED IN FETAL LIVER, SIGNAL =  15; EXPRESSED IN LUNG, SIGNAL = 7.8; EXPRESSED IN ADULT LIVER, SIGNAL =  12; EXPRESSED IN HEART, SIGNAL =  14; EXPRESSED IN PLACENTA, SIGNAL = 9.7; EXPRESSED IN HELA, SIGNAL =  16; EXPRESSED IN BONE MARROW, SIGNAL =  10; EST_HUMAN HIT: BE935250.1, EVALUE 1.00e-05
PQTGPSGSIPVLLSQEITAPCTLLPVKTFQQNKIW

SEQ ID NO: 42384 - protein, 102 aa, Homo sapiens
  MAP TO AC020557.2; EXPRESSED IN BRAIN, SIGNAL = 1.7; EXPRESSED IN ADULT LIVER, SIGNAL =   2; EXPRESSED IN HELA, SIGNAL = 2.1; EXPRESSED IN FETAL LIVER, SIGNAL = 2.2; EXPRESSED IN HEART, SIGNAL = 2.1; EXPRESSED IN BONE MARROW, SIGNAL = 1.5
GQHGEMQPGPEGPWKAPVILQFHQTLPRHQTLLHQSLHLHQTLLHQILFHQTLHLHQIFHFPVIHSLGSWARKIEIPIVSEHENLQGPRTPGAQGPLALGNP

SEQ ID NO: 42385 - protein, 26 aa, Homo sapiens
  MAP TO AL121769.2; EXPRESSED IN BRAIN, SIGNAL = 4.2; EXPRESSED IN BONE MARROW, SIGNAL =   3; EXPRESSED IN HEART, SIGNAL = 3.9; EXPRESSED IN LUNG, SIGNAL = 5.4; EXPRESSED IN PLACENTA, SIGNAL = 3.5; EXPRESSED IN HELA, SIGNAL =   4; EXPRESSED IN FETAL LIVER, SIGNAL = 4.9; EXPRESSED IN ADULT LIVER, SIGNAL = 3.6; EST_HUMAN HIT: AV712962.1, EVALUE 6.00e-08
ASEQQHSAQAMFNLGYMHEKGLGIKQ

SEQ ID NO: 42386 - protein, 45 aa, Homo sapiens
  MAP TO AL159141.1; EXPRESSED IN HEART, SIGNAL = 1.8; EXPRESSED IN PLACENTA, SIGNAL = 1.4; EXPRESSED IN BONE MARROW, SIGNAL = 1.6; EXPRESSED IN FETAL LIVER, SIGNAL =   2; EXPRESSED IN HELA, SIGNAL = 1.9; SWISSPROT HIT: Q56578, EVALUE 2.10e+00
MHEIFDIHCRNLVKLLVVKLTKVWRPLDDWLPWSFNSGLSTVNIH

SEQ ID NO: 42387 - protein, 17 aa, Homo sapiens
  MAP TO AL159141.1; EXPRESSED IN HEART, SIGNAL = 1.8; EXPRESSED IN PLACENTA, SIGNAL = 1.4; EXPRESSED IN BONE MARROW, SIGNAL = 1.6; EXPRESSED IN FETAL LIVER, SIGNAL =   2; EXPRESSED IN HELA, SIGNAL = 1.9
CMRSLIFTAGTWSSYWW

SEQ ID NO: 42388 - protein, 40 aa, Homo sapiens
  MAP TO AC002041.1; EXPRESSED IN BRAIN, SIGNAL = 3.3; EXPRESSED IN PLACENTA, SIGNAL = 2.4; EXPRESSED IN ADULT LIVER, SIGNAL = 2.6; EXPRESSED IN FETAL LIVER, SIGNAL = 3.2; EXPRESSED IN BONE MARROW, SIGNAL =   3; EXPRESSED IN HELA, SIGNAL = 4.1; EXPRESSED IN HEART, SIGNAL = 3.3; EXPRESSED IN LUNG, SIGNAL = 2.3; EST_HUMAN HIT: BE615118.1, EVALUE 4.20e+00; SWISSPROT HIT: P05850, EVALUE 6.30e+00
MSAEGCCTCSSSQRWDESSLRAPHSMIRVYFWCHSSRWKD

SEQ ID NO: 42389 - protein, 48 aa, Homo sapiens
  MAP TO AC010369.3; EXPRESSED IN ADULT LIVER, SIGNAL = 1.9; EXPRESSED IN HELA, SIGNAL = 2.7; EXPRESSED IN HEART, SIGNAL = 2.1; EXPRESSED IN BRAIN, SIGNAL = 1.9; EXPRESSED IN PLACENTA, SIGNAL = 1.8; EXPRESSED IN BONE MARROW, SIGNAL = 1.8; EXPRESSED IN FETAL LIVER, SIGNAL = 2.7; EST_HUMAN HIT: AA019770.1, EVALUE 2.00e-19; SWISSPROT HIT: P36224, EVALUE 1.10e-01
REQESQMARLKKQQEELEQMRLRYLAAEEKDTVKTERQELLDIRNELN

SEQ ID NO: 42390 - protein, 19 aa, Homo sapiens
  MAP TO AC010369.3; EXPRESSED IN ADULT LIVER, SIGNAL = 1.9; EXPRESSED IN HELA, SIGNAL = 2.7; EXPRESSED IN HEART, SIGNAL = 2.1; EXPRESSED IN BRAIN, SIGNAL = 1.9; EXPRESSED IN PLACENTA, SIGNAL = 1.8; EXPRESSED IN BONE MARROW, SIGNAL = 1.8; EXPRESSED IN FETAL LIVER, SIGNAL = 2.7; EST_HUMAN HIT: AA013144.1, EVALUE 2.00e-04
GSKKVKWLVLKNSRKNWNR

SEQ ID NO: 42391 - protein, 123 aa, Homo sapiens
  MAP TO AC008044.4; EXPRESSED IN ADULT LIVER, SIGNAL = 5.4; EXPRESSED IN BONE MARROW, SIGNAL = 8.7; EXPRESSED IN LUNG, SIGNAL =  13; EXPRESSED IN PLACENTA, SIGNAL = 4.5; EXPRESSED IN BRAIN, SIGNAL = 3.4; EXPRESSED IN HELA, SIGNAL = 7.9; EXPRESSED IN FETAL LIVER, SIGNAL =   7; EXPRESSED IN HEART, SIGNAL = 4.2; SWISSPROT HIT: Q9SA98, EVALUE 2.00e-08; EST_HUMAN HIT: AA760913.1, EVALUE 1.00e-67
FGQSAIFLLGGLQRDEAPTAMFMHSGDIMIMSGFSRLLNHAVPRVLPNPEGEGLPHCLEAPLPAVLPRDSMVEPCSMEDWQVCASYLKTARVNMTVRQVLATDQNFPLEPIEDEKRDISTEGF

SEQ ID NO: 42392 - protein, 28 aa, Homo sapiens
  MAP TO AC008044.4; EXPRESSED IN ADULT LIVER, SIGNAL = 5.4; EXPRESSED IN BONE MARROW, SIGNAL = 8.7; EXPRESSED IN LUNG, SIGNAL =  13; EXPRESSED IN PLACENTA, SIGNAL = 4.5; EXPRESSED IN BRAIN, SIGNAL = 3.4; EXPRESSED IN HELA, SIGNAL = 7.9; EXPRESSED IN FETAL LIVER, SIGNAL =   7; EXPRESSED IN HEART, SIGNAL = 4.2; SWISSPROT HIT: Q95209, EVALUE 2.20e+00; EST_HUMAN HIT: AW949834.1, EVALUE 1.00e-10
LDSPPSFSWVVFKGMRPPRPCLCTVVTS

SEQ ID NO: 42393 - protein, 83 aa, Homo sapiens
  MAP TO AL121769.2; EXPRESSED IN BONE MARROW, SIGNAL = 1.8; EXPRESSED IN FETAL LIVER, SIGNAL = 1.9; EXPRESSED IN LUNG, SIGNAL = 1.8; EXPRESSED IN PLACENTA, SIGNAL = 1.5; EXPRESSED IN BRAIN, SIGNAL = 1.7; EXPRESSED IN HEART, SIGNAL = 1.9; EXPRESSED IN ADULT LIVER, SIGNAL = 1.8; EXPRESSED IN HELA, SIGNAL = 2.1
QSESSSGENHVVDGGSQDHSHSEQDDSSEKMGLISEAASPPGSPEQPPPDLASAISNWVQFEDDTPWASTSPPHQETAETGEE

SEQ ID NO: 42394 - protein, 65 aa, Homo sapiens
  MAP TO AC012178.2; EXPRESSED IN BRAIN, SIGNAL = 2.9; EXPRESSED IN HELA, SIGNAL = 3.2; EXPRESSED IN ADULT LIVER, SIGNAL = 2.8; EXPRESSED IN PLACENTA, SIGNAL = 2.4; EXPRESSED IN LUNG, SIGNAL = 2.8; EXPRESSED IN HEART, SIGNAL = 2.9; EXPRESSED IN FETAL LIVER, SIGNAL = 2.7; EXPRESSED IN BONE MARROW, SIGNAL = 2.5; SWISSPROT HIT: O12946, EVALUE 3.40e+00; EST_HUMAN HIT: BE541280.1, EVALUE 5.80e+00
CENEVSPHGHKMAAMTPSNTSPHDDTLPKGRNRSLMREENVCRKLLVDFLGVVGKNRATESHAHP

SEQ ID NO: 42395 - protein, 32 aa, Homo sapiens
  MAP TO AC023000.2; EXPRESSED IN BRAIN, SIGNAL = 3.5; EXPRESSED IN FETAL LIVER, SIGNAL = 3.2; EXPRESSED IN HELA, SIGNAL = 2.9; EXPRESSED IN ADULT LIVER, SIGNAL = 2.9; EXPRESSED IN PLACENTA, SIGNAL = 2.3; EXPRESSED IN LUNG, SIGNAL =   2; EXPRESSED IN HEART, SIGNAL = 2.7; EXPRESSED IN BONE MARROW, SIGNAL = 2.2
LNRRGKQRRRGGRKGKKMKGKRGTKRRSRREE

SEQ ID NO: 42396 - protein, 19 aa, Homo sapiens
  MAP TO AC023000.2; EXPRESSED IN BRAIN, SIGNAL = 3.5; EXPRESSED IN FETAL LIVER, SIGNAL = 3.2; EXPRESSED IN HELA, SIGNAL = 2.9; EXPRESSED IN ADULT LIVER, SIGNAL = 2.9; EXPRESSED IN PLACENTA, SIGNAL = 2.3; EXPRESSED IN LUNG, SIGNAL =   2; EXPRESSED IN HEART, SIGNAL = 2.7; EXPRESSED IN BONE MARROW, SIGNAL = 2.2
LQGYRLEVSSPMKLIHLST

SEQ ID NO: 42397 - protein, 83 aa, Homo sapiens
  MAP TO AC000026.3; EXPRESSED IN PLACENTA, SIGNAL = 2.2; EXPRESSED IN BRAIN, SIGNAL = 1.9; EXPRESSED IN HEART, SIGNAL = 2.3; EXPRESSED IN FETAL LIVER, SIGNAL =   2; EXPRESSED IN HELA, SIGNAL = 2.5; EXPRESSED IN BONE MARROW, SIGNAL = 3.5; EXPRESSED IN LUNG, SIGNAL = 5.8; EXPRESSED IN ADULT LIVER, SIGNAL = 1.7
GDRGRGGPGGMRGGRGGLMDRGGPGGMFRGGRGGDRGGFRGGRGMDRGGFGGGRRGGPGGPPGPLMEQMGGRRGGRGGPGKMD

SEQ ID NO: 42398 - protein, 69 aa, Homo sapiens
  MAP TO AC002044.1; EXPRESSED IN BRAIN, SIGNAL = 3.8; EXPRESSED IN PLACENTA, SIGNAL = 3.3; EXPRESSED IN FETAL LIVER, SIGNAL = 3.9; EXPRESSED IN HELA, SIGNAL = 3.7; EXPRESSED IN BONE MARROW, SIGNAL = 3.1; EXPRESSED IN HEART, SIGNAL = 3.3; EXPRESSED IN LUNG, SIGNAL = 3.2; EXPRESSED IN ADULT LIVER, SIGNAL = 3.9; SWISSPROT HIT: P34610, EVALUE 3.20e+00
MSCWNRAYRRISTKCERKMLFKIPPMLFNFLVVAAEHEFGAQTQRLLLSSYYLLTNTFITFIMREDRAA

SEQ ID NO: 42399 - protein, 47 aa, Homo sapiens
  MAP TO AC002044.1; EXPRESSED IN BRAIN, SIGNAL = 3.8; EXPRESSED IN PLACENTA, SIGNAL = 3.3; EXPRESSED IN FETAL LIVER, SIGNAL = 3.9; EXPRESSED IN HELA, SIGNAL = 3.7; EXPRESSED IN BONE MARROW, SIGNAL = 3.1; EXPRESSED IN HEART, SIGNAL = 3.3; EXPRESSED IN LUNG, SIGNAL = 3.2; EXPRESSED IN ADULT LIVER, SIGNAL = 3.9; SWISSPROT HIT: P48935, EVALUE 2.80e+00; EST_HUMAN HIT: BE741526.1, EVALUE 1.30e+00
CLAGTEPTEEFQPNARGKCSLKFLPCSSTFWLLLQSMNLVLKPRGSS

SEQ ID NO: 42400 - protein, 26 aa, Homo sapiens
  MAP TO AC018493.4; EXPRESSED IN BRAIN, SIGNAL = 2.2; EXPRESSED IN PLACENTA, SIGNAL = 2.1; EXPRESSED IN BONE MARROW, SIGNAL = 1.7; EXPRESSED IN FETAL LIVER, SIGNAL = 3.1; EXPRESSED IN HELA, SIGNAL = 2.5; EXPRESSED IN HEART, SIGNAL = 2.1; EXPRESSED IN ADULT LIVER, SIGNAL = 2.3
HVMCPLSVMTLMMMIMMMMMMMTIAS

SEQ ID NO: 42401 - protein, 17 aa, Homo sapiens
  MAP TO AC018493.4; EXPRESSED IN BRAIN, SIGNAL = 2.2; EXPRESSED IN PLACENTA, SIGNAL = 2.1; EXPRESSED IN BONE MARROW, SIGNAL = 1.7; EXPRESSED IN FETAL LIVER, SIGNAL = 3.1; EXPRESSED IN HELA, SIGNAL = 2.5; EXPRESSED IN HEART, SIGNAL = 2.1; EXPRESSED IN ADULT LIVER, SIGNAL = 2.3
MLSSSSSSSSLSSSSRS

SEQ ID NO: 42402 - protein, 27 aa, Homo sapiens
  MAP TO AC023084.2; EXPRESSED IN ADULT LIVER, SIGNAL = 3.7; EXPRESSED IN BONE MARROW, SIGNAL = 2.6; EXPRESSED IN HEART, SIGNAL = 2.3; EXPRESSED IN LUNG, SIGNAL = 2.9; EXPRESSED IN BRAIN, SIGNAL =   3; EXPRESSED IN PLACENTA, SIGNAL = 2.1; EXPRESSED IN FETAL LIVER, SIGNAL = 3.1; EXPRESSED IN HELA, SIGNAL = 2.7; EST_HUMAN HIT: AW753685.1, EVALUE 5.00e-04
ENYLVRWGSRGFPKEIEMLNNLKVVFT

SEQ ID NO: 42403 - protein, 161 aa, Homo sapiens [sequence omitted]

SEQ ID NO: 42404 - protein, 39 aa, Homo sapiens
  MAP TO AC002039.1; EXPRESSED IN BRAIN, SIGNAL =  10; EXPRESSED IN FETAL LIVER, SIGNAL = 3.5; EXPRESSED IN HELA, SIGNAL = 2.9; EXPRESSED IN ADULT LIVER, SIGNAL = 1.8; EXPRESSED IN HEART, SIGNAL = 2.8; EXPRESSED IN PLACENTA, SIGNAL = 3.6; EXPRESSED IN LUNG, SIGNAL =  16; EXPRESSED IN BONE MARROW, SIGNAL =   5; SWISSPROT HIT: P98161, EVALUE 1.00e-07; EST_HUMAN HIT: AU125488.1, EVALUE 2.00e-06
VNDWLSVETEANGGLVEKEVLAASKASFHVPTPWEVGQG

SEQ ID NO: 42405 - protein, 32 aa, Homo sapiens
  MAP TO AL136294.1; EXPRESSED IN BRAIN, SIGNAL = 2.7; EXPRESSED IN HELA, SIGNAL = 3.1; EXPRESSED IN ADULT LIVER, SIGNAL =   3; EXPRESSED IN BONE MARROW, SIGNAL = 2.3; EXPRESSED IN FETAL LIVER, SIGNAL =   4; EXPRESSED IN LUNG, SIGNAL = 3.2; EXPRESSED IN HEART, SIGNAL = 3.1; EXPRESSED IN PLACENTA, SIGNAL = 2.5
SYHSRQVGADTVMVGEQEDSMGKTTPGLSLKP

SEQ ID NO: 42406 - protein, 32 aa, Homo sapiens
  MAP TO AL136294.1; EXPRESSED IN BRAIN, SIGNAL = 2.7; EXPRESSED IN HELA, SIGNAL = 3.1; EXPRESSED IN ADULT LIVER, SIGNAL =   3; EXPRESSED IN BONE MARROW, SIGNAL = 2.3; EXPRESSED IN FETAL LIVER, SIGNAL =   4; EXPRESSED IN LUNG, SIGNAL = 3.2; EXPRESSED IN HEART, SIGNAL = 3.1; EXPRESSED IN PLACENTA, SIGNAL = 2.5
PTTADRLGQTPSWLGSRRTAWGKPLQAFLSNL

SEQ ID NO: 42407 - protein, 27 aa, Homo sapiens
  MAP TO AC025286.1; EXPRESSED IN ADULT LIVER, SIGNAL = 3.4; EXPRESSED IN HEART, SIGNAL = 1.9; EXPRESSED IN BRAIN, SIGNAL = 2.6; EXPRESSED IN BONE MARROW, SIGNAL = 4.1; EXPRESSED IN FETAL LIVER, SIGNAL =   3; EXPRESSED IN HELA, SIGNAL = 3.6; EXPRESSED IN LUNG, SIGNAL = 3.8; EXPRESSED IN PLACENTA, SIGNAL = 2.6; SWISSPROT HIT: P25936, EVALUE 5.00e+00
MNADLHPLLPGGTWPKRASRADMARAG

SEQ ID NO: 42408 - protein, 22 aa, Homo sapiens
  MAP TO AC025286.1; EXPRESSED IN ADULT LIVER, SIGNAL = 3.4; EXPRESSED IN HEART, SIGNAL = 1.9; EXPRESSED IN BRAIN, SIGNAL = 2.6; EXPRESSED IN BONE MARROW, SIGNAL = 4.1; EXPRESSED IN FETAL LIVER, SIGNAL =   3; EXPRESSED IN HELA, SIGNAL = 3.6; EXPRESSED IN LUNG, SIGNAL = 3.8; EXPRESSED IN PLACENTA, SIGNAL = 2.6
PCSCHICPGCTFRPRAAWKQRM

SEQ ID NO: 42409 - protein, 18 aa, Homo sapiens
  MAP TO AL157817.3; EXPRESSED IN BRAIN, SIGNAL = 2.5; EXPRESSED IN LUNG, SIGNAL = 2.3; EXPRESSED IN PLACENTA, SIGNAL = 2.1; EXPRESSED IN HEART, SIGNAL = 2.1; EXPRESSED IN HELA, SIGNAL = 2.7; EXPRESSED IN FETAL LIVER, SIGNAL = 2.9; EXPRESSED IN BONE MARROW, SIGNAL = 2.1; EXPRESSED IN ADULT LIVER, SIGNAL = 2.7
QRGAPSAQCSLRAWYMHV

SEQ ID NO: 42410 - protein, 61 aa, Homo sapiens
  MAP TO AC002122.1; EXPRESSED IN PLACENTA, SIGNAL = 2.9; EXPRESSED IN BRAIN, SIGNAL = 2.8; EXPRESSED IN FETAL LIVER, SIGNAL = 3.8; EXPRESSED IN HELA, SIGNAL = 3.9; EXPRESSED IN HEART, SIGNAL = 3.5; EXPRESSED IN BONE MARROW, SIGNAL = 2.2; EXPRESSED IN ADULT LIVER, SIGNAL = 2.5; EST_HUMAN HIT: AA971603.1, EVALUE 8.00e-10; SWISSPROT HIT: O41033, EVALUE 2.30e-01
GEMLPPRETTRFPLNWKLKLLPGHFGLLLPLIQQAKKGVTVLAGVIDLDYQDEISLLLHSG

SEQ ID NO: 42411 - protein, 75 aa, Homo sapiens
  MAP TO Z97197.2; EXPRESSED IN PLACENTA, SIGNAL = 1.7; EXPRESSED IN BONE MARROW, SIGNAL = 3.1; EXPRESSED IN FETAL LIVER, SIGNAL = 2.4; EXPRESSED IN LUNG, SIGNAL = 2.7; EXPRESSED IN HEART, SIGNAL = 2.1; EXPRESSED IN BRAIN, SIGNAL = 1.9; EXPRESSED IN HELA, SIGNAL = 2.5; EXPRESSED IN ADULT LIVER, SIGNAL = 1.9; EST_HUMAN HIT: AW502183.1, EVALUE 3.00e-31; SWISSPROT HIT: Q14165, EVALUE 3.00e-32
VPKLQPHPGLEKKEEEEEEEEYDEGSNLKKQTNKNRVQSGPRTPNPYASDNSSLMFPILVAFGVFIPTLFCLCRL

SEQ ID NO: 42412 - protein, 74 aa, Homo sapiens
  MAP TO Z97197.2; EXPRESSED IN PLACENTA, SIGNAL = 1.7; EXPRESSED IN BONE MARROW, SIGNAL = 3.1; EXPRESSED IN FETAL LIVER, SIGNAL = 2.4; EXPRESSED IN LUNG, SIGNAL = 2.7; EXPRESSED IN HEART, SIGNAL = 2.1; EXPRESSED IN BRAIN, SIGNAL = 1.9; EXPRESSED IN HELA, SIGNAL = 2.5; EXPRESSED IN ADULT LIVER, SIGNAL = 1.9; EST_HUMAN HIT: AA099217.1, EVALUE 7.00e-19; SWISSPROT HIT: Q92793, EVALUE 6.40e+00
MYQSFSLIRDWRRKKRKKKKKNMMKGLISKNRPIRTGCSQAPAHPTPMPRTTAASCFPSWWPSESSFQPSSASA

SEQ ID NO: 42413 - protein, 25 aa, Homo sapiens
  MAP TO AL121603.2; EXPRESSED IN ADULT LIVER, SIGNAL =   5; EXPRESSED IN HELA, SIGNAL = 6.3; EXPRESSED IN BRAIN, SIGNAL = 5.8; EXPRESSED IN PLACENTA, SIGNAL = 4.9; EXPRESSED IN HEART, SIGNAL = 5.2; EXPRESSED IN BONE MARROW, SIGNAL = 4.6; EXPRESSED IN FETAL LIVER, SIGNAL = 6.1; EXPRESSED IN LUNG, SIGNAL = 4.6; EST_HUMAN HIT: BF208078.1, EVALUE 1.20e-02
PLPPPSSVTPGAALCSFSEKLVPLL

SEQ ID NO: 42414 - protein, 31 aa, Homo sapiens
  MAP TO AL079304.2; EXPRESSED IN ADULT LIVER, SIGNAL = 2.4; EXPRESSED IN HELA, SIGNAL = 2.8; EXPRESSED IN LUNG, SIGNAL = 2.8; EXPRESSED IN BRAIN, SIGNAL = 2.5; EXPRESSED IN PLACENTA, SIGNAL = 2.3; EXPRESSED IN BONE MARROW, SIGNAL = 2.5; EXPRESSED IN FETAL LIVER, SIGNAL = 2.9; EXPRESSED IN HEART, SIGNAL = 2.5; SWISSPROT HIT: P34221, EVALUE 2.90e+00
IRMLVTICCAPTMAGSILGTLNVSLTFALSE

SEQ ID NO: 42415 - protein, 65 aa, Homo sapiens
  MAP TO AL109759.3; EXPRESSED IN PLACENTA, SIGNAL = 2.5; EXPRESSED IN BRAIN, SIGNAL = 2.6; EXPRESSED IN BONE MARROW, SIGNAL =   2; EXPRESSED IN HEART, SIGNAL = 2.1; EXPRESSED IN LUNG, SIGNAL = 2.3; EXPRESSED IN ADULT LIVER, SIGNAL = 2.1; EXPRESSED IN FETAL LIVER, SIGNAL = 2.2; EXPRESSED IN HELA, SIGNAL = 2.4; EST_HUMAN HIT: AA047867.1, EVALUE 2.00e-14; SWISSPROT HIT: P08547, EVALUE 3.00e-14
ISKIRNDNGDNTTDIKKVQKIIRNTECLCAHKLENLEEMDIFLETYNLPRLNHEEIETLIRPVMS

SEQ ID NO: 42416 - protein, 173 aa, Homo sapiens
  MAP TO AL049872.3; EXPRESSED IN PLACENTA, SIGNAL =   2; EXPRESSED IN BONE MARROW, SIGNAL = 3.7; EXPRESSED IN BRAIN, SIGNAL = 4.7; EXPRESSED IN LUNG, SIGNAL =   4; EXPRESSED IN HEART, SIGNAL =   4; EXPRESSED IN HELA, SIGNAL =   4; EXPRESSED IN FETAL LIVER, SIGNAL =   4; EXPRESSED IN ADULT LIVER, SIGNAL =   4; EST_HUMAN HIT: AU138211.1, EVALUE 1.00e-88; SWISSPROT HIT: P49454, EVALUE 1.00e-07
QELEELRKSLQEKDATIRTLQENNHRLSDSIAATSELERKEHEQTDSEIKQLKEKQDVLQKLLKEKDLLIKAKSDQLLSSNENFTNKVNENELLRQAVTNLKERILILEMDIGKLKGENEKIVETYRGKETEYQALQETNMKFSMMLREKEFECHSMKEKALAFEQLLKEKEQ

SEQ ID NO: 42417 - protein, 54 aa, Homo sapiens
  MAP TO AC010253.2; EXPRESSED IN HELA, SIGNAL = 1.9; EXPRESSED IN HEART, SIGNAL = 1.8; EXPRESSED IN BRAIN, SIGNAL = 1.8; EXPRESSED IN ADULT LIVER, SIGNAL =   2; EXPRESSED IN BONE MARROW, SIGNAL = 1.6; EXPRESSED IN FETAL LIVER, SIGNAL = 1.9; EXPRESSED IN LUNG, SIGNAL = 2.3; EXPRESSED IN PLACENTA, SIGNAL = 1.8; EST_HUMAN HIT: AA434141.1, EVALUE 6.40e+00; SWISSPROT HIT: P28340, EVALUE 1.20e+00
RNKKVPAISAAKGLDAYKTSEDILEHYGDGRASSPIQPEQQKLVFPLLLPSTTS

SEQ ID NO: 42418 - protein, 53 aa, Homo sapiens
  MAP TO AC010253.2; EXPRESSED IN HELA, SIGNAL = 1.9; EXPRESSED IN HEART, SIGNAL = 1.8; EXPRESSED IN BRAIN, SIGNAL = 1.8; EXPRESSED IN ADULT LIVER, SIGNAL =   2; EXPRESSED IN BONE MARROW, SIGNAL = 1.6; EXPRESSED IN FETAL LIVER, SIGNAL = 1.9; EXPRESSED IN LUNG, SIGNAL = 2.3; EXPRESSED IN PLACENTA, SIGNAL = 1.8; EST_HUMAN HIT: BE140199.1, EVALUE 9.70e-01; SWISSPROT HIT: Q10710, EVALUE 4.70e+00
ETRRFQPSLLQRVLMPTRRVRTSWNTMGMAGQAPLYSQSSRSWSFPCFFLPQL

SEQ ID NO: 42419 - protein, 107 aa, Homo sapiens
  MAP TO AL034347.23; EXPRESSED IN ADULT LIVER, SIGNAL = 2.8; EXPRESSED IN FETAL LIVER, SIGNAL = 3.8; EXPRESSED IN HELA, SIGNAL = 4.5; EXPRESSED IN BRAIN, SIGNAL = 2.5; EXPRESSED IN PLACENTA, SIGNAL = 3.6; EXPRESSED IN HEART, SIGNAL = 4.2; EXPRESSED IN BONE MARROW, SIGNAL = 4.6; EXPRESSED IN LUNG, SIGNAL = 2.2; EST_HUMAN HIT: BE390947.1, EVALUE 2.00e-42; SWISSPROT HIT: P18128, EVALUE 7.70e-02
TPAMAERGQHEAQAMASEGESLKPWQLPCDVEHVGAQKSRNGVWEPLSRFQKMYGNAWMPRQKFAAGAGLSWRTSARAVQKGNVGLEPPHRVPTGTPPSGAVRRGPL

SEQ ID NO: 42420 - protein, 39 aa, Homo sapiens
  MAP TO AL121595.3; EXPRESSED IN PLACENTA, SIGNAL = 1.9; EXPRESSED IN BRAIN, SIGNAL = 1.9; EXPRESSED IN HEART, SIGNAL = 4.8; EXPRESSED IN ADULT LIVER, SIGNAL = 2.1; EXPRESSED IN BONE MARROW, SIGNAL = 1.8; EXPRESSED IN FETAL LIVER, SIGNAL = 4.4; EXPRESSED IN HELA, SIGNAL = 4.8; EST_HUMAN HIT: BE622531.1, EVALUE 9.00e-11
NGFDKNADSDMDNKVQAEVVSNGDEGPVGTEAKVTLVMF

SEQ ID NO: 42421 - protein, 47 aa, Homo sapiens
  MAP TO AC007225.2; EXPRESSED IN HEART, SIGNAL = 2.2; SWISSPROT HIT: P07313, EVALUE 2.00e-13; EST_HUMAN HIT: BF059578.1, EVALUE 5.00e-22
VDGGELFDRITDEKYHLTELDVVLFTRQICEGVHYLHQHYILHLDLK

SEQ ID NO: 42422 - protein, 47 aa, Homo sapiens
  MAP TO AC018765.4; EXPRESSED IN BRAIN, SIGNAL = 2.1; EXPRESSED IN PLACENTA, SIGNAL =   2; EXPRESSED IN ADULT LIVER, SIGNAL = 1.7; EXPRESSED IN BONE MARROW, SIGNAL = 1.5; EXPRESSED IN FETAL LIVER, SIGNAL = 1.9; EXPRESSED IN LUNG, SIGNAL = 3.1; EXPRESSED IN HEART, SIGNAL = 3.4
TITKKEDKKEEEEKERERRGGKRRRKRKLSETLGTYGSLRDKDLDIG

SEQ ID NO: 42423 - protein, 49 aa, Homo sapiens
  MAP TO AC018801.2; EXPRESSED IN BRAIN, SIGNAL = 1.9; EXPRESSED IN ADULT LIVER, SIGNAL = 2.5; EXPRESSED IN BONE MARROW, SIGNAL = 1.6; EXPRESSED IN FETAL LIVER, SIGNAL = 2.3; EXPRESSED IN HELA, SIGNAL = 1.9; EXPRESSED IN HEART, SIGNAL = 1.8; EXPRESSED IN PLACENTA, SIGNAL = 1.7; EST_HUMAN HIT: BE904289.1, EVALUE 1.00e+00; SWISSPROT HIT: P00718, EVALUE 7.10e-01
KQLSQKHHSGLVLKSNWPDQGNMHCPGPVTGDERVTPTTGVLLLHRMKK

SEQ ID NO: 42424 - protein, 75 aa, Homo sapiens
  MAP TO AC022211.2; EXPRESSED IN ADULT LIVER, SIGNAL = 5.4; EXPRESSED IN BONE MARROW, SIGNAL = 4.3; EXPRESSED IN HEART, SIGNAL = 4.4; EXPRESSED IN LUNG, SIGNAL = 4.5; EXPRESSED IN BRAIN, SIGNAL = 3.6; EXPRESSED IN PLACENTA, SIGNAL = 4.7; EXPRESSED IN HELA, SIGNAL = 5.5; EXPRESSED IN FETAL LIVER, SIGNAL = 6.1; EST_HUMAN HIT: AW327334.1, EVALUE 8.00e-28
VDCLVLQLHRVGEQLEKMNGQRMDELFVLIRDGFLLPTGLSSLAQLLLLEIIEFRAAGWKTTPAAHKYYYSEVSD

SEQ ID NO: 42425 - protein, 17 aa, Homo sapiens
  MAP TO AC022211.2; EXPRESSED IN ADULT LIVER, SIGNAL = 5.4; EXPRESSED IN BONE MARROW, SIGNAL = 4.3; EXPRESSED IN HEART, SIGNAL = 4.4; EXPRESSED IN LUNG, SIGNAL = 4.5; EXPRESSED IN BRAIN, SIGNAL = 3.6; EXPRESSED IN PLACENTA, SIGNAL = 4.7; EXPRESSED IN HELA, SIGNAL = 5.5; EXPRESSED IN FETAL LIVER, SIGNAL = 6.1; EST_HUMAN HIT: AV751981.1, EVALUE 3.00e-05
WTVWCCSCTGLGSSWRK

SEQ ID NO: 42426 - protein, 34 aa, Homo sapiens
  MAP TO AC023302.2; EXPRESSED IN PLACENTA, SIGNAL = 3.4; EXPRESSED IN BRAIN, SIGNAL = 1.8; EXPRESSED IN ADULT LIVER, SIGNAL = 1.8; EXPRESSED IN HELA, SIGNAL = 2.5; EXPRESSED IN FETAL LIVER, SIGNAL = 2.3; EXPRESSED IN HEART, SIGNAL = 2.1; EXPRESSED IN BONE MARROW, SIGNAL = 1.7; EST_HUMAN HIT: AW270280.1, EVALUE 1.00e-12
DAFGEKDMDGEEFGNTLYKEWSRELGTFRLQKRL

SEQ ID NO: 42427 - protein, 33 aa, Homo sapiens
  MAP TO AC023302.2; EXPRESSED IN PLACENTA, SIGNAL = 3.4; EXPRESSED IN BRAIN, SIGNAL = 1.8; EXPRESSED IN ADULT LIVER, SIGNAL = 1.8; EXPRESSED IN HELA, SIGNAL = 2.5; EXPRESSED IN FETAL LIVER, SIGNAL = 2.3; EXPRESSED IN HEART, SIGNAL = 2.1; EXPRESSED IN BONE MARROW, SIGNAL = 1.7; EST_HUMAN HIT: AW270280.1, EVALUE 5.00e-12
MRSERRTWMVKNLEIPYTKNGQGNWEHSGCKRD

SEQ ID NO: 42428 - protein, 91 aa, Homo sapiens
  MAP TO AC012578.5; EXPRESSED IN ADULT LIVER, SIGNAL = 1.7; EXPRESSED IN HELA, SIGNAL =   2; EXPRESSED IN HEART, SIGNAL = 1.7; EXPRESSED IN BRAIN, SIGNAL = 1.7; EXPRESSED IN PLACENTA, SIGNAL = 1.5; EXPRESSED IN FETAL LIVER, SIGNAL = 2.1
VEERVRSQHLQKTHMCLMPSPAWLLPLLAFALLLPLLPSSLIIKLAKEFWLHVFFQTLPLISTCRQMSIVPVCRGRYQAWRGLSNLHKGPR

SEQ ID NO: 42429 - protein, 52 aa, Homo sapiens
  MAP TO AC008430.3; EXPRESSED IN BRAIN, SIGNAL = 2.3; EXPRESSED IN ADULT LIVER, SIGNAL = 2.5; EXPRESSED IN BONE MARROW, SIGNAL = 1.7; EXPRESSED IN FETAL LIVER, SIGNAL = 2.2; EXPRESSED IN HELA, SIGNAL = 2.4; EXPRESSED IN HEART, SIGNAL = 2.3; EXPRESSED IN PLACENTA, SIGNAL = 1.5; EST_HUMAN HIT: AW965338.1, EVALUE 9.00e-25; SWISSPROT HIT: P70490, EVALUE 3.00e-13
VDLLVPTKVTGIITQGAKDFGHVQFVGSYKLAYSNDGEHWTVYQDEKQRKDK

SEQ ID NO: 42430 - protein, 75 aa, Homo sapiens
  MAP TO AC019224.2; EXPRESSED IN PLACENTA, SIGNAL = 6.4; EXPRESSED IN BRAIN, SIGNAL = 1.9; EXPRESSED IN HELA, SIGNAL = 3.9; EXPRESSED IN FETAL LIVER, SIGNAL = 9.9; EXPRESSED IN BONE MARROW, SIGNAL = 5.8; EXPRESSED IN HEART, SIGNAL = 1.9; EXPRESSED IN LUNG, SIGNAL =   9; EST_HUMAN HIT: AA828449.1, EVALUE 1.00e-17; SWISSPROT HIT: Q93078, EVALUE 2.00e-18
MPEPAKSAPAPKKGSKKAVTKAQKKDGRKRKRSRKESYSVYVYKVLKQVHPDTGISSKAMGIMNSFVNDIFERIA

SEQ ID NO: 42431 - protein, 54 aa, Homo sapiens
  MAP TO AC017079.2; EXPRESSED IN ADULT LIVER, SIGNAL = 3.9; EXPRESSED IN BONE MARROW, SIGNAL = 7.3; EXPRESSED IN LUNG, SIGNAL = 6.9; EXPRESSED IN HEART, SIGNAL =  11; EXPRESSED IN BRAIN, SIGNAL =  11; EXPRESSED IN PLACENTA, SIGNAL = 7.2; EXPRESSED IN HELA, SIGNAL =  12; EXPRESSED IN FETAL LIVER, SIGNAL =  15; EST_HUMAN HIT: AW157270.1, EVALUE 1.00e-18; SWISSPROT HIT: P35685, EVALUE 4.60e+00
EVHAFQEVISALRVLTVLNMHTNSLGKNLALNLFVYNNANSMLSNIVNSSSFAM

SEQ ID NO: 42432 - protein, 42 aa, Homo sapiens
  MAP TO AC016289.3; EXPRESSED IN BRAIN, SIGNAL = 6.2; EXPRESSED IN PLACENTA, SIGNAL = 4.5; EXPRESSED IN HELA, SIGNAL =   8; EXPRESSED IN ADULT LIVER, SIGNAL = 5.5; EXPRESSED IN HEART, SIGNAL = 8.3; EXPRESSED IN LUNG, SIGNAL = 5.8; EXPRESSED IN BONE MARROW, SIGNAL = 5.1; EXPRESSED IN FETAL LIVER, SIGNAL = 9.3; SWISSPROT HIT: Q15172, EVALUE 3.00e-19; EST_HUMAN HIT: AA406471.1, EVALUE 4.00e-18
VAERALYFWNNEYILSLIEENIDKILPIMFASLYKISKEHWN

SEQ ID NO: 42433 - protein, 26 aa, Homo sapiens
  MAP TO AL158075.2; EXPRESSED IN PLACENTA, SIGNAL = 2.2; EXPRESSED IN BRAIN, SIGNAL = 1.5; EXPRESSED IN FETAL LIVER, SIGNAL = 2.4; EXPRESSED IN HELA, SIGNAL = 2.2; EXPRESSED IN BONE MARROW, SIGNAL = 1.7; EXPRESSED IN HEART, SIGNAL = 1.9; EXPRESSED IN LUNG, SIGNAL = 4.5; EXPRESSED IN ADULT LIVER, SIGNAL = 2.2
FQVPPTLIPQARDPQRLLLGSHFTTL

SEQ ID NO: 42434 - protein, 49 aa, Homo sapiens
  MAP TO AC011489.3; EXPRESSED IN ADULT LIVER, SIGNAL = 3.3; EXPRESSED IN FETAL LIVER, SIGNAL = 3.3; EXPRESSED IN BRAIN, SIGNAL = 3.5; EXPRESSED IN PLACENTA, SIGNAL = 2.9; EXPRESSED IN HEART, SIGNAL = 2.8; EXPRESSED IN BONE MARROW, SIGNAL =   3; EXPRESSED IN HELA, SIGNAL = 3.3; EXPRESSED IN LUNG, SIGNAL = 5.2; EST_HUMAN HIT: AW392016.1, EVALUE 1.50e-01
LAEKKASIGYTYEDSTVAKVEKAAEKPEEEESAAEEESNSDEDEVIPDI

SEQ ID NO: 42435 - protein, 17 aa, Homo sapiens
  MAP TO AC011489.3; EXPRESSED IN ADULT LIVER, SIGNAL = 3.3; EXPRESSED IN FETAL LIVER, SIGNAL = 3.3; EXPRESSED IN BRAIN, SIGNAL = 3.5; EXPRESSED IN PLACENTA, SIGNAL = 2.9; EXPRESSED IN HEART, SIGNAL = 2.8; EXPRESSED IN BONE MARROW, SIGNAL =   3; EXPRESSED IN HELA, SIGNAL = 3.3; EXPRESSED IN LUNG, SIGNAL = 5.2; EST_HUMAN HIT: AW392016.1, EVALUE 7.00e-03
RRRLPSVIPTRTARWPR

SEQ ID NO: 42436 - protein, 43 aa, Homo sapiens
  MAP TO AC002041.1; EXPRESSED IN BRAIN, SIGNAL = 2.5; EXPRESSED IN FETAL LIVER, SIGNAL = 2.4; EXPRESSED IN ADULT LIVER, SIGNAL = 1.8; EXPRESSED IN HELA, SIGNAL = 2.2; EXPRESSED IN HEART, SIGNAL =   2; EXPRESSED IN BONE MARROW, SIGNAL = 1.9; EXPRESSED IN LUNG, SIGNAL = 2.7; EXPRESSED IN PLACENTA, SIGNAL =   2; EST_HUMAN HIT: BF370340.1, EVALUE 4.00e-04
DAPSKRHSTSDLSDATFSNIRREGWLYYKQILTKKGKVRWVEE

SEQ ID NO: 42437 - protein, 134 aa, Homo sapiens
  MAP TO AC021876.2; EXPRESSED IN PLACENTA, SIGNAL = 5.7; EXPRESSED IN BRAIN, SIGNAL =   4; EXPRESSED IN ADULT LIVER, SIGNAL = 3.9; EXPRESSED IN FETAL LIVER, SIGNAL = 4.9; EXPRESSED IN HELA, SIGNAL = 4.8; EXPRESSED IN BONE MARROW, SIGNAL = 3.5; EXPRESSED IN LUNG, SIGNAL = 3.6; EXPRESSED IN HEART, SIGNAL = 4.3; EST_HUMAN HIT: BE908406.1, EVALUE 2.00e-05; SWISSPROT HIT: P11087, EVALUE 4.00e-07
SRPSVGINASPGPYPSVGITASPSPCTSVSITTSAGPRSSASPHPQVPSISRHHRIASPPPSVGITASAGPPPSAGITASAGPPPSVGITASAGPPPSVGITASAGPVRQSASPHPQVPVCQPASLNQQLVTAS

SEQ ID NO: 42438 - protein, 84 aa, Homo sapiens
  MAP TO AC002039.1; EXPRESSED IN ADULT LIVER, SIGNAL =   2; EXPRESSED IN LUNG, SIGNAL = 6.5; EXPRESSED IN BRAIN, SIGNAL = 5.5; EXPRESSED IN BONE MARROW, SIGNAL =   3; EXPRESSED IN FETAL LIVER, SIGNAL = 2.3; EXPRESSED IN HELA, SIGNAL = 2.2; EXPRESSED IN HEART, SIGNAL = 2.4; EXPRESSED IN PLACENTA, SIGNAL = 2.2; EST_HUMAN HIT: AU118746.1, EVALUE 1.00e-40; SWISSPROT HIT: P98161, EVALUE 2.00e-42
TRDPVGSYRLNLSSHFRWSALEVSVGLYTSLCQYFSEEDVVWRTEGLLPLEETSPRQAVCLTRHLTAFGTSLFVPPSHIRFVFP

SEQ ID NO: 42439 - protein, 85 aa, Homo sapiens
  MAP TO AC008381.5; EXPRESSED IN BRAIN, SIGNAL = 3.4; EXPRESSED IN PLACENTA, SIGNAL = 2.7; EXPRESSED IN HEART, SIGNAL = 3.6; EXPRESSED IN ADULT LIVER, SIGNAL = 3.3; EXPRESSED IN BONE MARROW, SIGNAL = 2.7; EXPRESSED IN FETAL LIVER, SIGNAL = 4.2; EXPRESSED IN HELA, SIGNAL = 4.2; EXPRESSED IN LUNG, SIGNAL = 1.7; EST_HUMAN HIT: AW502144.1, EVALUE 5.00e-04
VSSLRDRKPVPKTEATVFYDLVSEVTCHHLCHLQWSHRLTIALWGIQGWEYQEKEIIGGCVGGCLPQSESQNVGFHLVANPQQRI

SEQ ID NO: 42440 - protein, 23 aa, Homo sapiens
  MAP TO AC016993.2; EXPRESSED IN BONE MARROW, SIGNAL =   3; EXPRESSED IN FETAL LIVER, SIGNAL = 5.2; EXPRESSED IN HEART, SIGNAL = 4.1; EXPRESSED IN LUNG, SIGNAL =   3; EXPRESSED IN PLACENTA, SIGNAL = 3.9; EXPRESSED IN BRAIN, SIGNAL = 3.5; EXPRESSED IN HELA, SIGNAL =   5; EXPRESSED IN ADULT LIVER, SIGNAL = 4.1
GSKGPVNVKDGVGVNINALGVKH

SEQ ID NO: 42441 - protein, 30 aa, Homo sapiens
  MAP TO AC016993.2; EXPRESSED IN BONE MARROW, SIGNAL =   3; EXPRESSED IN FETAL LIVER, SIGNAL = 5.2; EXPRESSED IN HEART, SIGNAL = 4.1; EXPRESSED IN LUNG, SIGNAL =   3; EXPRESSED IN PLACENTA, SIGNAL = 3.9; EXPRESSED IN BRAIN, SIGNAL = 3.5; EXPRESSED IN HELA, SIGNAL =   5; EXPRESSED IN ADULT LIVER, SIGNAL = 4.1
PLLHTLKFILQKSKDLKDHRAPGLMHHSLV

SEQ ID NO: 42442 - protein, 47 aa, Homo sapiens
  MAP TO AC022845.2; EXPRESSED IN ADULT LIVER, SIGNAL = 3.6; EXPRESSED IN LUNG, SIGNAL = 1.9; EXPRESSED IN BRAIN, SIGNAL = 3.6; EXPRESSED IN BONE MARROW, SIGNAL = 2.5; EXPRESSED IN FETAL LIVER, SIGNAL = 3.8; EXPRESSED IN HELA, SIGNAL = 3.6; EXPRESSED IN HEART, SIGNAL = 3.3; EXPRESSED IN PLACENTA, SIGNAL = 2.7; EST_HUMAN HIT: BE559789.1, EVALUE 4.00e+00
MPARHRRARRSCWSYRASRPAPTPRRQNSCAASCRPSSSSTSRLWSR

SEQ ID NO: 42443 - protein, 50 aa, Homo sapiens
  MAP TO AC011510.3; EXPRESSED IN BONE MARROW, SIGNAL = 2.1; EXPRESSED IN LUNG, SIGNAL = 5.1; EXPRESSED IN HEART, SIGNAL =   2; EXPRESSED IN BRAIN, SIGNAL =   2; EXPRESSED IN PLACENTA, SIGNAL = 1.9; EXPRESSED IN HELA, SIGNAL = 2.2; EXPRESSED IN ADULT LIVER, SIGNAL = 1.5; EXPRESSED IN FETAL LIVER, SIGNAL = 2.3; EST_HUMAN HIT: BE258804.1, EVALUE 1.00e-23
MKTEMKQGAPTSFLPPEASQLKPDRQQFQSRKRPYEENRGRGYFEHREDR

SEQ ID NO: 42444 - protein, 48 aa, Homo sapiens
  MAP TO AC022047.4; EXPRESSED IN BRAIN, SIGNAL = 3.6; EXPRESSED IN PLACENTA, SIGNAL = 3.2; EXPRESSED IN HELA, SIGNAL = 4.7; EXPRESSED IN LUNG, SIGNAL =   3; EXPRESSED IN ADULT LIVER, SIGNAL = 3.9; EXPRESSED IN BONE MARROW, SIGNAL = 3.3; EXPRESSED IN FETAL LIVER, SIGNAL = 4.4; EXPRESSED IN HEART, SIGNAL =   4
SCVIEIRIQKVTVVMSFTHIFHHEKTRGTGGRKSLAQSGPVVKDGCDE

SEQ ID NO: 42445 - protein, 46 aa, Homo sapiens
  MAP TO AC009144.4; EXPRESSED IN BRAIN, SIGNAL = 7.8; EXPRESSED IN PLACENTA, SIGNAL = 6.3; EXPRESSED IN BONE MARROW, SIGNAL = 5.1; EXPRESSED IN FETAL LIVER, SIGNAL = 7.8; EXPRESSED IN HELA, SIGNAL = 6.7; EXPRESSED IN LUNG, SIGNAL = 7.9; EXPRESSED IN ADULT LIVER, SIGNAL = 7.7; EXPRESSED IN HEART, SIGNAL = 7.3; EST_HUMAN HIT: AW963759.1, EVALUE 1.00e-18
MATGTPESQARFGQSVKGLLTEKVTTCGTDVIALTKQVLKGSRSSE

SEQ ID NO: 42446 - protein, 60 aa, Homo sapiens
  MAP TO AC023490.4; EXPRESSED IN HEART, SIGNAL = 4.2; EXPRESSED IN PLACENTA, SIGNAL = 3.5; EXPRESSED IN BRAIN, SIGNAL = 3.9; EXPRESSED IN ADULT LIVER, SIGNAL = 4.3; EXPRESSED IN BONE MARROW, SIGNAL = 3.2; EXPRESSED IN FETAL LIVER, SIGNAL = 5.1; EXPRESSED IN HELA, SIGNAL = 4.6; EXPRESSED IN LUNG, SIGNAL = 3.7; EST_HUMAN HIT: AA627604.1, EVALUE 2.00e-17; SWISSPROT HIT: O84152, EVALUE 7.80e+00
HLPCPVHPNKVLMKEKSELMNEMHWQYYGTANTSGNLSLTWHVEALPTQTPSSCGAMRRQ

SEQ ID NO: 42447 - protein, 33 aa, Homo sapiens
  MAP TO AC009044.3; EXPRESSED IN HEART, SIGNAL = 1.9; EXPRESSED IN BRAIN, SIGNAL = 1.9; EXPRESSED IN PLACENTA, SIGNAL = 2.1; EXPRESSED IN HELA, SIGNAL = 2.1; EXPRESSED IN ADULT LIVER, SIGNAL =   2; EXPRESSED IN BONE MARROW, SIGNAL = 2.9; EXPRESSED IN FETAL LIVER, SIGNAL =   2; EXPRESSED IN LUNG, SIGNAL = 2.1
KPSPQSREVKIKQENRKRKKNKEKERRKREEIW

SEQ ID NO: 42448 - protein, 38 aa, Homo sapiens
  MAP TO AC012576.3; EXPRESSED IN BRAIN, SIGNAL = 2.6; EXPRESSED IN BONE MARROW, SIGNAL = 2.3; EXPRESSED IN FETAL LIVER, SIGNAL =   2; EXPRESSED IN LUNG, SIGNAL = 3.4; EXPRESSED IN HEART, SIGNAL =   2; EXPRESSED IN PLACENTA, SIGNAL = 2.1; EXPRESSED IN HELA, SIGNAL = 2.4; EXPRESSED IN ADULT LIVER, SIGNAL = 2.2
GSNTDSLMDVLQKPEKYLVPVLFIPENITLLQVIVTIR

SEQ ID NO: 42449 - protein, 39 aa, Homo sapiens
  MAP TO AC018573.2; EXPRESSED IN FETAL LIVER, SIGNAL = 7.6; EXPRESSED IN HEART, SIGNAL = 7.2; EXPRESSED IN BRAIN, SIGNAL = 7.5; EXPRESSED IN PLACENTA, SIGNAL = 8.1; EXPRESSED IN BONE MARROW, SIGNAL = 4.8; EXPRESSED IN ADULT LIVER, SIGNAL = 2.4; EXPRESSED IN HELA, SIGNAL = 7.8; EXPRESSED IN LUNG, SIGNAL =   7; EST_HUMAN HIT: AI201112.1, EVALUE 1.10e-02
VDSAMLHRNLLQPQTNSSSSSGGGGSSSSSISSSSFSQC

SEQ ID NO: 42450 - protein, 42 aa, Homo sapiens
  MAP TO AL138849.5; EXPRESSED IN BRAIN, SIGNAL = 3.5; EXPRESSED IN HELA, SIGNAL = 4.5; EXPRESSED IN ADULT LIVER, SIGNAL = 5.1; EXPRESSED IN BONE MARROW, SIGNAL = 4.4; EXPRESSED IN FETAL LIVER, SIGNAL = 4.8; EXPRESSED IN HEART, SIGNAL = 3.4; EXPRESSED IN LUNG, SIGNAL = 7.9; EXPRESSED IN PLACENTA, SIGNAL = 3.9; EST_HUMAN HIT: AA809411.1, EVALUE 3.00e-07; SWISSPROT HIT: P81914, EVALUE 2.80e+00
VAVFKAHALLKASNKWQVFRKLNYITSVYMSYALYFFSWKLR

SEQ ID NO: 42451 - protein, 41 aa, Homo sapiens
  MAP TO AC011463.3; EXPRESSED IN BRAIN, SIGNAL = 3.2; EXPRESSED IN PLACENTA, SIGNAL = 2.7; EXPRESSED IN BONE MARROW, SIGNAL = 2.6; EXPRESSED IN HELA, SIGNAL = 3.1; EXPRESSED IN LUNG, SIGNAL = 3.9; EXPRESSED IN ADULT LIVER, SIGNAL = 3.5; EXPRESSED IN FETAL LIVER, SIGNAL = 3.1; EXPRESSED IN HEART, SIGNAL = 2.8; SWISSPROT HIT: O83325, EVALUE 8.30e+00; EST_HUMAN HIT: BF664600.1, EVALUE 2.40e+00
SWSPLQLPAHREARLAQAPTVTLTTATGRCAKPGASCASSR

SEQ ID NO: 42452 - protein, 37 aa, Homo sapiens
  MAP TO AL138829.2; EXPRESSED IN ADULT LIVER, SIGNAL = 7.6; EXPRESSED IN HEART, SIGNAL =  10; EXPRESSED IN LUNG, SIGNAL = 1.3e+02; EXPRESSED IN PLACENTA, SIGNAL =  18; EXPRESSED IN BRAIN, SIGNAL =  14; EXPRESSED IN FETAL LIVER, SIGNAL =  37; EXPRESSED IN BONE MARROW, SIGNAL =  14; EXPRESSED IN HELA, SIGNAL =  26; SWISSPROT HIT: P39023, EVALUE 7.00e-14; EST_HUMAN HIT: AW962991.1, EVALUE 5.00e-13
MRLLPLRQKKAHLMEIQVNGGTVAEKLDWVCERLEQQ

SEQ ID NO: 42453 - protein, 17 aa, Homo sapiens
  MAP TO AL138829.2; EXPRESSED IN ADULT LIVER, SIGNAL = 7.6; EXPRESSED IN HEART, SIGNAL =  10; EXPRESSED IN LUNG, SIGNAL = 1.3e+02; EXPRESSED IN PLACENTA, SIGNAL =  18; EXPRESSED IN BRAIN, SIGNAL =  14; EXPRESSED IN FETAL LIVER, SIGNAL =  37; EXPRESSED IN BONE MARROW, SIGNAL =  14; EXPRESSED IN HELA, SIGNAL =  26; EST_HUMAN HIT: BF033690.1, EVALUE 9.00e-04
LPTPRCACFLCARRRPT

SEQ ID NO: 42454 - protein, 61 aa, Homo sapiens
  MAP TO AL133549.2; EXPRESSED IN ADULT LIVER, SIGNAL = 2.8; EXPRESSED IN FETAL LIVER, SIGNAL = 2.7; EXPRESSED IN PLACENTA, SIGNAL = 2.9; EXPRESSED IN BONE MARROW, SIGNAL = 2.1; EXPRESSED IN HELA, SIGNAL = 2.3; EXPRESSED IN HEART, SIGNAL = 2.8; EXPRESSED IN LUNG, SIGNAL = 2.6; EXPRESSED IN BRAIN, SIGNAL = 3.2; EST_HUMAN HIT: AW082678.1, EVALUE 2.00e-22; SWISSPROT HIT: P48380, EVALUE 4.00e-24
LHICLFSWNSSMVIRDLTLRSAASFGSFHLIRLLYDEYMFYLVEHRVAQATGETPIAVMGE

SEQ ID NO: 42455 - protein, 63 aa, Homo sapiens
  MAP TO AC018843.2; EXPRESSED IN HEART, SIGNAL =   2; EXPRESSED IN PLACENTA, SIGNAL = 2.4; EXPRESSED IN ADULT LIVER, SIGNAL = 2.6; EXPRESSED IN BONE MARROW, SIGNAL = 2.6; EXPRESSED IN FETAL LIVER, SIGNAL = 2.5; EXPRESSED IN HELA, SIGNAL = 1.9; EXPRESSED IN LUNG, SIGNAL = 5.6; EXPRESSED IN BRAIN, SIGNAL = 3.4; EST_HUMAN HIT: AI906278.1, EVALUE 6.00e-17
ELEKQKGVVRPSMSQCSSLKKESGNGTLSRACLDDSYASGEGLKRSALSSSLRDLSEAGKSLA

SEQ ID NO: 42456 - protein, 28 aa, Homo sapiens
  MAP TO AC018843.2; EXPRESSED IN HEART, SIGNAL =   2; EXPRESSED IN PLACENTA, SIGNAL = 2.4; EXPRESSED IN ADULT LIVER, SIGNAL = 2.6; EXPRESSED IN BONE MARROW, SIGNAL = 2.6; EXPRESSED IN FETAL LIVER, SIGNAL = 2.5; EXPRESSED IN HELA, SIGNAL = 1.9; EXPRESSED IN LUNG, SIGNAL = 5.6; EXPRESSED IN BRAIN, SIGNAL = 3.4; EST_HUMAN HIT: AI906278.1, EVALUE 6.00e-06
RSSRSRKASCGPACPSALASKRSRATEH

SEQ ID NO: 42457 - protein, 60 aa, Homo sapiens
  MAP TO AC011510.3; EXPRESSED IN BRAIN, SIGNAL =   2; EXPRESSED IN ADULT LIVER, SIGNAL = 1.9; EXPRESSED IN HEART, SIGNAL = 1.9; EXPRESSED IN LUNG, SIGNAL = 2.4; EXPRESSED IN PLACENTA, SIGNAL = 1.7; EXPRESSED IN HELA, SIGNAL = 2.4; EXPRESSED IN FETAL LIVER, SIGNAL =   2; EXPRESSED IN BONE MARROW, SIGNAL = 1.7; EST_HUMAN HIT: BE148597.1, EVALUE 2.00e-29; SWISSPROT HIT: P24460, EVALUE 4.00e-08
TYEMFSWFLRPLPGPHKQLLHHVSTLAAFTVRQVQQHQGNLDASGPARDLVDAFLLKMAQ

SEQ ID NO: 42458 - protein, 55 aa, Homo sapiens
  MAP TO AC011510.3; EXPRESSED IN BRAIN, SIGNAL =   2; EXPRESSED IN ADULT LIVER, SIGNAL = 1.9; EXPRESSED IN HEART, SIGNAL = 1.9; EXPRESSED IN LUNG, SIGNAL = 2.4; EXPRESSED IN PLACENTA, SIGNAL = 1.7; EXPRESSED IN HELA, SIGNAL = 2.4; EXPRESSED IN FETAL LIVER, SIGNAL =   2; EXPRESSED IN BONE MARROW, SIGNAL = 1.7; EST_HUMAN HIT: BE148597.1, EVALUE 2.00e-24; SWISSPROT HIT: P03204, EVALUE 3.50e+00
PTRCSPGSCGPCQAPTSSSSTTSAPWLPSQSGRCSSTRGTWMLRAPHVTLSMPSC

SEQ ID NO: 42459 - protein, 25 aa, Homo sapiens
  MAP TO AC019246.4; EXPRESSED IN FETAL LIVER, SIGNAL = 2.6; EXPRESSED IN LUNG, SIGNAL = 2.2; EXPRESSED IN BRAIN, SIGNAL = 3.1; EXPRESSED IN ADULT LIVER, SIGNAL = 2.8; EXPRESSED IN BONE MARROW, SIGNAL = 3.5; EXPRESSED IN HELA, SIGNAL = 2.3; EXPRESSED IN HEART, SIGNAL = 2.7; EXPRESSED IN PLACENTA, SIGNAL = 3.5; EST_HUMAN HIT: AA486606.1, EVALUE 7.00e-07
TMLMTGLLLINMWVNLCSGLSALKA

SEQ ID NO: 42460 - protein, 69 aa, Homo sapiens; identical to SEQ ID NO: 42194
  MAP TO AC021876.2; EXPRESSED IN HEART, SIGNAL = 2.9; EXPRESSED IN LUNG, SIGNAL =  11; EXPRESSED IN PLACENTA, SIGNAL = 6.3; EST_HUMAN HIT: BE739143.1, EVALUE 1.00e-34; SWISSPROT HIT: Q14956, EVALUE 1.00e-35

SEQ ID NO: 42461 - protein, 32 aa, Homo sapiens; identical to SEQ ID NO: 42195
  MAP TO AC021876.2; EXPRESSED IN HEART, SIGNAL = 2.9; EXPRESSED IN LUNG, SIGNAL =  11; EXPRESSED IN PLACENTA, SIGNAL = 6.3; EST_HUMAN HIT: C03546.1, EVALUE 3.00e-13

SEQ ID NO: 42462 - protein, 52 aa, Homo sapiens
  MAP TO AC020912.3; EXPRESSED IN BRAIN, SIGNAL = 2.3; EXPRESSED IN PLACENTA, SIGNAL =   3; EXPRESSED IN BONE MARROW, SIGNAL = 2.7; EXPRESSED IN ADULT LIVER, SIGNAL = 2.6; EXPRESSED IN HELA, SIGNAL =   4; EXPRESSED IN FETAL LIVER, SIGNAL =   4; EXPRESSED IN HEART, SIGNAL = 3.3; EST_HUMAN HIT: AW468767.1, EVALUE 5.00e+00
SAASVLVSLSGRFSSDVLVVRSQRPRFCIHCWRKEMRSASPNPRGVKIDKEP

SEQ ID NO: 42463 - protein, 32 aa, Homo sapiens
  MAP TO AC020912.3; EXPRESSED IN BRAIN, SIGNAL = 2.3; EXPRESSED IN PLACENTA, SIGNAL =   3; EXPRESSED IN BONE MARROW, SIGNAL = 2.7; EXPRESSED IN ADULT LIVER, SIGNAL = 2.6; EXPRESSED IN HELA, SIGNAL =   4; EXPRESSED IN FETAL LIVER, SIGNAL =   4; EXPRESSED IN HEART, SIGNAL = 3.3
RALCLSSLHVGWVRLTASLSSSSGCRTLASAI

SEQ ID NO: 42464 - protein, 24 aa, Homo sapiens
  MAP TO AL159191.1; EXPRESSED IN PLACENTA, SIGNAL = 9.6; EXPRESSED IN BONE MARROW, SIGNAL =  10; EXPRESSED IN FETAL LIVER, SIGNAL =  14; EXPRESSED IN HELA, SIGNAL =  16; EXPRESSED IN LUNG, SIGNAL = 6.7; EXPRESSED IN ADULT LIVER, SIGNAL =  11; EXPRESSED IN HEART, SIGNAL =  12; EXPRESSED IN BRAIN, SIGNAL = 9.1; EST_HUMAN HIT: AV760955.1, EVALUE 3.60e+00; SWISSPROT HIT: P37906, EVALUE 5.10e+00
CIYLMEYYRATKKNKLLLLLHATT

SEQ ID NO: 42465 - protein, 73 aa, Homo sapiens
  MAP TO AC007227.3; EXPRESSED IN BRAIN, SIGNAL = 1.8; EXPRESSED IN ADULT LIVER, SIGNAL =   2; EXPRESSED IN HELA, SIGNAL = 3.9; EXPRESSED IN HEART, SIGNAL =   3; EXPRESSED IN PLACENTA, SIGNAL = 4.6; EXPRESSED IN LUNG, SIGNAL =  11; EXPRESSED IN FETAL LIVER, SIGNAL = 2.2; EXPRESSED IN BONE MARROW, SIGNAL = 2.5; EST_HUMAN HIT: BE378649.1, EVALUE 2.00e-13; SWISSPROT HIT: P11516, EVALUE 2.00e-14
LAAKEAKLRDLEDSLARERDTSRRLLAEKEREMAEMRARMQQQLDEYQELLDIKLALDMEIHAYRKLLEGEEE

SEQ ID NO: 42466 - protein, 22 aa, Homo sapiens
  MAP TO AC007227.3; EXPRESSED IN BRAIN, SIGNAL = 1.8; EXPRESSED IN ADULT LIVER, SIGNAL =   2; EXPRESSED IN HELA, SIGNAL = 3.9; EXPRESSED IN HEART, SIGNAL =   3; EXPRESSED IN PLACENTA, SIGNAL = 4.6; EXPRESSED IN LUNG, SIGNAL =  11; EXPRESSED IN FETAL LIVER, SIGNAL = 2.2; EXPRESSED IN BONE MARROW, SIGNAL = 2.5; EST_HUMAN HIT: AU141882.1, EVALUE 4.00e-06; SWISSPROT HIT: O14514, EVALUE 6.70e+00
SHPPSAGSQGGEASRPGGLTGP

SEQ ID NO: 42467 - protein, 29 aa, Homo sapiens
  MAP TO AC007341.3; EXPRESSED IN BRAIN, SIGNAL = 3.8; EXPRESSED IN PLACENTA, SIGNAL = 2.7; EXPRESSED IN ADULT LIVER, SIGNAL = 3.2; EXPRESSED IN BONE MARROW, SIGNAL = 2.8; EXPRESSED IN HELA, SIGNAL = 2.7; EXPRESSED IN LUNG, SIGNAL = 5.3; EXPRESSED IN FETAL LIVER, SIGNAL = 2.8; EXPRESSED IN HEART, SIGNAL = 2.7
TNESSLPLGQQQVIQLQNPISASAFSNYF

SEQ ID NO: 42468 - protein, 25 aa, Homo sapiens
  MAP TO AC011912.3; EXPRESSED IN HEART, SIGNAL = 2.8; EXPRESSED IN BRAIN, SIGNAL = 2.6; EXPRESSED IN PLACENTA, SIGNAL =   2; EXPRESSED IN ADULT LIVER, SIGNAL = 2.7; EXPRESSED IN BONE MARROW, SIGNAL = 2.1; EXPRESSED IN FETAL LIVER, SIGNAL =   3; EXPRESSED IN HELA, SIGNAL = 3.1; EXPRESSED IN LUNG, SIGNAL = 1.7; EST_HUMAN HIT: R21231.1, EVALUE 1.10e-01
WYSVTWVSSLVVIVRFWCSHHLSSI

SEQ ID NO: 42469 - protein, 41 aa, Homo sapiens
  MAP TO AL096814.26; EXPRESSED IN FETAL LIVER, SIGNAL = 2.5; EXPRESSED IN BONE MARROW, SIGNAL =   2; EXPRESSED IN HELA, SIGNAL = 2.5; EXPRESSED IN ADULT LIVER, SIGNAL =   9; EXPRESSED IN HEART, SIGNAL = 2.3; EXPRESSED IN LUNG, SIGNAL = 2.9; EXPRESSED IN BRAIN, SIGNAL = 2.1; EXPRESSED IN PLACENTA, SIGNAL = 2.7
GSRRNNRGKRLRRRLLQLRWQPRLRGLRGPWGRRGCCPWTS

SEQ ID NO: 42470 - protein, 33 aa, Homo sapiens
  MAP TO AL138970.2; EXPRESSED IN ADULT LIVER, SIGNAL = 1.8; EXPRESSED IN HEART, SIGNAL = 1.9; EXPRESSED IN BRAIN, SIGNAL = 1.6; EXPRESSED IN PLACENTA, SIGNAL = 1.4; EXPRESSED IN BONE MARROW, SIGNAL = 1.5; EXPRESSED IN HELA, SIGNAL = 1.7
MRGNFHTQSWATSKMKERKNKKLPQTSFFMVKC

SEQ ID NO: 42471 - protein, 65 aa, Homo sapiens
  MAP TO AC010352.4; EXPRESSED IN HELA, SIGNAL = 4.5; EXPRESSED IN BRAIN, SIGNAL = 3.5; EXPRESSED IN ADULT LIVER, SIGNAL = 2.7; EXPRESSED IN BONE MARROW, SIGNAL = 2.4; EXPRESSED IN FETAL LIVER, SIGNAL = 3.8; EXPRESSED IN LUNG, SIGNAL = 7.2; EXPRESSED IN HEART, SIGNAL = 3.8; EXPRESSED IN PLACENTA, SIGNAL = 2.7; EST_HUMAN HIT: AI140163.1, EVALUE 1.00e-22; SWISSPROT HIT: O75962, EVALUE 9.00e-24
EDPAKRPSAALALQEQWLQAGNGRSTGVLDTSRLTSFIERRKHQNDVRPIRSIKNFLQSRLLPRV

SEQ ID NO: 42472 - protein, 48 aa, Homo sapiens
  MAP TO AC011462.3; EXPRESSED IN PLACENTA, SIGNAL = 6.7; EXPRESSED IN BRAIN, SIGNAL = 2.1; EXPRESSED IN BONE MARROW, SIGNAL = 5.7; EXPRESSED IN LUNG, SIGNAL =  14; EXPRESSED IN ADULT LIVER, SIGNAL = 2.7; EXPRESSED IN FETAL LIVER, SIGNAL = 4.1; EXPRESSED IN HELA, SIGNAL = 3.4; EXPRESSED IN HEART, SIGNAL =   3; EST_HUMAN HIT: AA313211.1, EVALUE 5.00e-22; SWISSPROT HIT: P01137, EVALUE 4.00e-23
FTTGRRGDLATIHGMNRPFLLLMATPLERAQHLQSSRHRRALDTNYCF

SEQ ID NO: 42473 - protein, 26 aa, Homo sapiens
  MAP TO AL133551.4; EXPRESSED IN PLACENTA, SIGNAL =  10; EXPRESSED IN BRAIN, SIGNAL =  11; EXPRESSED IN BONE MARROW, SIGNAL = 8.9; EXPRESSED IN FETAL LIVER, SIGNAL =  19; EXPRESSED IN HELA, SIGNAL =  20; EXPRESSED IN ADULT LIVER, SIGNAL =  11; EXPRESSED IN LUNG, SIGNAL = 7.1; EXPRESSED IN HEART, SIGNAL =  16; EST_HUMAN HIT: BF210736.1, EVALUE 4.00e-08
LNKSWQNLKSELWNVTQTSILKTPKL

SEQ ID NO: 42474 - protein, 51 aa, Homo sapiens
  MAP TO AC012178.2; EXPRESSED IN BRAIN, SIGNAL = 7.3; EXPRESSED IN ADULT LIVER, SIGNAL = 5.8; EXPRESSED IN BONE MARROW, SIGNAL = 5.2; EXPRESSED IN HELA, SIGNAL = 6.3; EXPRESSED IN HEART, SIGNAL = 5.6; EXPRESSED IN PLACENTA, SIGNAL = 5.6; EXPRESSED IN LUNG, SIGNAL = 7.5; EXPRESSED IN FETAL LIVER, SIGNAL = 6.9
CYTSNLPPSSLLLFKPMRKRRRKKKRRRKKRKKKRRRKKLTTTTPTVGLTI

SEQ ID NO: 42475 - protein, 71 aa, Homo sapiens
  MAP TO AL160008.1; EXPRESSED IN ADULT LIVER, SIGNAL = 1.6; EXPRESSED IN HEART, SIGNAL = 1.7; EXPRESSED IN BRAIN, SIGNAL = 1.6; EXPRESSED IN BONE MARROW, SIGNAL = 1.5; EXPRESSED IN FETAL LIVER, SIGNAL = 1.7; EXPRESSED IN HELA, SIGNAL = 1.7; EXPRESSED IN LUNG, SIGNAL = 3.5; SWISSPROT HIT: P32455, EVALUE 2.00e-37; EST_HUMAN HIT: AV647345.1, EVALUE 2.00e-36
LPRLCIRKFFPKKKCFVFDRPVHRRKLAQLEKLQDEELDPEFVQQVADFCSYIFSNSKTKTLSGGIQVNGP

SEQ ID NO: 42476 - protein, 42 aa, Homo sapiens
  MAP TO AL160008.1; EXPRESSED IN ADULT LIVER, SIGNAL = 1.6; EXPRESSED IN HEART, SIGNAL = 1.7; EXPRESSED IN BRAIN, SIGNAL = 1.6; EXPRESSED IN BONE MARROW, SIGNAL = 1.5; EXPRESSED IN FETAL LIVER, SIGNAL = 1.7; EXPRESSED IN HELA, SIGNAL = 1.7; EXPRESSED IN LUNG, SIGNAL = 3.5; EST_HUMAN HIT: AV687504.1, EVALUE 6.00e-18; SWISSPROT HIT: P42379, EVALUE 3.70e+00
SVSGNSSQRKNALSLIGPFTAGSLPSSRNYKMKSWTPNLCNK

SEQ ID NO: 42477 - protein, 40 aa, Homo sapiens
  MAP TO AC008407.3; EXPRESSED IN BRAIN, SIGNAL = 2.2; EXPRESSED IN PLACENTA, SIGNAL = 1.4; EXPRESSED IN HELA, SIGNAL = 1.8; EXPRESSED IN ADULT LIVER, SIGNAL = 1.9; EXPRESSED IN BONE MARROW, SIGNAL = 1.6; EXPRESSED IN FETAL LIVER, SIGNAL = 1.6; EXPRESSED IN LUNG, SIGNAL = 1.6; EXPRESSED IN HEART, SIGNAL = 1.9; EST_HUMAN HIT: AW500547.1, EVALUE 1.00e-05
GVRSGIQSRTSNNFQAHGVIKRGTYQAHYVHCSLTATRDC

SEQ ID NO: 42478 - protein, 57 aa, Homo sapiens
  MAP TO AC007869.2; EXPRESSED IN PLACENTA, SIGNAL = 2.5; EXPRESSED IN BONE MARROW, SIGNAL = 3.1; EXPRESSED IN LUNG, SIGNAL =   5; EXPRESSED IN HEART, SIGNAL = 6.3; EXPRESSED IN BRAIN, SIGNAL = 3.5; EXPRESSED IN HELA, SIGNAL = 3.3; EXPRESSED IN FETAL LIVER, SIGNAL = 5.1; EXPRESSED IN ADULT LIVER, SIGNAL = 4.6; EST_HUMAN HIT: H30134.1, EVALUE 1.60e+00; SWISSPROT HIT: O66998, EVALUE 6.00e+00
SLCLKHTPSIPSFSITGIPGFPQTISKAPLVCGMNVASQSGPVPNSMWLLVPCVTLG

SEQ ID NO: 42479 - protein, 106 aa, Homo sapiens
  MAP TO AP001255.1; EXPRESSED IN HELA, SIGNAL = 2.5; EXPRESSED IN HEART, SIGNAL =   2; EXPRESSED IN BRAIN, SIGNAL = 1.8; EXPRESSED IN PLACENTA, SIGNAL =   2; EXPRESSED IN ADULT LIVER, SIGNAL = 2.2; EXPRESSED IN BONE MARROW, SIGNAL =   2; EXPRESSED IN FETAL LIVER, SIGNAL = 2.6; EST_HUMAN HIT: AA481243.1, EVALUE 3.00e-17; SWISSPROT HIT: P35556, EVALUE 1.10e+00
DKASVDHEATKKFIDEFDKIITDENLILEQSCNTDGTSLFWCYCSRKTLITASEISLTEVKNAKDTLSVLICANAAGKHKCNLEIDKGLCPHCFQVVKLLSANYHA

SEQ ID NO: 42480 - protein, 25 aa, Homo sapiens
  MAP TO AP001255.1; EXPRESSED IN HELA, SIGNAL = 2.5; EXPRESSED IN HEART, SIGNAL =   2; EXPRESSED IN BRAIN, SIGNAL = 1.8; EXPRESSED IN PLACENTA, SIGNAL =   2; EXPRESSED IN ADULT LIVER, SIGNAL = 2.2; EXPRESSED IN BONE MARROW, SIGNAL =   2; EXPRESSED IN FETAL LIVER, SIGNAL = 2.6; EST_HUMAN HIT: AW875651.1, EVALUE 2.10e-02
IKHLLIMKQQRNSLMSLIRSSLMKI

SEQ ID NO: 42481 - protein, 55 aa, Homo sapiens
  MAP TO AC011609.9; EXPRESSED IN ADULT LIVER, SIGNAL = 4.2; EXPRESSED IN BONE MARROW, SIGNAL = 3.6; EXPRESSED IN FETAL LIVER, SIGNAL = 5.1; EXPRESSED IN HEART, SIGNAL = 4.9; EXPRESSED IN PLACENTA, SIGNAL = 3.5; EXPRESSED IN LUNG, SIGNAL = 3.4; EXPRESSED IN BRAIN, SIGNAL =   5; EXPRESSED IN HELA, SIGNAL = 5.7; SWISSPROT HIT: P35331, EVALUE 1.00e-10; EST_HUMAN HIT: BF342999.1, EVALUE 2.00e-09
DMQPTESADSLVEYGEGDHGLFSEDGSFIGAYAGSKEKGSVESNGSSTATFPLRA

SEQ ID NO: 42482 - protein, 57 aa, Homo sapiens
  MAP TO AC018558.2; EXPRESSED IN FETAL LIVER, SIGNAL = 1.6; EXPRESSED IN HEART, SIGNAL =   2; EXPRESSED IN BRAIN, SIGNAL = 2.2; EST_HUMAN HIT: AW262898.1, EVALUE 3.00e-15; SWISSPROT HIT: P10267, EVALUE 8.00e-04
ALDSSTQTAQYAENWMHTADQAWMFQNKTNTEIQTEVAMLKTTVLWLEEQVQSLQLQ

SEQ ID NO: 42483 - protein, 31 aa, Homo sapiens
  MAP TO AC018790.3; EXPRESSED IN ADULT LIVER, SIGNAL = 2.2; EXPRESSED IN BONE MARROW, SIGNAL =   2; EXPRESSED IN FETAL LIVER, SIGNAL = 3.1; EXPRESSED IN HEART, SIGNAL = 2.6; EXPRESSED IN PLACENTA, SIGNAL = 1.8; EXPRESSED IN LUNG, SIGNAL = 2.6; EXPRESSED IN BRAIN, SIGNAL = 2.2; EXPRESSED IN HELA, SIGNAL = 2.7; EST_HUMAN HIT: AW364973.1, EVALUE 5.00e-10; SWISSPROT HIT: P42858, EVALUE 5.00e+00
DLTMEMNRFRLIGPLSHSILTEAIKAASVHT

SEQ ID NO: 42484 - protein, 54 aa, Homo sapiens
  MAP TO AL160006.1; EXPRESSED IN BRAIN, SIGNAL = 1.9; EXPRESSED IN ADULT LIVER, SIGNAL = 2.3; EXPRESSED IN HEART, SIGNAL =   2; EXPRESSED IN PLACENTA, SIGNAL = 2.5; EXPRESSED IN LUNG, SIGNAL = 2.2; EXPRESSED IN HELA, SIGNAL = 2.2; EXPRESSED IN FETAL LIVER, SIGNAL = 1.9; EXPRESSED IN BONE MARROW, SIGNAL = 1.8
EDEDAQSPCENLGHPILKSMLFPRCPAMECGRQCAQKEEAGGKAGAEDRAEERA

SEQ ID NO: 42485 - protein, 17 aa, Homo sapiens
  MAP TO AL160006.1; EXPRESSED IN BRAIN, SIGNAL = 1.9; EXPRESSED IN ADULT LIVER, SIGNAL = 2.3; EXPRESSED IN HEART, SIGNAL =   2; EXPRESSED IN PLACENTA, SIGNAL = 2.5; EXPRESSED IN LUNG, SIGNAL = 2.2; EXPRESSED IN HELA, SIGNAL = 2.2; EXPRESSED IN FETAL LIVER, SIGNAL = 1.9; EXPRESSED IN BONE MARROW, SIGNAL = 1.8
MRTRTLRVRVRTWVIQS

SEQ ID NO: 42486 - protein, 50 aa, Homo sapiens
  MAP TO AL136316.2; EXPRESSED IN BRAIN, SIGNAL = 2.1; EXPRESSED IN PLACENTA, SIGNAL = 2.3; EXPRESSED IN ADULT LIVER, SIGNAL = 1.8; EXPRESSED IN BONE MARROW, SIGNAL = 1.6; EXPRESSED IN HEART, SIGNAL = 1.7; EXPRESSED IN LUNG, SIGNAL = 2.8; EST_HUMAN HIT: AW369009.1, EVALUE 5.10e+00
VVHNNKVSVVSNKEQRRGCGSLIWLSCYLMCYHRNPIPVRFQQEIDGTSK

SEQ ID NO: 42487 - protein, 42 aa, Homo sapiens
  MAP TO AC011447.2; EXPRESSED IN HEART, SIGNAL =   2; EXPRESSED IN PLACENTA, SIGNAL = 1.8; EXPRESSED IN BRAIN, SIGNAL = 2.4; EXPRESSED IN ADULT LIVER, SIGNAL = 1.4; EXPRESSED IN BONE MARROW, SIGNAL = 1.7; EXPRESSED IN FETAL LIVER, SIGNAL = 1.8; EST_HUMAN HIT: BE252748.1, EVALUE 5.00e-17; SWISSPROT HIT: Q03938, EVALUE 1.00e-16
GPLQFRDVAIEFSLEEWHCLDTAQRNLYRDVKFQNYRNLVFL

SEQ ID NO: 42488 - protein, 113 aa, Homo sapiens
  MAP TO AC012153.10; EXPRESSED IN BRAIN, SIGNAL =   6; EXPRESSED IN ADULT LIVER, SIGNAL = 7.2; EXPRESSED IN BONE MARROW, SIGNAL = 5.7; EXPRESSED IN HELA, SIGNAL =   7; EXPRESSED IN LUNG, SIGNAL =   5; EXPRESSED IN HEART, SIGNAL = 6.1; EXPRESSED IN PLACENTA, SIGNAL = 6.9; EXPRESSED IN FETAL LIVER, SIGNAL = 6.8; SWISSPROT HIT: Q9Z0E8, EVALUE 3.00e-05; EST_HUMAN HIT: AV652088.1, EVALUE 4.00e-32
MALMVSIMWLCTQSMLENFSAAVPSHRCWAPLLDNSTAQASILGSLSPEALLAISIPPGPNQRPHQCRRFRQPQWQLLDPNATATSWSEADTEPCVDGWVYDRSIFTSTIVAK

SEQ ID NO: 42489 - protein, 47 aa, Homo sapiens
  MAP TO AC012153.10; EXPRESSED IN BRAIN, SIGNAL =   6; EXPRESSED IN ADULT LIVER, SIGNAL = 7.2; EXPRESSED IN BONE MARROW, SIGNAL = 5.7; EXPRESSED IN HELA, SIGNAL =   7; EXPRESSED IN LUNG, SIGNAL =   5; EXPRESSED IN HEART, SIGNAL = 6.1; EXPRESSED IN PLACENTA, SIGNAL = 6.9; EXPRESSED IN FETAL LIVER, SIGNAL = 6.8; EST_HUMAN HIT: BF196052.1, EVALUE 3.00e-12
GSDGLHHVAVYPEHAGELLGRRAQPPLLGTPPGQQHGSGQHPRELES

SEQ ID NO: 42490 - protein, 82 aa, Homo sapiens
  MAP TO AL139289.4; EXPRESSED IN FETAL LIVER, SIGNAL = 3.8; EXPRESSED IN HEART, SIGNAL = 3.2; EXPRESSED IN BRAIN, SIGNAL = 2.9; EXPRESSED IN PLACENTA, SIGNAL = 2.8; EXPRESSED IN ADULT LIVER, SIGNAL =   3; EXPRESSED IN BONE MARROW, SIGNAL = 3.4; EXPRESSED IN HELA, SIGNAL = 3.7; EXPRESSED IN LUNG, SIGNAL = 3.9; SWISSPROT HIT: P01183, EVALUE 6.50e+00; EST_HUMAN HIT: BE272485.1, EVALUE 5.00e-30
LRPNKQTFNPTDTNALVAAVAFGKGLSNWRPSGSSGPGQAGQPGAGTILAGTSGLQQVQMAGAPSQQQPMLSGVQMAQAGQP

SEQ ID NO: 42491 - protein, 103 aa, Homo sapiens
  MAP TO AL139289.4; EXPRESSED IN FETAL LIVER, SIGNAL = 3.8; EXPRESSED IN HEART, SIGNAL = 3.2; EXPRESSED IN BRAIN, SIGNAL = 2.9; EXPRESSED IN PLACENTA, SIGNAL = 2.8; EXPRESSED IN ADULT LIVER, SIGNAL =   3; EXPRESSED IN BONE MARROW, SIGNAL = 3.4; EXPRESSED IN HELA, SIGNAL = 3.7; EXPRESSED IN LUNG, SIGNAL = 3.9; EST_HUMAN HIT: AW387776.1, EVALUE 2.00e-43; SWISSPROT HIT: O08739, EVALUE 1.80e+00
LPRSVLHQKHTSGSPLLFLQVSGRTSRPLTLQTLMPWWQLLPLGKDYLIGDLQAAVVLARQASQELGRSLQEPQDYSRCRWQELQASSSQCSVGYKWLRQVNQ

SEQ ID NO: 42492 - protein, 77 aa, Homo sapiens
  MAP TO AL121953.10; EXPRESSED IN BRAIN, SIGNAL = 1.6; EXPRESSED IN ADULT LIVER, SIGNAL =   2; EXPRESSED IN BONE MARROW, SIGNAL = 1.6; EXPRESSED IN FETAL LIVER, SIGNAL = 2.3; EXPRESSED IN HELA, SIGNAL = 2.2; EXPRESSED IN HEART, SIGNAL = 2.2; EXPRESSED IN PLACENTA, SIGNAL = 2.6; EST_HUMAN HIT: BF308750.1, EVALUE 1.00e-04; SWISSPROT HIT: Q01206, EVALUE 2.80e+00
GSAFLVIPALILLVAGFALRSQMWTITGEYCCSCAPPYRRISPLECKLACLRFFSITGRAVIAPLTWLAVTLLTGTY

SEQ ID NO: 42493 - protein, 32 aa, Homo sapiens
  MAP TO AP001208.1; EXPRESSED IN BRAIN, SIGNAL = 1.6; EXPRESSED IN PLACENTA, SIGNAL = 2.7; EXPRESSED IN ADULT LIVER, SIGNAL = 1.9; EXPRESSED IN FETAL LIVER, SIGNAL = 2.1; EXPRESSED IN HELA, SIGNAL = 2.5; EXPRESSED IN HEART, SIGNAL = 1.8; EST_HUMAN HIT: BF107868.1, EVALUE 5.80e+00
WTTDVHLTHRESIRAYSQGGCGVGLRGGKERE

SEQ ID NO: 42494 - protein, 61 aa, Homo sapiens
  MAP TO AC018739.2; EXPRESSED IN BRAIN, SIGNAL = 2.2; EXPRESSED IN HELA, SIGNAL = 2.6; EXPRESSED IN ADULT LIVER, SIGNAL = 2.2; EXPRESSED IN PLACENTA, SIGNAL = 1.8; EXPRESSED IN LUNG, SIGNAL = 2.2; EXPRESSED IN HEART, SIGNAL = 2.5; EXPRESSED IN FETAL LIVER, SIGNAL = 2.7; EXPRESSED IN BONE MARROW, SIGNAL = 1.8; EST_HUMAN HIT: AU136520.1, EVALUE 1.00e-24; SWISSPROT HIT: P50049, EVALUE 4.50e+00
LEEKMIAAYENSKWEPVKWENDMHCAVKIQDKNQWRRGQIIRMVTDTLVEVNYRVKSVIVK

SEQ ID NO: 42495 - protein, 43 aa, Homo sapiens
  MAP TO AL121975.3; EXPRESSED IN ADULT LIVER, SIGNAL = 3.7; EXPRESSED IN BONE MARROW, SIGNAL =   3; EXPRESSED IN HELA, SIGNAL = 4.7; EXPRESSED IN LUNG, SIGNAL = 4.2; EXPRESSED IN BRAIN, SIGNAL = 3.6; EXPRESSED IN PLACENTA, SIGNAL = 3.1; EXPRESSED IN FETAL LIVER, SIGNAL = 5.5; EXPRESSED IN HEART, SIGNAL = 4.5
MIGTFMLTNTYPKWGKKRNICACFPQRGRVTSLKITSIKITDT

SEQ ID NO: 42496 - protein, 89 aa, Homo sapiens
  MAP TO AL121985.13; EXPRESSED IN FETAL LIVER, SIGNAL = 2.6; EXPRESSED IN BRAIN, SIGNAL = 2.6; EXPRESSED IN PLACENTA, SIGNAL = 2.5; EXPRESSED IN ADULT LIVER, SIGNAL = 2.6; EXPRESSED IN BONE MARROW, SIGNAL = 2.8; EXPRESSED IN HELA, SIGNAL = 2.4; EXPRESSED IN HEART, SIGNAL =   2; EXPRESSED IN LUNG, SIGNAL = 3.2; EST_HUMAN HIT: AW027554.1, EVALUE 8.00e-31; SWISSPROT HIT: P10265, EVALUE 3.00e-16
LPLIVPTGVTGPLPQGSVGLVLGRASTSAKGFTIHTGLINSDSVDEIKLIVSAKFPISIASGESVAQLLLLPNIILNKGDKTCGPGIGS

SEQ ID NO: 42497 - protein, 35 aa, Homo sapiens
  MAP TO AC017016.3; EXPRESSED IN BRAIN, SIGNAL = 1.8; EXPRESSED IN PLACENTA, SIGNAL = 2.1; EXPRESSED IN LUNG, SIGNAL = 2.1; EXPRESSED IN HEART, SIGNAL =   2; EXPRESSED IN HELA, SIGNAL = 1.9; EXPRESSED IN FETAL LIVER, SIGNAL =   2; EXPRESSED IN BONE MARROW, SIGNAL = 2.1; EXPRESSED IN ADULT LIVER, SIGNAL = 2.1
FLFAEGENEEEKGLVNSVGQRKTKVAERGIERCWP

SEQ ID NO: 42498 - protein, 48 aa, Homo sapiens
  MAP TO AL133257.2; EXPRESSED IN PLACENTA, SIGNAL = 3.2; EXPRESSED IN ADULT LIVER, SIGNAL = 2.2; EXPRESSED IN BRAIN, SIGNAL = 3.2; EXPRESSED IN LUNG, SIGNAL =   3; EXPRESSED IN HEART, SIGNAL = 3.4; EXPRESSED IN HELA, SIGNAL =   3; EXPRESSED IN FETAL LIVER, SIGNAL = 3.8; EXPRESSED IN BONE MARROW, SIGNAL = 2.7; EST_HUMAN HIT: BE150340.1, EVALUE 7.00e-10; SWISSPROT HIT: P10272, EVALUE 1.00e-04
EAGVIHCKGHQKASDPITQDNAYPDKVAKKAAIKRAQIPSLRTMLMLI

SEQ ID NO: 42499 - protein, 26 aa, Homo sapiens
  MAP TO AL133257.2; EXPRESSED IN PLACENTA, SIGNAL = 3.2; EXPRESSED IN ADULT LIVER, SIGNAL = 2.2; EXPRESSED IN BRAIN, SIGNAL = 3.2; EXPRESSED IN LUNG, SIGNAL =   3; EXPRESSED IN HEART, SIGNAL = 3.4; EXPRESSED IN HELA, SIGNAL =   3; EXPRESSED IN FETAL LIVER, SIGNAL = 3.8; EXPRESSED IN BONE MARROW, SIGNAL = 2.7; EST_HUMAN HIT: F06604.1, EVALUE 1.00e-05
KLESFTAKAIKRHQIPSLRTTLILIR

SEQ ID NO: 42500 - protein, 62 aa, Homo sapiens
  MAP TO AC005323.1; EXPRESSED IN BRAIN, SIGNAL =   2; EXPRESSED IN BONE MARROW, SIGNAL = 2.8; EXPRESSED IN HELA, SIGNAL = 2.3; EXPRESSED IN HEART, SIGNAL = 2.1; EXPRESSED IN PLACENTA, SIGNAL = 1.9; EXPRESSED IN LUNG, SIGNAL = 3.5; EXPRESSED IN FETAL LIVER, SIGNAL =   2; EXPRESSED IN ADULT LIVER, SIGNAL = 2.5; EST_HUMAN HIT: AA777043.1, EVALUE 6.00e-21; SWISSPROT HIT: P13535, EVALUE 2.00e-25
MSSDSELAVFGEAAPFLRKSERERIEAQNRPFDAKTSVFVAEPKESFVKGTIQSREGGKVTV

SEQ ID NO: 42501 - protein, 66 aa, Homo sapiens; identical to SEQ ID NO: 36613
  MAP TO AC007955.4; EXPRESSED IN BRAIN, SIGNAL =   4; EXPRESSED IN PLACENTA, SIGNAL = 3.8; EXPRESSED IN FETAL LIVER, SIGNAL = 2.7; EXPRESSED IN HELA, SIGNAL = 2.2; EXPRESSED IN BONE MARROW, SIGNAL = 2.4; EXPRESSED IN ADULT LIVER, SIGNAL = 2.8; EXPRESSED IN HEART, SIGNAL = 2.6; EXPRESSED IN LUNG, SIGNAL = 3.1; SWISSPROT HIT: O60241, EVALUE 4.70e+00; EST_HUMAN HIT: AI345418.1, EVALUE 2.50e+00

SEQ ID NO: 42502 - protein, 70 aa, Homo sapiens
  MAP TO AC005212.1; EXPRESSED IN ADULT LIVER, SIGNAL = 1.4; EXPRESSED IN FETAL LIVER, SIGNAL =   2; EXPRESSED IN LUNG, SIGNAL = 6.6; EXPRESSED IN PLACENTA, SIGNAL = 1.6; EXPRESSED IN BRAIN, SIGNAL =   2; EXPRESSED IN HEART, SIGNAL = 2.2; EXPRESSED IN BONE MARROW, SIGNAL = 1.8; EXPRESSED IN HELA, SIGNAL = 2.3; SWISSPROT HIT: Q99758, EVALUE 6.00e-35; EST_HUMAN HIT: AA148691.1, EVALUE 4.00e-18
VLILDEPTSGMDAISRRAIWDLLQRQKSDRTIVLTTHFMDEADLLGDRIAIMAKGELQCCGSSLFLKQKY

SEQ ID NO: 42503 - protein, 20 aa, Homo sapiens
  MAP TO AC005212.1; EXPRESSED IN ADULT LIVER, SIGNAL = 1.4; EXPRESSED IN FETAL LIVER, SIGNAL =   2; EXPRESSED IN LUNG, SIGNAL = 6.6; EXPRESSED IN PLACENTA, SIGNAL = 1.6; EXPRESSED IN BRAIN, SIGNAL =   2; EXPRESSED IN HEART, SIGNAL = 2.2; EXPRESSED IN BONE MARROW, SIGNAL = 1.8; EXPRESSED IN HELA, SIGNAL = 2.3
LGHGRHLQEGHLGSSSAAEK

SEQ ID NO: 42504 - protein, 50 aa, Homo sapiens
  MAP TO AC009263.6; EXPRESSED IN FETAL LIVER, SIGNAL = 3.6; EXPRESSED IN BONE MARROW, SIGNAL = 2.3; EXPRESSED IN HELA, SIGNAL = 4.1; EXPRESSED IN HEART, SIGNAL = 3.7; EXPRESSED IN LUNG, SIGNAL = 3.4; EXPRESSED IN ADULT LIVER, SIGNAL = 3.3; EXPRESSED IN BRAIN, SIGNAL = 4.3; EXPRESSED IN PLACENTA, SIGNAL =   8; EST_HUMAN HIT: BF690764.1, EVALUE 6.60e+00
NPLKSLPISIFNEYSKNPSNRYRKSTCSQTVSLRSKQQSPGGLKLVASWF

SEQ ID NO: 42505 - protein, 43 aa, Homo sapiens
  MAP TO AL117692.1; EXPRESSED IN BRAIN, SIGNAL = 2.6; EXPRESSED IN PLACENTA, SIGNAL = 1.7; EXPRESSED IN FETAL LIVER, SIGNAL = 2.2; EXPRESSED IN HELA, SIGNAL = 2.3; EXPRESSED IN ADULT LIVER, SIGNAL = 1.8; EXPRESSED IN LUNG, SIGNAL = 2.8; EXPRESSED IN HEART, SIGNAL = 1.8
CLLEGWESRGACGHASAAWQSLPAAARGHAAGRSHDEWWRETS

SEQ ID NO: 42506 - protein, 44 aa, Homo sapiens
  MAP TO AC000085.5; EXPRESSED IN ADULT LIVER, SIGNAL = 1.6; EXPRESSED IN FETAL LIVER, SIGNAL = 2.2; EXPRESSED IN PLACENTA, SIGNAL = 2.4; EXPRESSED IN BRAIN, SIGNAL = 1.7; EXPRESSED IN HEART, SIGNAL = 1.8; EXPRESSED IN BONE MARROW, SIGNAL = 2.4; EXPRESSED IN HELA, SIGNAL = 2.2; EXPRESSED IN LUNG, SIGNAL = 2.1; SWISSPROT HIT: Q61666, EVALUE 2.00e-19
SGRQAARLFSVPHVVQQETTLAYLENQVAAALTLQSSHEYRHWL

SEQ ID NO: 42507 - protein, 23 aa, Homo sapiens
  MAP TO AC000085.5; EXPRESSED IN ADULT LIVER, SIGNAL = 1.6; EXPRESSED IN FETAL LIVER, SIGNAL = 2.2; EXPRESSED IN PLACENTA, SIGNAL = 2.4; EXPRESSED IN BRAIN, SIGNAL = 1.7; EXPRESSED IN HEART, SIGNAL = 1.8; EXPRESSED IN BONE MARROW, SIGNAL = 2.4; EXPRESSED IN HELA, SIGNAL = 2.2; EXPRESSED IN LUNG, SIGNAL = 2.1; EST_HUMAN HIT: N56005.1, EVALUE 1.60e+00
REGRLPGSSPCLMWCSKRPPWPT

SEQ ID NO: 42508 - protein, 20 aa, Homo sapiens
  MAP TO AC009989.6; EXPRESSED IN PLACENTA, SIGNAL = 1.6; EXPRESSED IN FETAL LIVER, SIGNAL = 2.5; EXPRESSED IN ADULT LIVER, SIGNAL = 1.9; EXPRESSED IN HEART, SIGNAL = 2.6; EXPRESSED IN BRAIN, SIGNAL = 2.3; EXPRESSED IN LUNG, SIGNAL = 2.1; EXPRESSED IN HELA, SIGNAL = 2.9; EXPRESSED IN BONE MARROW, SIGNAL = 1.5; EST_HUMAN HIT: AA205902.1, EVALUE 6.00e-03
TSTGPWSVRNWAAQQEVNGR

SEQ ID NO: 42509 - protein, 31 aa, Homo sapiens
  MAP TO AC004025.1; EXPRESSED IN ADULT LIVER, SIGNAL = 2.3; EXPRESSED IN BRAIN, SIGNAL = 2.4; EXPRESSED IN BONE MARROW, SIGNAL = 2.3; EXPRESSED IN FETAL LIVER, SIGNAL = 2.7; EXPRESSED IN HELA, SIGNAL = 2.8; EXPRESSED IN HEART, SIGNAL = 2.3; EXPRESSED IN LUNG, SIGNAL =   2; EXPRESSED IN PLACENTA, SIGNAL = 5.4
DIEVDNDANDGDRDAGYCGYNYVEATAFAIQ

SEQ ID NO: 42510 - protein, 142 aa, Homo sapiens
  MAP TO AL157789.1; EXPRESSED IN BRAIN, SIGNAL = 4.8; EXPRESSED IN ADULT LIVER, SIGNAL = 4.6; EXPRESSED IN HELA, SIGNAL = 4.3; EXPRESSED IN HEART, SIGNAL = 2.6; EXPRESSED IN PLACENTA, SIGNAL = 3.7; EXPRESSED IN LUNG, SIGNAL = 8.9; EXPRESSED IN FETAL LIVER, SIGNAL = 3.4; EXPRESSED IN BONE MARROW, SIGNAL = 4.2; EST_HUMAN HIT: H40432.1, EVALUE 1.50e-01; SWISSPROT HIT: Q92537, EVALUE 1.00e-78
RDQGVSGDQVSIMVDGVQVALPSYEEAVYGSSGHCVPPADPRVQIVLSEGSGPSGRSVPREQQLPDQGACSSAGGEDEAPGQSGLCEAWGSRASETVMVHQATTSSWVAGSGNRQLAHKETADSENSDIQSLLSLTSEEYTD

SEQ ID NO: 42511 - protein, 96 aa, Homo sapiens
  MAP TO AL157789.1; EXPRESSED IN BRAIN, SIGNAL = 4.8; EXPRESSED IN ADULT LIVER, SIGNAL = 4.6; EXPRESSED IN HELA, SIGNAL = 4.3; EXPRESSED IN HEART, SIGNAL = 2.6; EXPRESSED IN PLACENTA, SIGNAL = 3.7; EXPRESSED IN LUNG, SIGNAL = 8.9; EXPRESSED IN FETAL LIVER, SIGNAL = 3.4; EXPRESSED IN BONE MARROW, SIGNAL = 4.2; EST_HUMAN HIT: BE727269.1, EVALUE 1.60e+00; SWISSPROT HIT: gi139573, EVALUE 8.00e-01
VTRGYLGTRSPSWWMESRLHYHHTRRLYMAVLVTVCHLLTPEYRLCCQKGLGPVGGACQGSNSCRTKGPAPLQVEKMRPQASLDYVKPGALGPQRL

SEQ ID NO: 42512 - protein, 33 aa, Homo sapiens
  MAP TO AL136092.7; EXPRESSED IN BONE MARROW, SIGNAL = 4.9; EXPRESSED IN FETAL LIVER, SIGNAL =  13; EXPRESSED IN LUNG, SIGNAL = 3.8; EXPRESSED IN PLACENTA, SIGNAL = 7.8; EXPRESSED IN BRAIN, SIGNAL = 6.6; EXPRESSED IN HELA, SIGNAL =  10; EXPRESSED IN ADULT LIVER, SIGNAL = 6.6; EXPRESSED IN HEART, SIGNAL =  11; EST_HUMAN HIT: BE173204.1, EVALUE 1.00e-06
CLTGLTVPYGWETSESWWEVKGTSYMAAARENE

SEQ ID NO: 42513 - protein, 27 aa, Homo sapiens
  MAP TO AL133233.2; EXPRESSED IN BONE MARROW, SIGNAL =   2; EXPRESSED IN HEART, SIGNAL = 2.6; EXPRESSED IN BRAIN, SIGNAL =   2; EXPRESSED IN PLACENTA, SIGNAL = 2.6; EXPRESSED IN FETAL LIVER, SIGNAL = 2.4; EXPRESSED IN ADULT LIVER, SIGNAL =   2; EXPRESSED IN HELA, SIGNAL = 2.8
TTMIPLNWMLRLPPGHFGLLLPLSQQA

SEQ ID NO: 42514 - protein, 17 aa, Homo sapiens
  MAP TO AC024019.2; EXPRESSED IN ADULT LIVER, SIGNAL = 2.4; EXPRESSED IN HEART, SIGNAL =   2; EXPRESSED IN BRAIN, SIGNAL = 2.6; EXPRESSED IN PLACENTA, SIGNAL = 1.9; EXPRESSED IN BONE MARROW, SIGNAL = 2.2; EXPRESSED IN FETAL LIVER, SIGNAL =   2; EXPRESSED IN HELA, SIGNAL = 1.9
ALLKCTVSLGRMIRMLV

SEQ ID NO: 42515 - protein, 82 aa, Homo sapiens
  MAP TO AC002059.3; EXPRESSED IN PLACENTA, SIGNAL = 4.4; EXPRESSED IN BONE MARROW, SIGNAL =   5; EXPRESSED IN ADULT LIVER, SIGNAL = 6.4; EXPRESSED IN LUNG, SIGNAL = 5.1; EXPRESSED IN BRAIN, SIGNAL = 5.9; EXPRESSED IN HEART, SIGNAL = 5.5; EXPRESSED IN HELA, SIGNAL = 7.5; EXPRESSED IN FETAL LIVER, SIGNAL = 7.4; SWISSPROT HIT: P52303, EVALUE 7.00e-44; EST_HUMAN HIT: AU140744.1, EVALUE 8.00e-41
DCEDPNPLIRALAVRTMGCIRVDKITEYLCEPLRKCLKDEDPYVRKTAAVCVAKLHDINAQLVEDQGFLDTLKDLISDSNPM

SEQ ID NO: 42516 - protein, 17 aa, Homo sapiens
  MAP TO AC011501.2; EXPRESSED IN BRAIN, SIGNAL =   3; EXPRESSED IN PLACENTA, SIGNAL = 1.9; EXPRESSED IN BONE MARROW, SIGNAL =   2; EXPRESSED IN FETAL LIVER, SIGNAL = 2.5; EXPRESSED IN HELA, SIGNAL = 2.6; EXPRESSED IN HEART, SIGNAL = 2.3; EXPRESSED IN ADULT LIVER, SIGNAL = 2.8; EXPRESSED IN LUNG, SIGNAL = 2.3
EYLSSEMVEDKCTMSEL

SEQ ID NO: 42517 - protein, 35 aa, Homo sapiens
  MAP TO AL158219.1; EXPRESSED IN BRAIN, SIGNAL = 2.3; EXPRESSED IN PLACENTA, SIGNAL =  27; EXPRESSED IN BONE MARROW, SIGNAL =   2; EXPRESSED IN ADULT LIVER, SIGNAL = 5.5; EXPRESSED IN FETAL LIVER, SIGNAL =  13; EXPRESSED IN HELA, SIGNAL =  18; EXPRESSED IN HEART, SIGNAL =   2; EXPRESSED IN LUNG, SIGNAL =  14; SWISSPROT HIT: P05783, EVALUE 3.00e-13; EST_HUMAN HIT: T87390.1, EVALUE 3.00e-12
VIDDTNVTRLQLETEIEALKEELLFMKKNHEEEVK

SEQ ID NO: 42518 - protein, 73 aa, Homo sapiens
  MAP TO AL158219.1; EXPRESSED IN BRAIN, SIGNAL = 2.3; EXPRESSED IN PLACENTA, SIGNAL =  27; EXPRESSED IN BONE MARROW, SIGNAL =   2; EXPRESSED IN ADULT LIVER, SIGNAL = 5.5; EXPRESSED IN FETAL LIVER, SIGNAL =  13; EXPRESSED IN HELA, SIGNAL =  18; EXPRESSED IN HEART, SIGNAL =   2; EXPRESSED IN LUNG, SIGNAL =  14; SWISSPROT HIT: P03894, EVALUE 4.70e+00; EST_HUMAN HIT: AA316488.1, EVALUE 1.00e-23
SSQILWTTPTSFCRSTMPVLLLMTLESSMRQSWPCTSLWRVTSINSAGSLMTLMSLGCSWRQRLRLSRRSFFS

SEQ ID NO: 42519 - protein, 28 aa, Homo sapiens
  MAP TO AP001341.1; EXPRESSED IN PLACENTA, SIGNAL = 1.5; EXPRESSED IN BRAIN, SIGNAL = 1.6; EXPRESSED IN LUNG, SIGNAL = 3.6; EXPRESSED IN HEART, SIGNAL = 1.8; EXPRESSED IN HELA, SIGNAL = 1.9; EXPRESSED IN FETAL LIVER, SIGNAL = 1.7; EXPRESSED IN BONE MARROW, SIGNAL = 2.7; EXPRESSED IN ADULT LIVER, SIGNAL = 2.8
LLGHAKGGYPILSRDKAHLGNCIALENN

SEQ ID NO: 42520 - protein, 72 aa, Homo sapiens
  MAP TO AC021107.2; EXPRESSED IN BRAIN, SIGNAL = 1.8; EXPRESSED IN PLACENTA, SIGNAL = 2.5; EXPRESSED IN FETAL LIVER, SIGNAL = 1.9; EXPRESSED IN BONE MARROW, SIGNAL = 1.9; EXPRESSED IN HELA, SIGNAL = 2.6; EXPRESSED IN HEART, SIGNAL = 2.3; EXPRESSED IN LUNG, SIGNAL = 1.9; EST_HUMAN HIT: BE064410.1, EVALUE 3.00e-15
CFRMIKSMVTPENLMRRSQLPHFFSFKVSALFRGNAAWNNMMMNKAFCESTDGSLRGRIACRIGKAMRNVKI

SEQ ID NO: 42521 - protein, 62 aa, Homo sapiens
  MAP TO AC021881.2; EXPRESSED IN HEART, SIGNAL =   2; EXPRESSED IN BRAIN, SIGNAL = 1.4; SWISSPROT HIT: Q13206, EVALUE 7.00e-18; EST_HUMAN HIT: BE782472.1, EVALUE 8.00e-17
MGKTANSPGSGARPDPVRSFNRWKKKHSHRQNKKKQLRKQLKKPEWQVERESISRLMQNYEK

SEQ ID NO: 42522 - protein, 37 aa, Homo sapiens
  MAP TO AC021881.2; EXPRESSED IN HEART, SIGNAL =   2; EXPRESSED IN BRAIN, SIGNAL = 1.4; EST_HUMAN HIT: AU143115.1, EVALUE 3.00e-10
RLKLRTGSGRAPEPGELAVLPIAAAAATARINPRHET

SEQ ID NO: 42523 - protein, 64 aa, Homo sapiens
  MAP TO AP001328.1; EXPRESSED IN BONE MARROW, SIGNAL = 6.3; EXPRESSED IN HEART, SIGNAL = 4.7; EXPRESSED IN LUNG, SIGNAL =  12; EXPRESSED IN BRAIN, SIGNAL = 5.9; EXPRESSED IN PLACENTA, SIGNAL =   6; EXPRESSED IN ADULT LIVER, SIGNAL =   6; EXPRESSED IN FETAL LIVER, SIGNAL = 4.2; EXPRESSED IN HELA, SIGNAL = 4.8; SWISSPROT HIT: P10407, EVALUE 2.00e+00; EST_HUMAN HIT: AV715827.1, EVALUE 1.00e+01
NVIFEEWENVSQIQKVKHTPVGQPQQYHLYPLEFVAPESIPDIIAVTHLTILQQEAGTPQKWEQ

SEQ ID NO: 42524 - protein, 71 aa, Homo sapiens
  MAP TO AC012558.6; EXPRESSED IN FETAL LIVER, SIGNAL = 5.8; EXPRESSED IN HELA, SIGNAL = 6.3; EXPRESSED IN HEART, SIGNAL = 4.5; EXPRESSED IN LUNG, SIGNAL = 2.4; EXPRESSED IN PLACENTA, SIGNAL = 2.8; EXPRESSED IN ADULT LIVER, SIGNAL = 2.6; EXPRESSED IN BONE MARROW, SIGNAL = 3.3; EXPRESSED IN BRAIN, SIGNAL = 3.1; EST_HUMAN HIT: AI479856.1, EVALUE 3.80e-01; SWISSPROT HIT: Q60675, EVALUE 5.90e-01
GRYAVYFLLPKICKLCFLLLRCPEKPMHISNHSPSGPCEGGSEASCILCPKGPPLQTEALKTVEPNETIIL

SEQ ID NO: 42525 - protein, 19 aa, Homo sapiens
  MAP TO AC012558.6; EXPRESSED IN FETAL LIVER, SIGNAL = 5.8; EXPRESSED IN HELA, SIGNAL = 6.3; EXPRESSED IN HEART, SIGNAL = 4.5; EXPRESSED IN LUNG, SIGNAL = 2.4; EXPRESSED IN PLACENTA, SIGNAL = 2.8; EXPRESSED IN ADULT LIVER, SIGNAL = 2.6; EXPRESSED IN BONE MARROW, SIGNAL = 3.3; EXPRESSED IN BRAIN, SIGNAL = 3.1
EGTLFTSCSQKYASFVSCC

SEQ ID NO: 42526 - protein, 63 aa, Homo sapiens
  MAP TO AC004460.1; EXPRESSED IN PLACENTA, SIGNAL = 1.9; EXPRESSED IN BRAIN, SIGNAL =   2; EXPRESSED IN HEART, SIGNAL = 2.7; EXPRESSED IN HELA, SIGNAL = 4.1; EXPRESSED IN BONE MARROW, SIGNAL = 2.6; EXPRESSED IN FETAL LIVER, SIGNAL = 2.1; EXPRESSED IN LUNG, SIGNAL = 4.5; EXPRESSED IN ADULT LIVER, SIGNAL = 1.8; SWISSPROT HIT: Q08379, EVALUE 2.00e-03; EST_HUMAN HIT: BF087405.1, EVALUE 2.00e-07
LPPEPPAVPSEVEPQHLRKELDRVAGELQVQVKNNQRISLLNWGQDERIREQEERLRKQEERF

SEQ ID NO: 42527 - protein, 32 aa, Homo sapiens
  MAP TO AC021036.3; EXPRESSED IN BRAIN, SIGNAL = 3.2; EXPRESSED IN PLACENTA, SIGNAL = 2.3; EXPRESSED IN FETAL LIVER, SIGNAL = 3.1; EXPRESSED IN HELA, SIGNAL = 2.6; EXPRESSED IN BONE MARROW, SIGNAL = 2.1; EXPRESSED IN HEART, SIGNAL = 2.7; EXPRESSED IN LUNG, SIGNAL = 3.5; EXPRESSED IN ADULT LIVER, SIGNAL = 5.1
KVGSNLPWLLMRPTLSPPSRLKIQAASSLSNI

SEQ ID NO: 42528 - protein, 149 aa, Homo sapiens
  MAP TO AC016025.11; EXPRESSED IN BRAIN, SIGNAL = 3.3; EXPRESSED IN PLACENTA, SIGNAL = 2.4; EXPRESSED IN FETAL LIVER, SIGNAL = 3.9; EXPRESSED IN HELA, SIGNAL = 3.4; EXPRESSED IN BONE MARROW, SIGNAL = 3.2; EXPRESSED IN HEART, SIGNAL = 3.1; EXPRESSED IN LUNG, SIGNAL = 2.1; EXPRESSED IN ADULT LIVER, SIGNAL = 3.1; SWISSPROT HIT: P29951, EVALUE 1.10e+00; EST_HUMAN HIT: R35167.1, EVALUE 3.90e+00
KPWRMWCAHSCHSIQGTCAAALSIVGHRECKGVPEASLAPRPRKSYWFRTLKLQDQPRGCSGHSAFSNIHKSSSSLWMGELPSLYSLQVQRLNCELGMKKRSILLLPHSSVAEGSRVPLLTGRLSVKWTNWEEAARSRASCCHLILLKD

SEQ ID NO: 42529 - protein, 76 aa, Homo sapiens
  MAP TO AC002401.1; EXPRESSED IN BRAIN, SIGNAL = 3.3; EXPRESSED IN PLACENTA, SIGNAL = 1.5; EXPRESSED IN BONE MARROW, SIGNAL = 2.8; EXPRESSED IN FETAL LIVER, SIGNAL = 1.9; EXPRESSED IN LUNG, SIGNAL = 4.3; EXPRESSED IN ADULT LIVER, SIGNAL = 1.6; EXPRESSED IN HEART, SIGNAL = 2.5; EXPRESSED IN HELA, SIGNAL = 1.8; SWISSPROT HIT: Q25457, EVALUE 2.00e-03; EST_HUMAN HIT: BE895415.1, EVALUE 4.00e-38
LQSLEQEKGRWRVEKAQLEQSVEENKERMEKLEGYWGEAQSLCQAVDEHLRETQAQYQALERKYSKAKRLIKDYQQ

SEQ ID NO: 42530 - protein, 31 aa, Homo sapiens
  MAP TO AC002401.1; EXPRESSED IN BRAIN, SIGNAL = 3.3; EXPRESSED IN PLACENTA, SIGNAL = 1.5; EXPRESSED IN BONE MARROW, SIGNAL = 2.8; EXPRESSED IN FETAL LIVER, SIGNAL = 1.9; EXPRESSED IN LUNG, SIGNAL = 4.3; EXPRESSED IN ADULT LIVER, SIGNAL = 1.6; EXPRESSED IN HEART, SIGNAL = 2.5; EXPRESSED IN HELA, SIGNAL = 1.8
GEGALAGGEGAVGAECGGEQGAHGETGRLLG

SEQ ID NO: 42531 - protein, 43 aa, Homo sapiens
  MAP TO AL158841.1; EXPRESSED IN BRAIN, SIGNAL = 3.2; EXPRESSED IN PLACENTA, SIGNAL = 1.5; EXPRESSED IN BONE MARROW, SIGNAL = 1.8; EXPRESSED IN ADULT LIVER, SIGNAL = 3.7; EXPRESSED IN HELA, SIGNAL = 1.7; EXPRESSED IN HEART, SIGNAL = 3.2; EXPRESSED IN LUNG, SIGNAL = 1.7; EST_HUMAN HIT: AA009953.1, EVALUE 7.00e-04; SWISSPROT HIT: P98161, EVALUE 8.20e+00
KHKYVKRMRKIVSFRQLSTSQEESPHSNPNLLGPWSWTSTLQN

SEQ ID NO: 42532 - protein, 66 aa, Homo sapiens
  MAP TO AC022374.1; EXPRESSED IN BRAIN, SIGNAL =  18; EXPRESSED IN HELA, SIGNAL =  52; EXPRESSED IN HEART, SIGNAL = 1e+02; EXPRESSED IN ADULT LIVER, SIGNAL =  16; EXPRESSED IN FETAL LIVER, SIGNAL =  34; EXPRESSED IN BONE MARROW, SIGNAL =  68; EXPRESSED IN LUNG, SIGNAL =  72; EXPRESSED IN PLACENTA, SIGNAL =  29; SWISSPROT HIT: Q98972, EVALUE 5.00e-20; EST_HUMAN HIT: BE408209.1, EVALUE 4.00e-24
MQKAITALAPSTMKIKIIVPPERKYSVWICSSILASLSIFQQMWINKQEYNKLAPPSSTANASKWT

SEQ ID NO: 42533 - protein, 157 aa, Homo sapiens
  MAP TO AC002400.1; EXPRESSED IN PLACENTA, SIGNAL = 2.1; EXPRESSED IN FETAL LIVER, SIGNAL = 2.5; EXPRESSED IN ADULT LIVER, SIGNAL = 2.5; EXPRESSED IN HELA, SIGNAL = 2.4; EXPRESSED IN HEART, SIGNAL = 3.3; EXPRESSED IN BRAIN, SIGNAL = 2.2; EXPRESSED IN LUNG, SIGNAL = 2.2; EXPRESSED IN BONE MARROW, SIGNAL = 2.4; SWISSPROT HIT: O51345, EVALUE 9.00e-37; EST_HUMAN HIT: BE794758.1, EVALUE 3.00e-75
YDNRCRNMSQEQVAQKLAKDPKPAIRFRLEQVVPAFQDLVYGWNRHEVASVEGDPVIMKSDGFPTYHLACVVDDHHMGISHVLRGSEWLVSTAKHLLLYQALGWQPPHFAHLPLLLNRDGSKLSKRQGDVFLEHFAADGFLPDSLLDIITNCGSGFA

SEQ ID NO: 42534 - protein, 21 aa, Homo sapiens
  MAP TO AC024006.2; EXPRESSED IN BRAIN, SIGNAL =  45; EXPRESSED IN PLACENTA, SIGNAL =  65; EXPRESSED IN ADULT LIVER, SIGNAL =  38; EXPRESSED IN BONE MARROW, SIGNAL = 1.6e+02; EXPRESSED IN FETAL LIVER, SIGNAL = 1.2e+02; EXPRESSED IN HELA, SIGNAL =  96; EXPRESSED IN HEART, SIGNAL =  38; EXPRESSED IN LUNG, SIGNAL = 2.8e+02; EST_HUMAN HIT: BF690884.1, EVALUE 6.00e-03
KLVVLVLFLLAEWRLVFSNLV

SEQ ID NO: 42535 - protein, 132 aa, Homo sapiens
  MAP TO AC005301.22; EXPRESSED IN HEART, SIGNAL = 2.9; EXPRESSED IN LUNG, SIGNAL =  19; EXPRESSED IN PLACENTA, SIGNAL = 1.6; SWISSPROT HIT: P04275, EVALUE 2.00e-38; EST_HUMAN HIT: AU140638.1, EVALUE 1.00e-15
VQGLKKKKVIVIPVGIGPHANLKQIRLIEKQAPENKAFVLSGVDELEQQREEIVSYLCDLAPDAPPPTLPPHMAQVTVGPGLLGLSTLGPKRNSMVLDVAFVLEGSDKIGEANFNRSKEFMEEVIQRMDVGQ

SEQ ID NO: 42536 - protein, 26 aa, Homo sapiens
  MAP TO AC021012.2; EXPRESSED IN BRAIN, SIGNAL = 3.5; EXPRESSED IN PLACENTA, SIGNAL = 2.9; EXPRESSED IN HELA, SIGNAL = 3.9; EXPRESSED IN ADULT LIVER, SIGNAL =   4; EXPRESSED IN BONE MARROW, SIGNAL = 3.7; EXPRESSED IN FETAL LIVER, SIGNAL = 3.9; EXPRESSED IN LUNG, SIGNAL =   3; EXPRESSED IN HEART, SIGNAL = 3.7; SWISSPROT HIT: P50264, EVALUE 6.60e+00
DQDLDELQLEMEDSKPHPSVQCSPTP

SEQ ID NO: 42537 - protein, 27 aa, Homo sapiens
  MAP TO AC021012.2; EXPRESSED IN BRAIN, SIGNAL = 3.5; EXPRESSED IN PLACENTA, SIGNAL = 2.9; EXPRESSED IN HELA, SIGNAL = 3.9; EXPRESSED IN ADULT LIVER, SIGNAL =   4; EXPRESSED IN BONE MARROW, SIGNAL = 3.7; EXPRESSED IN FETAL LIVER, SIGNAL = 3.9; EXPRESSED IN LUNG, SIGNAL =   3; EXPRESSED IN HEART, SIGNAL = 3.7; EST_HUMAN HIT: AI479960.1, EVALUE 6.10e+00
MTRTWMSSSWRWRTQSHTPVSSVALLQ

SEQ ID NO: 42538 - protein, 45 aa, Homo sapiens
  MAP TO AP001331.1; EXPRESSED IN BRAIN, SIGNAL = 7.3; EXPRESSED IN PLACENTA, SIGNAL = 7.8; EXPRESSED IN BONE MARROW, SIGNAL =  12; EXPRESSED IN FETAL LIVER, SIGNAL = 7.7; EXPRESSED IN LUNG, SIGNAL =  24; EXPRESSED IN ADULT LIVER, SIGNAL =  11; EXPRESSED IN HELA, SIGNAL =  10; EXPRESSED IN HEART, SIGNAL = 5.8; EST_HUMAN HIT: AI718630.1, EVALUE 3.00e-18; SWISSPROT HIT: Q64252, EVALUE 2.00e-19
GHVVMGNNAVSPYQQVIEKTKSLSFRSQMLAMNIEKKLNQNSRSE

SEQ ID NO: 42539 - protein, 32 aa, Homo sapiens
  MAP TO AL157996.1; EXPRESSED IN ADULT LIVER, SIGNAL =   4; EXPRESSED IN HEART, SIGNAL = 2.8; EXPRESSED IN BRAIN, SIGNAL = 4.6; EXPRESSED IN PLACENTA, SIGNAL = 4.7; EXPRESSED IN BONE MARROW, SIGNAL =   3; EXPRESSED IN FETAL LIVER, SIGNAL = 3.3; EXPRESSED IN HELA, SIGNAL = 3.1; EST_HUMAN HIT: BF340389.1, EVALUE 1.50e+00; SWISSPROT HIT: Q43135, EVALUE 3.80e+00
LTRTPWISAPKCSSTACCGRGLSAGRRPSGPG

SEQ ID NO: 42540 - protein, 74 aa, Homo sapiens
  MAP TO AC020558.2; EXPRESSED IN ADULT LIVER, SIGNAL = 1.9; EXPRESSED IN BONE MARROW, SIGNAL = 1.5; EXPRESSED IN FETAL LIVER, SIGNAL =   2; EXPRESSED IN HEART, SIGNAL =   2; EXPRESSED IN BRAIN, SIGNAL = 1.8; EXPRESSED IN PLACENTA, SIGNAL = 1.8; EXPRESSED IN HELA, SIGNAL = 1.9; SWISSPROT HIT: Q92269, EVALUE 4.30e+00; EST_HUMAN HIT: BE906137.1, EVALUE 4.00e-01
LPSPRAWPPRISYLNQLLKPSVVPRPAAPPGKHVRMQTLRPWPGPLGHILHLLPIPRTVEKPRRVLQSPEGLAC

SEQ ID NO: 42541 - protein, 72 aa, Homo sapiens
  MAP TO AC000134.14; EXPRESSED IN HEART, SIGNAL = 2.1; EXPRESSED IN BRAIN, SIGNAL = 1.4; EXPRESSED IN BONE MARROW, SIGNAL = 2.2; EXPRESSED IN FETAL LIVER, SIGNAL = 1.6; EST_HUMAN HIT: F00726.1, EVALUE 1.00e-31; SWISSPROT HIT: P00489, EVALUE 2.00e-38
KRKQISVRGLAGVENVTELKKNFNRHLHFTLVKDRNVATPRDYYFALAHTVRDHLVGRWIRTQQHYYEKDPK

SEQ ID NO: 42542 - protein, 111 aa, Homo sapiens
  MAP TO AL133223.1; EXPRESSED IN BRAIN, SIGNAL =  14; EXPRESSED IN FETAL LIVER, SIGNAL =  19; EXPRESSED IN HELA, SIGNAL = 9.2; EXPRESSED IN BONE MARROW, SIGNAL =  13; EXPRESSED IN HEART, SIGNAL = 6.3; EXPRESSED IN LUNG, SIGNAL =  50; EXPRESSED IN PLACENTA, SIGNAL = 7.3; EXPRESSED IN ADULT LIVER, SIGNAL = 2.7; SWISSPROT HIT: O02705, EVALUE 6.00e-59; EST_HUMAN HIT: BE799410.1, EVALUE 5.00e-58
VVVSNRLVTSPCCIVTSTYGWTANMERIMKAQALRDNSTMGYMAAKKHLEINPDHSIIETLRQKAEADKNDKSVKDLVILLYETALLSSGFSLEDPQTHANRIYRMIKLGL

SEQ ID NO: 42543 - protein, 54 aa, Homo sapiens
  MAP TO AL035705.22; EXPRESSED IN ADULT LIVER, SIGNAL = 1.5; EXPRESSED IN HEART, SIGNAL = 1.9; EXPRESSED IN HELA, SIGNAL = 1.7; SWISSPROT HIT: Q09137, EVALUE 3.00e-27; EST_HUMAN HIT: AA826292.1, EVALUE 3.00e-26
LKPHPERMPPLIADSPKARCPLDALNTTKPKSLAVKKAKWHLGIRSQSKPYDIM

SEQ ID NO: 42544 - protein, 74 aa, Homo sapiens; identical to SEQ ID NO: 35748
  MAP TO AL035705.22; EXPRESSED IN ADULT LIVER, SIGNAL = 1.5; EXPRESSED IN HEART, SIGNAL = 1.9; EXPRESSED IN HELA, SIGNAL = 1.7; SWISSPROT HIT: Q09137, EVALUE 8.00e-40; EST_HUMAN HIT: BE677760.1, EVALUE 1.00e-29

SEQ ID NO: 42545 - protein, 29 aa, Homo sapiens
  MAP TO AL035705.22; EXPRESSED IN ADULT LIVER, SIGNAL = 1.5; EXPRESSED IN HEART, SIGNAL = 1.9; EXPRESSED IN HELA, SIGNAL = 1.7
SMNGLNKICPVTYFLKTLPMMLTSLMMRL

SEQ ID NO: 42546 - protein, 101 aa, Homo sapiens
  MAP TO AF223391.1; EXPRESSED IN PLACENTA, SIGNAL = 2.9; EXPRESSED IN FETAL LIVER, SIGNAL = 3.1; EXPRESSED IN HELA, SIGNAL =   3; EXPRESSED IN ADULT LIVER, SIGNAL = 2.8; EXPRESSED IN HEART, SIGNAL = 2.3; EXPRESSED IN LUNG, SIGNAL = 2.5; EXPRESSED IN BRAIN, SIGNAL = 2.7; EXPRESSED IN BONE MARROW, SIGNAL = 2.2; SWISSPROT HIT: Q15878, EVALUE 9.00e-34; EST_HUMAN HIT: BE970529.1, EVALUE 8.00e-02
MNPLNPLNPLSSLNPLNAHPSLYRRPRAIEGLALGLALEKFEEERISRGGSLKGDGGDRSSALDNQRTPLSLGQREPPWLARPCHGNCDPTQQEAGGGEAV

SEQ ID NO: 42547 - protein, 18 aa, Homo sapiens
  MAP TO AF223391.1; EXPRESSED IN PLACENTA, SIGNAL = 2.9; EXPRESSED IN FETAL LIVER, SIGNAL = 3.1; EXPRESSED IN HELA, SIGNAL =   3; EXPRESSED IN ADULT LIVER, SIGNAL = 2.8; EXPRESSED IN HEART, SIGNAL = 2.3; EXPRESSED IN LUNG, SIGNAL = 2.5; EXPRESSED IN BRAIN, SIGNAL = 2.7; EXPRESSED IN BONE MARROW, SIGNAL = 2.2
GSGGAGTTCPCGSSVPAS

SEQ ID NO: 42548 - protein, 48 aa, Homo sapiens
  MAP TO AL133371.2; EXPRESSED IN BONE MARROW, SIGNAL =   4; EXPRESSED IN HEART, SIGNAL = 5.7; EXPRESSED IN LUNG, SIGNAL =  68; EXPRESSED IN BRAIN, SIGNAL = 5.6; EXPRESSED IN PLACENTA, SIGNAL =  11; SWISSPROT HIT: Q62656, EVALUE 2.10e+00; EST_HUMAN HIT: BF106121.1, EVALUE 1.00e-16
DLFLETDILDIYQGLVHKGVHWFAPPLCHIPAPHHLVTVGGAAAGGTV

SEQ ID NO: 42549 - protein, 140 aa, Homo sapiens
  MAP TO AL133371.2; EXPRESSED IN BONE MARROW, SIGNAL =   4; EXPRESSED IN HEART, SIGNAL = 5.7; EXPRESSED IN LUNG, SIGNAL =  68; EXPRESSED IN BRAIN, SIGNAL = 5.6; EXPRESSED IN PLACENTA, SIGNAL =  11; EST_HUMAN HIT: AU134901.1, EVALUE 3.00e-64; SWISSPROT HIT: P07998, EVALUE 2.00e-59
IRLFWESEATMALEKSLVRLLLLVLILLVLGWVQPSLGKESRAKKFQRQHMDSDSSPSSSSTYCNQMMRRRNMTQGRCKPVNTFVHEPLVDVQNVCFQEKVTCKNGQGNCYKSNSSMHITDCRLTNGSRYPNCAYRTSPK

SEQ ID NO: 42550 - protein, 32 aa, Homo sapiens
  MAP TO AL049836.2; EXPRESSED IN HELA, SIGNAL = 3.6; EXPRESSED IN ADULT LIVER, SIGNAL = 3.1; EXPRESSED IN BRAIN, SIGNAL = 2.6; EXPRESSED IN PLACENTA, SIGNAL = 2.5; EXPRESSED IN LUNG, SIGNAL = 3.2; EXPRESSED IN HEART, SIGNAL = 2.7; EXPRESSED IN FETAL LIVER, SIGNAL = 3.9; EXPRESSED IN BONE MARROW, SIGNAL = 4.1; EST_HUMAN HIT: AA366556.1, EVALUE 1.70e-01
CEGSSTPSRRGRSRRSYGRWTDGQHVNSPLHA

SEQ ID NO: 42551 - protein, 33 aa, Homo sapiens
  MAP TO AL049836.2; EXPRESSED IN HELA, SIGNAL = 3.6; EXPRESSED IN ADULT LIVER, SIGNAL = 3.1; EXPRESSED IN BRAIN, SIGNAL = 2.6; EXPRESSED IN PLACENTA, SIGNAL = 2.5; EXPRESSED IN LUNG, SIGNAL = 3.2; EXPRESSED IN HEART, SIGNAL = 2.7; EXPRESSED IN FETAL LIVER, SIGNAL = 3.9; EXPRESSED IN BONE MARROW, SIGNAL = 4.1; EST_HUMAN HIT: AA366556.1, EVALUE 3.00e-14
LHAGDYSHADRLSISRKNVGSFHVCWAWRIPHS

SEQ ID NO: 42552 - protein, 24 aa, Homo sapiens
  MAP TO AC022035.2; EXPRESSED IN PLACENTA, SIGNAL = 2.4; EXPRESSED IN FETAL LIVER, SIGNAL = 5.8; EXPRESSED IN HELA, SIGNAL =   6; EXPRESSED IN BRAIN, SIGNAL = 3.3; EXPRESSED IN LUNG, SIGNAL =   2; EXPRESSED IN HEART, SIGNAL = 5.3; EXPRESSED IN BONE MARROW, SIGNAL = 2.6; EXPRESSED IN ADULT LIVER, SIGNAL = 2.8; EST_HUMAN HIT: AW895201.1, EVALUE 1.00e-04
DTENEIQAEVVSDGEEELVGNWNK

SEQ ID NO: 42553 - protein, 47 aa, Homo sapiens
  MAP TO AL049832.2; EXPRESSED IN BRAIN, SIGNAL = 2.8; EXPRESSED IN PLACENTA, SIGNAL = 2.4; EXPRESSED IN FETAL LIVER, SIGNAL = 4.5; EXPRESSED IN HELA, SIGNAL = 4.6; EXPRESSED IN BONE MARROW, SIGNAL = 2.3; EXPRESSED IN HEART, SIGNAL = 3.9; EXPRESSED IN ADULT LIVER, SIGNAL = 2.9; SWISSPROT HIT: P79089, EVALUE 4.70e+00; EST_HUMAN HIT: AI263886.1, EVALUE 2.00e-05
IILNGERLKVFPKDQEKGRKDHSHHFFSIFHWRAYLVQLGKKEVKGN

SEQ ID NO: 42554 - protein, 85 aa, Homo sapiens
  MAP TO AL135744.2; EXPRESSED IN ADULT LIVER, SIGNAL = 2.8; EXPRESSED IN FETAL LIVER, SIGNAL = 4.4; EXPRESSED IN PLACENTA, SIGNAL =   5; EXPRESSED IN BONE MARROW, SIGNAL = 4.8; EXPRESSED IN HEART, SIGNAL = 3.2; EXPRESSED IN LUNG, SIGNAL = 7.7; EXPRESSED IN BRAIN, SIGNAL = 1.4; EXPRESSED IN HELA, SIGNAL =   4; SWISSPROT HIT: P07910, EVALUE 1.00e-39; EST_HUMAN HIT: BE273599.1, EVALUE 2.00e-42
TLPSNTMASNVTNKTDPRSMNSRVFIGNLNTLVVKKSDVEAIFSKYGKIVGCSVHKGFAFVQYVNERNARAAVAGEDGRMIAGQV

SEQ ID NO: 42555 - protein, 36 aa, Homo sapiens
  MAP TO AL122010.2; EXPRESSED IN BRAIN, SIGNAL = 5.2; EXPRESSED IN ADULT LIVER, SIGNAL = 5.9; EXPRESSED IN BONE MARROW, SIGNAL = 4.3; EXPRESSED IN HELA, SIGNAL = 6.7; EXPRESSED IN HEART, SIGNAL = 5.6; EXPRESSED IN PLACENTA, SIGNAL = 4.1; EXPRESSED IN LUNG, SIGNAL = 3.4; EXPRESSED IN FETAL LIVER, SIGNAL = 6.1
EDLEDLEDLEPGGVKASRQQAQRLARPVDSAPSWKV

SEQ ID NO: 42556 - protein, 109 aa, Homo sapiens
  MAP TO AC024019.2; EXPRESSED IN FETAL LIVER, SIGNAL = 2.6; EXPRESSED IN HEART, SIGNAL = 2.5; EXPRESSED IN PLACENTA, SIGNAL = 1.9; EXPRESSED IN BRAIN, SIGNAL = 2.5; EXPRESSED IN BONE MARROW, SIGNAL = 1.9; EXPRESSED IN LUNG, SIGNAL = 2.2; EXPRESSED IN ADULT LIVER, SIGNAL = 2.2; EXPRESSED IN HELA, SIGNAL = 2.5; EST_HUMAN HIT: BE541175.1, EVALUE 4.80e-01; SWISSPROT HIT: P41640, EVALUE 3.70e+00
GLRSFRMMPHHLQEGQVVWKGLFTGTPLHVRPSALRQDTMLSMSVKRKGGQSTLCWNTGPTHVGMCFWEPHGVRPMLATITTQSLPGALGLHLEGERTWAVRAETSQAI

SEQ ID NO: 42557 - protein, 58 aa, Homo sapiens
  MAP TO AC015788.3; EXPRESSED IN PLACENTA, SIGNAL = 2.1; EXPRESSED IN BRAIN, SIGNAL = 1.9; EXPRESSED IN HEART, SIGNAL = 2.3; EXPRESSED IN ADULT LIVER, SIGNAL = 2.1; EXPRESSED IN BONE MARROW, SIGNAL = 2.2; EXPRESSED IN FETAL LIVER, SIGNAL = 1.6; EXPRESSED IN LUNG, SIGNAL = 3.1; EST_HUMAN HIT: AA704729.1, EVALUE 4.00e-20; SWISSPROT HIT: Q13191, EVALUE 4.00e-21
RDPPPPPPERPPPIPPDNRLSRHIHHVESVPSRDPPMPLEAWCPRDVFGTNQLVGCRL

SEQ ID NO: 42558 - protein, 45 aa, Homo sapiens
  MAP TO AL158153.2; EXPRESSED IN BRAIN, SIGNAL = 2.2; EXPRESSED IN PLACENTA, SIGNAL = 1.7; EXPRESSED IN BONE MARROW, SIGNAL = 1.7; EXPRESSED IN LUNG, SIGNAL = 4.2; EXPRESSED IN ADULT LIVER, SIGNAL = 2.2; EXPRESSED IN HELA, SIGNAL = 3.1; EXPRESSED IN FETAL LIVER, SIGNAL = 2.5; EXPRESSED IN HEART, SIGNAL = 2.8; EST_HUMAN HIT: T81910.1, EVALUE 7.00e-23; SWISSPROT HIT: Q91641, EVALUE 6.00e-19
CDFEENHLCGFVNRWNPNVNWFVGGGSIRNVHSILPQDHTFKSEL

SEQ ID NO: 42559 - protein, 46 aa, Homo sapiens
  MAP TO AC019155.2; EXPRESSED IN BRAIN, SIGNAL = 2.2; EXPRESSED IN PLACENTA, SIGNAL =   2; EXPRESSED IN ADULT LIVER, SIGNAL = 1.6; EXPRESSED IN FETAL LIVER, SIGNAL = 1.6; EXPRESSED IN HEART, SIGNAL = 3.1
YCEVYEMHVRTCNPEDNREEIFSCNFCPLLIKDSTIGIEAPLLAVY

SEQ ID NO: 42560 - protein, 32 aa, Homo sapiens
  MAP TO AC019155.2; EXPRESSED IN BRAIN, SIGNAL = 2.2; EXPRESSED IN PLACENTA, SIGNAL =   2; EXPRESSED IN ADULT LIVER, SIGNAL = 1.6; EXPRESSED IN FETAL LIVER, SIGNAL = 1.6; EXPRESSED IN HEART, SIGNAL = 3.1
LATQRTTGKKFFPVTSVPYSSKIAPSALKPHS

SEQ ID NO: 42561 - protein, 26 aa, Homo sapiens
  MAP TO AL133467.1; EXPRESSED IN ADULT LIVER, SIGNAL =   2; EXPRESSED IN BONE MARROW, SIGNAL = 1.9; EXPRESSED IN BRAIN, SIGNAL =   2; EXPRESSED IN PLACENTA, SIGNAL = 2.2; EXPRESSED IN FETAL LIVER, SIGNAL = 5.9; EXPRESSED IN HELA, SIGNAL = 6.1; EXPRESSED IN HEART, SIGNAL =   5; EST_HUMAN HIT: BE182974.1, EVALUE 3.00e-04
DFVNCLDKNADSDMNNKVQAQVVSDG

SEQ ID NO: 42562 - protein, 116 aa, Homo sapiens
  MAP TO AC020904.3; EXPRESSED IN PLACENTA, SIGNAL = 1.6; EXPRESSED IN HEART, SIGNAL = 6.1; EXPRESSED IN HELA, SIGNAL = 2.3; EXPRESSED IN BONE MARROW, SIGNAL = 3.5; EXPRESSED IN FETAL LIVER, SIGNAL = 1.8; EXPRESSED IN LUNG, SIGNAL =   4; EST_HUMAN HIT: BE901274.1, EVALUE 1.00e-58; SWISSPROT HIT: O75390, EVALUE 1.00e-61
MLDNFPTNLHPMSQLSAAVTALNSESNFAQAYARGISRTKYWELIYEDSVDLITKLPCVAAKIYRNLYGEGSGIGAIDSNLDWSHSFTNMLGYTDHQFPELMHLYLTIHSDHEGGN

SEQ ID NO: 42563 - protein, 51 aa, Homo sapiens
  MAP TO AC020904.3; EXPRESSED IN PLACENTA, SIGNAL = 1.6; EXPRESSED IN HEART, SIGNAL = 6.1; EXPRESSED IN HELA, SIGNAL = 2.3; EXPRESSED IN BONE MARROW, SIGNAL = 3.5; EXPRESSED IN FETAL LIVER, SIGNAL = 1.8; EXPRESSED IN LUNG, SIGNAL =   4; EST_HUMAN HIT: AA262190.1, EVALUE 2.00e-24; SWISSPROT HIT: P16759, EVALUE 3.60e+00
LCLPMWSPCWTTFPPIYTPCLSSVQLLQPSTVKVTLPKHMHGVSAEPSTGS

SEQ ID NO: 42564 - protein, 85 aa, Homo sapiens
  MAP TO AC002060.3; EXPRESSED IN BONE MARROW, SIGNAL =  34; EXPRESSED IN FETAL LIVER, SIGNAL =   3; EXPRESSED IN LUNG, SIGNAL =  51; EXPRESSED IN PLACENTA, SIGNAL = 3.4; EXPRESSED IN BRAIN, SIGNAL = 2.5; EXPRESSED IN HEART, SIGNAL =   3; EXPRESSED IN ADULT LIVER, SIGNAL = 5.8; EXPRESSED IN HELA, SIGNAL = 3.1; EST_HUMAN HIT: AI089521.1, EVALUE 9.00e-18
CGGLHSRVDGAAICLPGHFYSSRVEVTDQAHQCGLVGLKLLRGGREQSDRGGSLGLTCGVDEGQGVRVLVSTWGAPGLSFQVGEG

SEQ ID NO: 42565 - protein, 18 aa, Homo sapiens
  MAP TO AC002060.3; EXPRESSED IN BONE MARROW, SIGNAL =  34; EXPRESSED IN FETAL LIVER, SIGNAL =   3; EXPRESSED IN LUNG, SIGNAL =  51; EXPRESSED IN PLACENTA, SIGNAL = 3.4; EXPRESSED IN BRAIN, SIGNAL = 2.5; EXPRESSED IN HEART, SIGNAL =   3; EXPRESSED IN ADULT LIVER, SIGNAL = 5.8; EXPRESSED IN HELA, SIGNAL = 3.1; EST_HUMAN HIT: AI762771.1, EVALUE 3.00e-05
CSRPPLRSFKPTRPHWCA

SEQ ID NO: 42566 - protein, 30 aa, Homo sapiens
  MAP TO AC023890.3; EXPRESSED IN PLACENTA, SIGNAL = 1.8; EXPRESSED IN BONE MARROW, SIGNAL = 2.2; EXPRESSED IN FETAL LIVER, SIGNAL = 1.9; EXPRESSED IN LUNG, SIGNAL = 2.2; EXPRESSED IN HEART, SIGNAL = 5.1; EXPRESSED IN BRAIN, SIGNAL = 1.4; EXPRESSED IN HELA, SIGNAL =   2; EXPRESSED IN ADULT LIVER, SIGNAL = 1.4; SWISSPROT HIT: P42522, EVALUE 3.00e-09; EST_HUMAN HIT: AI470074.1, EVALUE 6.00e-10
HVKDIILQSNPLLEAFGNAKTVRNNNSSRF

SEQ ID NO: 42567 - protein, 46 aa, Homo sapiens
  MAP TO AC019219.2; EXPRESSED IN PLACENTA, SIGNAL = 7.1; EXPRESSED IN BONE MARROW, SIGNAL = 7.8; EXPRESSED IN HELA, SIGNAL = 9.3; EXPRESSED IN LUNG, SIGNAL = 5.3; EXPRESSED IN HEART, SIGNAL = 7.7; EXPRESSED IN BRAIN, SIGNAL = 7.8; EXPRESSED IN FETAL LIVER, SIGNAL = 8.5; EXPRESSED IN ADULT LIVER, SIGNAL = 8.7; SWISSPROT HIT: P89876, EVALUE 6.20e+00
HNCVEDLGSKKGHTTKWDTTHNRSKIALLSTTEAELINSDCEEGFE

SEQ ID NO: 42568 - protein, 18 aa, Homo sapiens
  MAP TO AL133246.1; EXPRESSED IN BRAIN, SIGNAL = 1.8; EXPRESSED IN PLACENTA, SIGNAL = 2.2; EXPRESSED IN FETAL LIVER, SIGNAL = 4.9; EXPRESSED IN ADULT LIVER, SIGNAL =   2; EXPRESSED IN HELA, SIGNAL = 5.5; EXPRESSED IN HEART, SIGNAL = 4.6; EXPRESSED IN BONE MARROW, SIGNAL = 1.9; EST_HUMAN HIT: AU117241.1, EVALUE 2.50e-01
RGDLDAVKGIPFYKGSRA

SEQ ID NO: 42569 - protein, 38 aa, Homo sapiens
  MAP TO AC018573.2; EXPRESSED IN ADULT LIVER, SIGNAL = 2.4; EXPRESSED IN FETAL LIVER, SIGNAL = 2.9; EXPRESSED IN LUNG, SIGNAL = 3.3; EXPRESSED IN PLACENTA, SIGNAL = 2.5; EXPRESSED IN BRAIN, SIGNAL = 2.3; EXPRESSED IN HEART, SIGNAL = 2.6; EXPRESSED IN BONE MARROW, SIGNAL = 2.6; EXPRESSED IN HELA, SIGNAL = 3.1
AAPQFINSWEISCSQEKDDFLVHVKVEMTKTDCITQKK

SEQ ID NO: 42570 - protein, 20 aa, Homo sapiens
  MAP TO AC018573.2; EXPRESSED IN ADULT LIVER, SIGNAL = 2.4; EXPRESSED IN FETAL LIVER, SIGNAL = 2.9; EXPRESSED IN LUNG, SIGNAL = 3.3; EXPRESSED IN PLACENTA, SIGNAL = 2.5; EXPRESSED IN BRAIN, SIGNAL = 2.3; EXPRESSED IN HEART, SIGNAL = 2.6; EXPRESSED IN BONE MARROW, SIGNAL = 2.6; EXPRESSED IN HELA, SIGNAL = 3.1
RLHSLSTAGKFPVHRKRMTS

SEQ ID NO: 42571 - protein, 30 aa, Homo sapiens
  MAP TO AC010931.5; EXPRESSED IN PLACENTA, SIGNAL = 2.5; EXPRESSED IN BRAIN, SIGNAL = 2.6; EXPRESSED IN HEART, SIGNAL = 2.7; EXPRESSED IN ADULT LIVER, SIGNAL = 2.7; EXPRESSED IN BONE MARROW, SIGNAL = 2.3; EXPRESSED IN HELA, SIGNAL = 2.6; EXPRESSED IN FETAL LIVER, SIGNAL = 2.5; EXPRESSED IN LUNG, SIGNAL = 3.3; EST_HUMAN HIT: AL040231.1, EVALUE 2.00e-06
EMEDNIWTVRRRRRLGPRQTSQRTWRAGRP

SEQ ID NO: 42572 - protein, 75 aa, Homo sapiens; identical to SEQ ID NO: 42144
  MAP TO AC018836.2; EXPRESSED IN HEART, SIGNAL =   2; EST_HUMAN HIT: AU118049.1, EVALUE 5.00e-24; SWISSPROT HIT: P27864, EVALUE 1.10e+00

SEQ ID NO: 42573 - protein, 43 aa, Homo sapiens
  MAP TO AC017079.2; EXPRESSED IN ADULT LIVER, SIGNAL = 3.1; EXPRESSED IN PLACENTA, SIGNAL = 3.6; EXPRESSED IN BONE MARROW, SIGNAL = 3.2; EXPRESSED IN FETAL LIVER, SIGNAL = 9.9; EXPRESSED IN HELA, SIGNAL =  11; EXPRESSED IN LUNG, SIGNAL = 3.7; EXPRESSED IN HEART, SIGNAL = 7.5; EXPRESSED IN BRAIN, SIGNAL = 3.3; EST_HUMAN HIT: AV655988.1, EVALUE 5.00e-13; SWISSPROT HIT: P50914, EVALUE 4.00e-14
MVFRHFVEVGQVAYISGPHAGKLVAIIDVVDENRALVGGACTQ

SEQ ID NO: 42574 - protein, 38 aa, Homo sapiens
  MAP TO AC020741.2; EXPRESSED IN BRAIN, SIGNAL = 3.5; EXPRESSED IN ADULT LIVER, SIGNAL = 3.7; EXPRESSED IN HEART, SIGNAL = 3.1; EXPRESSED IN PLACENTA, SIGNAL = 3.1; EXPRESSED IN LUNG, SIGNAL = 4.4; EXPRESSED IN HELA, SIGNAL = 3.6; EXPRESSED IN FETAL LIVER, SIGNAL = 3.6; EXPRESSED IN BONE MARROW, SIGNAL = 3.7; EST_HUMAN HIT: BE504146.1, EVALUE 1.00e-07
ASCRAHRCSSWTRAPWSYQRSSRSRCPRSTDCSARCGQ

SEQ ID NO: 42575 - protein, 58 aa, Homo sapiens
  MAP TO AC020559.2; EXPRESSED IN BRAIN, SIGNAL = 3.5; EXPRESSED IN HEART, SIGNAL = 3.2; EXPRESSED IN PLACENTA, SIGNAL = 3.7; EXPRESSED IN LUNG, SIGNAL = 3.4; EXPRESSED IN HELA, SIGNAL = 3.2; EXPRESSED IN FETAL LIVER, SIGNAL = 2.9; EXPRESSED IN BONE MARROW, SIGNAL = 2.8; EXPRESSED IN ADULT LIVER, SIGNAL = 3.4
NLVITTDIREASSIVASFSIIFSTQRMATAEFFQVLLPSPIVLKECLVKEIAFRNSQI

SEQ ID NO: 42576 - protein, 62 aa, Homo sapiens
  MAP TO AL133241.2; EXPRESSED IN PLACENTA, SIGNAL = 1.4; EXPRESSED IN BRAIN, SIGNAL = 1.3; EXPRESSED IN FETAL LIVER, SIGNAL = 3.4; EXPRESSED IN HELA, SIGNAL = 3.4; EXPRESSED IN HEART, SIGNAL = 2.9; EST_HUMAN HIT: T57270.1, EVALUE 2.00e-10; SWISSPROT HIT: P25558, EVALUE 2.00e+00
NLQPDNVIEKKNQFYGEKLKPIVEIFISNEEWNVNSQDSGEKCHQGMSEILVATPPITGPVA

SEQ ID NO: 42577 - protein, 32 aa, Homo sapiens
  MAP TO AC020647.9; EXPRESSED IN ADULT LIVER, SIGNAL =   2; EXPRESSED IN BONE MARROW, SIGNAL = 2.2; EXPRESSED IN LUNG, SIGNAL = 2.6; EXPRESSED IN PLACENTA, SIGNAL = 1.9; EXPRESSED IN BRAIN, SIGNAL = 1.5; EXPRESSED IN HEART, SIGNAL = 1.9; EXPRESSED IN FETAL LIVER, SIGNAL = 2.1; EXPRESSED IN HELA, SIGNAL = 2.1; EST_HUMAN HIT: AI803628.1, EVALUE 4.00e-03; SWISSPROT HIT: O04856, EVALUE 8.50e+00
VQVWHCWIQCFRVLPVCNSHVGWVCSLIRGST

SEQ ID NO: 42578 - protein, 28 aa, Homo sapiens
  MAP TO AC020647.9; EXPRESSED IN ADULT LIVER, SIGNAL =   2; EXPRESSED IN BONE MARROW, SIGNAL = 2.2; EXPRESSED IN LUNG, SIGNAL = 2.6; EXPRESSED IN PLACENTA, SIGNAL = 1.9; EXPRESSED IN BRAIN, SIGNAL = 1.5; EXPRESSED IN HEART, SIGNAL = 1.9; EXPRESSED IN FETAL LIVER, SIGNAL = 2.1; EXPRESSED IN HELA, SIGNAL = 2.1; EST_HUMAN HIT: AA620915.1, EVALUE 1.00e-03
LQGLTSLQLTCWLGLQSHQRLNWVRICF

SEQ ID NO: 42579 - protein, 62 aa, Homo sapiens
  MAP TO AC002041.1; EXPRESSED IN HEART, SIGNAL =   4; EXPRESSED IN BRAIN, SIGNAL = 3.6; EXPRESSED IN PLACENTA, SIGNAL = 2.8; EXPRESSED IN BONE MARROW, SIGNAL = 4.7; EXPRESSED IN FETAL LIVER, SIGNAL = 3.7; EXPRESSED IN HELA, SIGNAL = 4.7; EXPRESSED IN LUNG, SIGNAL = 2.9; EXPRESSED IN ADULT LIVER, SIGNAL = 2.2; EST_HUMAN HIT: H82584.1, EVALUE 3.00e-14; SWISSPROT HIT: P53796, EVALUE 4.00e-16
CPVPPCPAQQPNPSTLAPPPLRDAIILAVINSGTSFFAGFVVFSILGFMAAEQGMHISKVAE

SEQ ID NO: 42580 - protein, 51 aa, Homo sapiens
  MAP TO AC008583.4; EXPRESSED IN HEART, SIGNAL = 3.3; SWISSPROT HIT: P14547, EVALUE 6.10e+00
QVPRRRNSGWKNRKDLLLNFPSRKNMPIYTLPCSKPLPIILSPLLIIIATL

SEQ ID NO: 42581 - protein, 37 aa, Homo sapiens
  MAP TO AC017093.2; EXPRESSED IN BRAIN, SIGNAL = 4.7; EXPRESSED IN BONE MARROW, SIGNAL = 3.7; EXPRESSED IN HEART, SIGNAL = 4.8; EXPRESSED IN ADULT LIVER, SIGNAL =   4; EXPRESSED IN FETAL LIVER, SIGNAL =   5; EXPRESSED IN HELA, SIGNAL = 5.6; EXPRESSED IN LUNG, SIGNAL = 6.8; EXPRESSED IN PLACENTA, SIGNAL = 4.4; EST_HUMAN HIT: AA336579.1, EVALUE 4.30e+00
CFTGQLEIQWWLRRGRADSEKEGQKGRWQPWLLSSMR

SEQ ID NO: 42582 - protein, 54 aa, Homo sapiens
  MAP TO AC002039.1; EXPRESSED IN FETAL LIVER, SIGNAL = 5.5; EXPRESSED IN BONE MARROW, SIGNAL = 7.3; EXPRESSED IN HELA, SIGNAL =   5; EXPRESSED IN LUNG, SIGNAL =  20; EXPRESSED IN HEART, SIGNAL = 6.5; EXPRESSED IN ADULT LIVER, SIGNAL = 3.4; EXPRESSED IN BRAIN, SIGNAL =  12; EXPRESSED IN PLACENTA, SIGNAL = 4.7; SWISSPROT HIT: P98161, EVALUE 8.00e-28; EST_HUMAN HIT: BF528554.1, EVALUE 4.00e-28
QRGFFDKHIWLSIWDRPPRSCFTRIQRATCCVLLICLFLGANAVWYGAVGDSAY

SEQ ID NO: 42583 - protein, 58 aa, Homo sapiens
  MAP TO AC016939.8; EXPRESSED IN PLACENTA, SIGNAL = 1.6; EXPRESSED IN BRAIN, SIGNAL = 2.1; EXPRESSED IN BONE MARROW, SIGNAL = 1.6; EXPRESSED IN HELA, SIGNAL = 2.8; EXPRESSED IN HEART, SIGNAL = 2.2; EXPRESSED IN ADULT LIVER, SIGNAL = 1.9; EXPRESSED IN FETAL LIVER, SIGNAL = 2.3; EXPRESSED IN LUNG, SIGNAL = 2.5; SWISSPROT HIT: P43358, EVALUE 6.00e-15; EST_HUMAN HIT: BE795782.1, EVALUE 8.00e-17
ALTRVIMSSEQRSQHCKPEDGLEAQGQEALGLVGAQAPATEEHEAASSFTLIEGTLEE

SEQ ID NO: 42584 - protein, 39 aa, Homo sapiens
  MAP TO AC021735.4; EXPRESSED IN ADULT LIVER, SIGNAL = 1.4; EXPRESSED IN FETAL LIVER, SIGNAL = 1.8; EXPRESSED IN LUNG, SIGNAL = 1.7; EXPRESSED IN PLACENTA, SIGNAL = 2.8; EXPRESSED IN BONE MARROW, SIGNAL = 1.5; EXPRESSED IN HEART, SIGNAL = 1.8; EXPRESSED IN HELA, SIGNAL = 1.9
METQVFKQSVWALNFFLNTPILSERRKPMTSWRNTIISQ

SEQ ID NO: 42585 - protein, 95 aa, Homo sapiens
  MAP TO AF236876.1; EXPRESSED IN BRAIN, SIGNAL = 4.7; EXPRESSED IN BONE MARROW, SIGNAL = 5.3; EXPRESSED IN HEART, SIGNAL =   5; EXPRESSED IN FETAL LIVER, SIGNAL = 5.4; EXPRESSED IN HELA, SIGNAL = 5.8; EXPRESSED IN ADULT LIVER, SIGNAL = 4.9; EXPRESSED IN LUNG, SIGNAL = 5.8; EXPRESSED IN PLACENTA, SIGNAL = 4.9; EST_HUMAN HIT: BF677292.1, EVALUE 7.00e-16; SWISSPROT HIT: P19275, EVALUE 4.20e-01
GEDGAGAETTPVAEPTKLVLPMKVNPYSVIDITPFQEDQPPTPVPSAEEENVGLHVPCGYLVPVPCGYAVPSNLPLLLPAYSSPVIICATSLDEE

SEQ ID NO: 42586 - protein, 22 aa, Homo sapiens
  MAP TO AF236876.1; EXPRESSED IN BRAIN, SIGNAL = 4.7; EXPRESSED IN BONE MARROW, SIGNAL = 5.3; EXPRESSED IN HEART, SIGNAL =   5; EXPRESSED IN FETAL LIVER, SIGNAL = 5.4; EXPRESSED IN HELA, SIGNAL = 5.8; EXPRESSED IN ADULT LIVER, SIGNAL = 4.9; EXPRESSED IN LUNG, SIGNAL = 5.8; EXPRESSED IN PLACENTA, SIGNAL = 4.9; EST_HUMAN HIT: BF677292.1, EVALUE 2.00e-06
EVRMELEQKPPQWQSLLSWCSR

SEQ ID NO: 42587 - protein, 25 aa, Homo sapiens
  MAP TO AC016313.5; EXPRESSED IN PLACENTA, SIGNAL = 1.5; EXPRESSED IN BRAIN, SIGNAL = 1.8; EXPRESSED IN BONE MARROW, SIGNAL = 1.5; EXPRESSED IN HELA, SIGNAL = 2.1; EXPRESSED IN HEART, SIGNAL = 1.9; EXPRESSED IN ADULT LIVER, SIGNAL = 1.7; EXPRESSED IN FETAL LIVER, SIGNAL = 2.3; EXPRESSED IN LUNG, SIGNAL = 2.1
LLAPVHLLGRDFLGKHHVAITFSHK

SEQ ID NO: 42588 - protein, 29 aa, Homo sapiens
  MAP TO AL079304.2; EXPRESSED IN BONE MARROW, SIGNAL = 3.5; EXPRESSED IN HEART, SIGNAL = 2.6; EXPRESSED IN BRAIN, SIGNAL = 2.8; EXPRESSED IN ADULT LIVER, SIGNAL = 2.1; EXPRESSED IN FETAL LIVER, SIGNAL = 2.7; EXPRESSED IN HELA, SIGNAL = 2.8; EXPRESSED IN LUNG, SIGNAL = 3.3; EXPRESSED IN PLACENTA, SIGNAL = 2.2
VLTTHMILGKSLTLSELRVLNLEKEENIM

SEQ ID NO: 42589 - protein, 107 aa, Homo sapiens
  MAP TO AC023404.2; EXPRESSED IN HEART, SIGNAL =   2; EXPRESSED IN PLACENTA, SIGNAL = 1.4; EXPRESSED IN FETAL LIVER, SIGNAL = 2.6; EXPRESSED IN HELA, SIGNAL =   2; SWISSPROT HIT: P38565, EVALUE 1.20e+00; EST_HUMAN HIT: AI128753.1, EVALUE 9.00e-40
PVKPLHLRSMLCKSMRCTENCNACSQHWSTVRSAFSTTTTDHALHNQRFKSCTNWATKFCLIHHIHLTSCQPTTTSSGIWTTFCKENASTTCRTQKILPKCSSNPKA

SEQ ID NO: 42590 - protein, 92 aa, Homo sapiens
  MAP TO AL121657.2; EXPRESSED IN PLACENTA, SIGNAL = 2.4; EXPRESSED IN HEART, SIGNAL =   2; EXPRESSED IN BONE MARROW, SIGNAL = 2.4; EXPRESSED IN LUNG, SIGNAL = 1.9; SWISSPROT HIT: P13666, EVALUE 2.00e-14; EST_HUMAN HIT: AW819543.1, EVALUE 1.00e-45
MRVVLNKADQIETQQLMRVYGALMWSLGKIVNTPEVIRVYIGSFWSHPLLIPDNRKLFEAEEQDLFRDIQSLPRNAALRKLNDLIKRARLAK

SEQ ID NO: 42591 - protein, 24 aa, Homo sapiens
  MAP TO AL121657.2; EXPRESSED IN PLACENTA, SIGNAL = 2.4; EXPRESSED IN HEART, SIGNAL =   2; EXPRESSED IN BONE MARROW, SIGNAL = 2.4; EXPRESSED IN LUNG, SIGNAL = 1.9
WTSLMSSQKSSKPSRTTRTRCEWC

SEQ ID NO: 42592 - protein, 38 aa, Homo sapiens [sequence omitted]

SEQ ID NO: 42593 - protein, 40 aa, Homo sapiens
  MAP TO AC023392.2; EXPRESSED IN BRAIN, SIGNAL = 3.9; EXPRESSED IN PLACENTA, SIGNAL = 4.5; EXPRESSED IN ADULT LIVER, SIGNAL = 3.9; EXPRESSED IN FETAL LIVER, SIGNAL = 5.2; EXPRESSED IN BONE MARROW, SIGNAL = 2.9; EXPRESSED IN HELA, SIGNAL =   6; EXPRESSED IN LUNG, SIGNAL = 3.1; EXPRESSED IN HEART, SIGNAL = 4.4; SWISSPROT HIT: P94427, EVALUE 8.30e+00; EST_HUMAN HIT: AW341549.1, EVALUE 2.00e-06
LMRTRRKRKGLSCCLRGVRGRENLCISGPMQFKPVLFKGQ

SEQ ID NO: 42594 - protein, 48 aa, Homo sapiens
  MAP TO AC013827.4; EXPRESSED IN BRAIN, SIGNAL =  12; EXPRESSED IN PLACENTA, SIGNAL =  61; EXPRESSED IN HEART, SIGNAL =  32; EXPRESSED IN BONE MARROW, SIGNAL =  60; EXPRESSED IN HELA, SIGNAL =  75; EXPRESSED IN FETAL LIVER, SIGNAL =  56; EXPRESSED IN LUNG, SIGNAL = 1.3e+02; EXPRESSED IN ADULT LIVER, SIGNAL =  31; SWISSPROT HIT: Q03721, EVALUE 8.10e+00; EST_HUMAN HIT: AV759265.1, EVALUE 2.00e-21
TSFKFTNTSSNNQDSTVSLRCPCNHVFDEVSVSWGINDTHVVLTGLKF

SEQ ID NO: 42595 - protein, 25 aa, Homo sapiens
  MAP TO AC019191.2; EXPRESSED IN BRAIN, SIGNAL = 5.5; EXPRESSED IN PLACENTA, SIGNAL = 3.3; EXPRESSED IN ADULT LIVER, SIGNAL =   4; EXPRESSED IN FETAL LIVER, SIGNAL = 4.3; EXPRESSED IN BONE MARROW, SIGNAL =   4; EXPRESSED IN LUNG, SIGNAL = 3.5; EXPRESSED IN HELA, SIGNAL = 3.9; EXPRESSED IN HEART, SIGNAL = 4.2
LEYENYGIVFVKRTITKKRAIWKDK

SEQ ID NO: 42596 - protein, 19 aa, Homo sapiens
  MAP TO AC019191.2; EXPRESSED IN BRAIN, SIGNAL = 5.5; EXPRESSED IN PLACENTA, SIGNAL = 3.3; EXPRESSED IN ADULT LIVER, SIGNAL =   4; EXPRESSED IN FETAL LIVER, SIGNAL = 4.3; EXPRESSED IN BONE MARROW, SIGNAL =   4; EXPRESSED IN LUNG, SIGNAL = 3.5; EXPRESSED IN HELA, SIGNAL = 3.9; EXPRESSED IN HEART, SIGNAL = 4.2
LSFQMARFFVMVLLTNTIP

SEQ ID NO: 42597 - protein, 77 aa, Homo sapiens [sequence omitted]

SEQ ID NO: 42598 - protein, 62 aa, Homo sapiens
  MAP TO AC000065.1; EXPRESSED IN BONE MARROW, SIGNAL = 2.3; EXPRESSED IN FETAL LIVER, SIGNAL = 4.4; EXPRESSED IN PLACENTA, SIGNAL = 2.3; EXPRESSED IN BRAIN, SIGNAL = 2.4; EXPRESSED IN HELA, SIGNAL = 3.4; EXPRESSED IN ADULT LIVER, SIGNAL = 2.7; EXPRESSED IN HEART, SIGNAL = 3.4; SWISSPROT HIT: P46348, EVALUE 3.50e+00; EST_HUMAN HIT: BE644611.1, EVALUE 1.00e-29
CTTTYKKKLTVQQSQPGPSRGILEEGIVITGDDSSMHVIAPEALLVGQEVDRQDSDIDHPDS

SEQ ID NO: 42599 - protein, 55 aa, Homo sapiens
  MAP TO AC010620.3; EXPRESSED IN HEART, SIGNAL =   2; EXPRESSED IN BONE MARROW, SIGNAL = 1.6; EXPRESSED IN PLACENTA, SIGNAL = 1.5; EXPRESSED IN BRAIN, SIGNAL = 1.7; EXPRESSED IN ADULT LIVER, SIGNAL =   2; EXPRESSED IN FETAL LIVER, SIGNAL = 2.3; EXPRESSED IN HELA, SIGNAL = 2.3; SWISSPROT HIT: O96009, EVALUE 2.70e+00; EST_HUMAN HIT: AI700270.1, EVALUE 2.00e-08
RDSGTMSCSMNIKICFFIFVFRCSPLPQTPAISATVMEIWVTLTSPYQTQTEQTL

SEQ ID NO: 42600 - protein, 30 aa, Homo sapiens
  MAP TO AC012558.6; EXPRESSED IN HEART, SIGNAL = 1.8
AEKEEEEEGLVLLSWVTEAEVVEVEGDVGE

SEQ ID NO: 42601 - protein, 84 aa, Homo sapiens
  MAP TO AC016025.11; EXPRESSED IN BRAIN, SIGNAL = 3.5; EXPRESSED IN PLACENTA, SIGNAL = 3.5; EXPRESSED IN ADULT LIVER, SIGNAL = 2.2; EXPRESSED IN FETAL LIVER, SIGNAL = 2.7; EXPRESSED IN BONE MARROW, SIGNAL = 2.6; EXPRESSED IN HELA, SIGNAL = 2.5; EXPRESSED IN LUNG, SIGNAL = 2.9; EXPRESSED IN HEART, SIGNAL = 2.8
SSESEMEEEGEEEEEEPRLPPSDLGGVPWKEAVRIHALLKGKSEEELEASKSFGPGNEEEEEEEEEYEEEEEEDYDEEEEESSE

SEQ ID NO: 42602 - protein, 32 aa, Homo sapiens
  MAP TO AL138806.5; EXPRESSED IN BRAIN, SIGNAL = 1.9; EXPRESSED IN HEART, SIGNAL = 2.9; EXPRESSED IN LUNG, SIGNAL = 2.9; EXPRESSED IN PLACENTA, SIGNAL = 2.2; EXPRESSED IN HELA, SIGNAL =   3; EXPRESSED IN FETAL LIVER, SIGNAL = 2.9; EXPRESSED IN BONE MARROW, SIGNAL = 2.5; EXPRESSED IN ADULT LIVER, SIGNAL = 2.8
MSVCKAHTPCPGDHANPLEHYLYDLAVAELCL

SEQ ID NO: 42603 - protein, 26 aa, Homo sapiens
  MAP TO AL138806.5; EXPRESSED IN BRAIN, SIGNAL = 1.9; EXPRESSED IN HEART, SIGNAL = 2.9; EXPRESSED IN LUNG, SIGNAL = 2.9; EXPRESSED IN PLACENTA, SIGNAL = 2.2; EXPRESSED IN HELA, SIGNAL =   3; EXPRESSED IN FETAL LIVER, SIGNAL = 2.9; EXPRESSED IN BONE MARROW, SIGNAL = 2.5; EXPRESSED IN ADULT LIVER, SIGNAL = 2.8
CLFAKPTPRVLGTTRTLWNIIFMTSQ

SEQ ID NO: 42604 - protein, 103 aa, Homo sapiens
  MAP TO AC005323.1; EXPRESSED IN HEART, SIGNAL =  36; EXPRESSED IN BONE MARROW, SIGNAL = 1.8; SWISSPROT HIT: P02565, EVALUE 9.00e-51; EST_HUMAN HIT: F00635.1, EVALUE 1.00e-23
PMGIFSILEEECMFPKATDTSFKNKLYEQHLGKSNNFQKPKPAKGKPEAHFSLIHYAGTVDYNIAGWLDKNKDPLNETVVGLYQKSAMKTLALLFVGATGAEA

SEQ ID NO: 42605 - protein, 58 aa, Homo sapiens
  MAP TO AC005323.1; EXPRESSED IN HEART, SIGNAL =  36; EXPRESSED IN BONE MARROW, SIGNAL = 1.8; SWISSPROT HIT: Q92543, EVALUE 9.10e-01; EST_HUMAN HIT: AL042859.1, EVALUE 3.00e-11
SFHSSSLWASSPSWKRSACSPRRQTPPSRTSCMNNILENPITSRSPSLPKASLRPTSL

SEQ ID NO: 42606 - protein, 103 aa, Homo sapiens
  MAP TO AC005323.1; EXPRESSED IN BONE MARROW, SIGNAL = 1.7; EXPRESSED IN HEART, SIGNAL =  34; SWISSPROT HIT: P02565, EVALUE 1.00e-49; EST_HUMAN HIT: F00635.1, EVALUE 1.00e-23
PMGIFSILEEECMFPKATDTSFKNKLYEQHLGKSNNFQKPKPAKGKPEAHFSLVHYAGTVDYNIAGWLDKNKDPLNETVVGLYQKSAMKTLAFLFSGAQTAEA

SEQ ID NO: 42607 - protein, 29 aa, Homo sapiens
  MAP TO AC013707.2; EXPRESSED IN ADULT LIVER, SIGNAL = 2.6; EXPRESSED IN HEART, SIGNAL = 2.5; EXPRESSED IN BRAIN, SIGNAL = 1.7; EXPRESSED IN HELA, SIGNAL = 2.5; EXPRESSED IN FETAL LIVER, SIGNAL = 2.5; EST_HUMAN HIT: AI954196.1, EVALUE 9.00e-03
IQERGREVLERKGQGLWRGLHLLGCAHRP

SEQ ID NO: 42608 - protein, 55 aa, Homo sapiens
  MAP TO AL138827.2; EXPRESSED IN BRAIN, SIGNAL = 1.8; EXPRESSED IN BONE MARROW, SIGNAL = 1.8; EXPRESSED IN HEART, SIGNAL = 2.5; EXPRESSED IN ADULT LIVER, SIGNAL = 1.7; EXPRESSED IN FETAL LIVER, SIGNAL = 2.9; EXPRESSED IN HELA, SIGNAL = 3.4; SWISSPROT HIT: P11439, EVALUE 7.90e+00; EST_HUMAN HIT: AW954050.1, EVALUE 2.00e-14
LQFLKMVCPEFVTSDVQMCLEFLTSGGFVVLLTSGAKPWTWWRVLQLLMVVWTQR

SEQ ID NO: 42609 - protein, 130 aa, Homo sapiens
  MAP TO AC005323.1; EXPRESSED IN HEART, SIGNAL =  32; EXPRESSED IN BONE MARROW, SIGNAL = 2.4; SWISSPROT HIT: gi127772, EVALUE 9.00e-33; EST_HUMAN HIT: AA195800.1, EVALUE 8.00e-33
ARIEELEEEIEAERASRAKAEKQRSDLSRELEEISERLEEAGGATSAQIEMNKKREAEFQKMRRDLEEATLQHEATAATLRKKHADSVAELGEQIDNLQRVKQKLEKEKSEMKMEIDDLASNVETVSKAK

SEQ ID NO: 42610 - protein, 56 aa, Homo sapiens
  MAP TO AC005323.1; EXPRESSED IN HEART, SIGNAL =  32; EXPRESSED IN BONE MARROW, SIGNAL = 2.4; SWISSPROT HIT: Q60739, EVALUE 1.80e-01; EST_HUMAN HIT: F00884.1, EVALUE 4.00e-16
FSTIPRPALRSWRRKSRQSGPPGPKQRSSALTSPGSWRRSARGWKKPVGPLQPRLR

SEQ ID NO: 42611 - protein, 55 aa, Homo sapiens
  MAP TO AC012664.3; EXPRESSED IN PLACENTA, SIGNAL = 2.1; EXPRESSED IN ADULT LIVER, SIGNAL = 2.7; EXPRESSED IN BRAIN, SIGNAL =   3; EXPRESSED IN LUNG, SIGNAL = 2.3; EXPRESSED IN HEART, SIGNAL = 2.6; EXPRESSED IN HELA, SIGNAL = 2.9; EXPRESSED IN FETAL LIVER, SIGNAL = 2.9; EXPRESSED IN BONE MARROW, SIGNAL = 2.3; SWISSPROT HIT: Q00291, EVALUE 2.70e+00; EST_HUMAN HIT: BF184525.1, EVALUE 3.70e+00
EDALRRQGNPVSIGTVPEARRRQSSHQGGQLTAALSRGVCTEDAQLPACCPRSSS

SEQ ID NO: 42612 - protein, 17 aa, Homo sapiens
  MAP TO AC012664.3; EXPRESSED IN PLACENTA, SIGNAL = 2.1; EXPRESSED IN ADULT LIVER, SIGNAL = 2.7; EXPRESSED IN BRAIN, SIGNAL =   3; EXPRESSED IN LUNG, SIGNAL = 2.3; EXPRESSED IN HEART, SIGNAL = 2.6; EXPRESSED IN HELA, SIGNAL = 2.9; EXPRESSED IN FETAL LIVER, SIGNAL = 2.9; EXPRESSED IN BONE MARROW, SIGNAL = 2.3
RRCTAEARESCVHRDSS

SEQ ID NO: 42613 - protein, 34 aa, Homo sapiens [sequence omitted]

SEQ ID NO: 42614 - protein, 33 aa, Homo sapiens
  MAP TO AC009575.4; EXPRESSED IN HEART, SIGNAL = 1.8; EXPRESSED IN PLACENTA, SIGNAL = 1.8; EXPRESSED IN FETAL LIVER, SIGNAL = 1.6; EXPRESSED IN HELA, SIGNAL = 2.1; EST_HUMAN HIT: AA403053.1, EVALUE 7.00e-11
LTLPVREPMWGFCQLLSMSMPIMHSGTGEMTTG

SEQ ID NO: 42615 - protein, 43 aa, Homo sapiens
  MAP TO AC021097.3; EXPRESSED IN HEART, SIGNAL = 2.2; EST_HUMAN HIT: BE296765.1, EVALUE 2.70e-01; SWISSPROT HIT: P23138, EVALUE 8.40e-02
MDYGGHTPLHCALQGPAAALAQSPEHVVRALLNHGAVRVWPGA

SEQ ID NO: 42616 - protein, 97 aa, Homo sapiens
  MAP TO AC021097.3; EXPRESSED IN HEART, SIGNAL = 2.2; EST_HUMAN HIT: BE733694.1, EVALUE 3.00e-03; SWISSPROT HIT: P22810, EVALUE 1.10e+00
SPMPRPPPPAACSCAACCFQLEQTLMLRTRTSSDPCTWPAAVAMQLSWSCSCPVVSAPTPWTMGDTRPCTVLCRAQLQPWPRAPSTWFGLCSTMAPS

SEQ ID NO: 42617 - protein, 25 aa, Homo sapiens
  MAP TO AC021735.4; EXPRESSED IN FETAL LIVER, SIGNAL = 1.8; EXPRESSED IN HEART, SIGNAL = 1.9; EST_HUMAN HIT: AA766755.1, EVALUE 1.00e-04
ICKKYIGSIQKGGNNSKQEGDFQVT

SEQ ID NO: 42618 - protein, 25 aa, Homo sapiens
  MAP TO AC021735.4; EXPRESSED IN FETAL LIVER, SIGNAL = 1.8; EXPRESSED IN HEART, SIGNAL = 1.9; EST_HUMAN HIT: AA766755.1, EVALUE 6.00e-04
YVRSTLVPSRKVGTTQSKKGTSRSQ

SEQ ID NO: 42619 - protein, 54 aa, Homo sapiens
  MAP TO AC011381.3; EXPRESSED IN HEART, SIGNAL = 2.1; EXPRESSED IN FETAL LIVER, SIGNAL = 2.1; EXPRESSED IN HELA, SIGNAL = 3.1; EST_HUMAN HIT: BE747594.1, EVALUE 2.00e-24; SWISSPROT HIT: O35501, EVALUE 2.00e-25
IAVYDLGGGTFDISILEIQKGVFEVKSTNGDTFLGGEDFDQALLRHIVKEFKRE

SEQ ID NO: 42620 - protein, 37 aa, Homo sapiens
  MAP TO AC008583.4; EXPRESSED IN HEART, SIGNAL =  12; EST_HUMAN HIT: AA732257.1, EVALUE 9.60e+00
IIPILQIRKLRFWEIKLRLLSLHGLMVKTPLKIQNTI

SEQ ID NO: 42621 - protein, 35 aa, Homo sapiens
  MAP TO AL121953.10; EXPRESSED IN HEART, SIGNAL = 2.9; EST_HUMAN HIT: AI312571.1, EVALUE 1.00e-15
CRLMPELNCMISSWYWRIGQCGRKPTQLVARSVQC

SEQ ID NO: 42622 - protein, 17 aa, Homo sapiens
  MAP TO AF119117.1; EXPRESSED IN HEART, SIGNAL = 1.7; EST_HUMAN HIT: M78677.1, EVALUE 6.30e+00; SWISSPROT HIT: Q01959, EVALUE 3.00e-03
WAVVFFIMLLTLGIDSA

SEQ ID NO: 42623 - protein, 31 aa, Homo sapiens
  MAP TO AF119117.1; EXPRESSED IN HEART, SIGNAL = 1.7
STRKPSPRSLCPQPGPWSSSSCCSPWVSTAP

SEQ ID NO: 42624 - protein, 109 aa, Homo sapiens
  MAP TO AL133286.5; EXPRESSED IN HEART, SIGNAL = 7.3; SWISSPROT HIT: Q99698, EVALUE 4.00e-58; EST_HUMAN HIT: BE565303.1, EVALUE 5.50e+00
VIRDLFLSCNGVSQIIELNCLNGIRSHSLKAFETLIISLGEQQKDASVPDIDGIDIEQKELSSVHVGTSFHHQQAYSDSPQSLSKFYAGLKEAYPKRRKTVNQDVHINT

SEQ ID NO: 42625 - protein, 59 aa, Homo sapiens
  MAP TO AC024581.1; EXPRESSED IN HEART, SIGNAL = 2.7; SWISSPROT HIT: P04397, EVALUE 4.60e+00
MRACLLMTLGTTLGHQEITNKSDSGEASLWSLQFHMTVSEPIYPEESLIGNWHAAETDT

SEQ ID NO: 42626 - protein, 107 aa, Homo sapiens
  MAP TO AL049829.3; EXPRESSED IN HEART, SIGNAL =  93; EXPRESSED IN BONE MARROW, SIGNAL = 2.1; EST_HUMAN HIT: F01167.1, EVALUE 2.00e-25; SWISSPROT HIT: Q02566, EVALUE 1.00e-29
LGVPALFKTLGLLSLTISFLPVLFSQEQDNLNDAEERCDQLIKNKIQLEAKVKEMNERLEDEEEMNAELTAKKRKLEDECSELKKDIDDLELTLAKVEKEKHATENK

SEQ ID NO: 42627 - protein, 69 aa, Homo sapiens
  MAP TO AL049833.3; EXPRESSED IN HEART, SIGNAL = 9.3; EST_HUMAN HIT: BF036617.1, EVALUE 1.40e+00
NYVKYTGVMVSVRKEPALGINMHRCNCPKVAGWPGASWCRFSRVGALALVLKMTLFQATLCVASTAPNP

SEQ ID NO: 42628 - protein, 28 aa, Homo sapiens
  MAP TO AL133368.1; EXPRESSED IN HEART, SIGNAL = 2.3; EST_HUMAN HIT: N49812.1, EVALUE 2.40e-01
MAACNLEDSPHQNLTMLAPLVSDSQPPG

SEQ ID NO: 42629 - protein, 26 aa, Homo sapiens
  MAP TO AC016372.2; EXPRESSED IN HEART, SIGNAL =   2
MATLISRTTRTQCEKKNRGEVDLVLE

SEQ ID NO: 42630 - protein, 27 aa, Homo sapiens
  MAP TO AC011501.2; EXPRESSED IN HEART, SIGNAL = 1.7; EST_HUMAN HIT: AW951147.1, EVALUE 1.20e-02; SWISSPROT HIT: Q14943, EVALUE 6.00e-05
DYRCYGSVTHTPYQLSAPVIPWTSWSQ

SEQ ID NO: 42631 - protein, 47 aa, Homo sapiens
  MAP TO AL023553.5; EXPRESSED IN BRAIN, SIGNAL = 4.7; EXPRESSED IN PLACENTA, SIGNAL = 6.2; EXPRESSED IN HELA, SIGNAL = 3.5; EXPRESSED IN HEART, SIGNAL =   9; EXPRESSED IN LUNG, SIGNAL = 3.6; EXPRESSED IN BONE MARROW, SIGNAL = 3.3; EXPRESSED IN FETAL LIVER, SIGNAL = 3.9; EXPRESSED IN ADULT LIVER, SIGNAL = 2.6; SWISSPROT HIT: Q99798, EVALUE 1.00e-20; EST_HUMAN HIT: BE300329.1, EVALUE 1.00e-19
MQDATAQMAMLQFISSGLSKVAVPSTIHCDHLIEAQVGGEKDLRRAK

SEQ ID NO: 42632 - protein, 39 aa, Homo sapiens
  MAP TO AL023553.5; EXPRESSED IN BONE MARROW, SIGNAL = 2.1; EXPRESSED IN HEART, SIGNAL = 9.1; EXPRESSED IN LUNG, SIGNAL = 2.5; EXPRESSED IN FETAL LIVER, SIGNAL = 2.4; EXPRESSED IN ADULT LIVER, SIGNAL =   2; EXPRESSED IN HELA, SIGNAL = 2.1; EXPRESSED IN PLACENTA, SIGNAL = 1.8; EXPRESSED IN BRAIN, SIGNAL = 2.1; SWISSPROT HIT: P06888, EVALUE 2.20e+00; EST_HUMAN HIT: Z41314.1, EVALUE 1.00e-16
RRGPYPVLGLMGLQLGVEAVNGLHLRICLFHLGTWDRQR

SEQ ID NO: 42633 - protein, 44 aa, Homo sapiens
  MAP TO AL023553.5; EXPRESSED IN PLACENTA, SIGNAL = 1.4; EXPRESSED IN HEART, SIGNAL = 5.9; EXPRESSED IN LUNG, SIGNAL = 1.8; EXPRESSED IN FETAL LIVER, SIGNAL = 1.4; EXPRESSED IN ADULT LIVER, SIGNAL = 1.9; EXPRESSED IN BRAIN, SIGNAL = 3.6; EXPRESSED IN HELA, SIGNAL = 2.2; EXPRESSED IN BONE MARROW, SIGNAL = 1.8; EST_HUMAN HIT: BF026635.1, EVALUE 1.00e-19; SWISSPROT HIT: Q99798, EVALUE 8.00e-21
KHGIRWVVIGDENYGEGSSREHAALEPRHLGGRAIITKSFARIH

SEQ ID NO: 42634 - protein, 40 aa, Homo sapiens
  MAP TO AL023553.5; EXPRESSED IN HEART, SIGNAL = 6.5; EXPRESSED IN LUNG, SIGNAL = 2.8; EXPRESSED IN BONE MARROW, SIGNAL = 2.2; EXPRESSED IN ADULT LIVER, SIGNAL = 4.2; EXPRESSED IN FETAL LIVER, SIGNAL = 3.9; EXPRESSED IN BRAIN, SIGNAL =   3; EXPRESSED IN PLACENTA, SIGNAL = 4.7; EXPRESSED IN HELA, SIGNAL = 2.9; EST_HUMAN HIT: AI935305.1, EVALUE 4.00e-17; SWISSPROT HIT: Q99798, EVALUE 3.00e-18
TNLKKQGLLPLTFADPADYNKIHPVDKLTIQGLKDFTPGK

SEQ ID NO: 42635 - protein, 94 aa, Homo sapiens
  MAP TO AC005006.2; EXPRESSED IN HELA, SIGNAL = 3.5; EXPRESSED IN ADULT LIVER, SIGNAL = 3.6; EXPRESSED IN PLACENTA, SIGNAL =   2; EXPRESSED IN BONE MARROW, SIGNAL = 1.7; EXPRESSED IN HEART, SIGNAL = 4.4; EXPRESSED IN LUNG, SIGNAL = 5.3; EXPRESSED IN FETAL LIVER, SIGNAL = 4.1; EXPRESSED IN BRAIN, SIGNAL = 2.6; EST_HUMAN HIT: R94609.1, EVALUE 1.40e-01; SWISSPROT HIT: P13805, EVALUE 2.30e+00
PARAHLRVPQACSRLSIAAWMPSLQPPCPALEEAWEAGSVLGILPLWTSKQRPVSGLAAWCPFYPPLVALGLAFQGARANKDCESLFGLAPWKE

SEQ ID NO: 42636 - protein, 47 aa, Homo sapiens
  MAP TO AP000352.2; EXPRESSED IN ADULT LIVER, SIGNAL = 1.6; EXPRESSED IN FETAL LIVER, SIGNAL =   2; EXPRESSED IN PLACENTA, SIGNAL = 1.9; EXPRESSED IN HEART, SIGNAL = 1.6; EXPRESSED IN BRAIN, SIGNAL = 2.9; EXPRESSED IN HELA, SIGNAL = 2.1; EXPRESSED IN BONE MARROW, SIGNAL = 3.9; EXPRESSED IN LUNG, SIGNAL = 1.6; EST_HUMAN HIT: BE791158.1, EVALUE 2.00e-24; SWISSPROT HIT: P30712, EVALUE 1.00e-25
LIYLSCKYQTPDHWYPSDLQARARVHEYLGWHADCIRGTFGIPLWVQ

SEQ ID NO: 42637 - protein, 37 aa, Homo sapiens
  MAP TO AP000353.1; EXPRESSED IN FETAL LIVER, SIGNAL = 1.9; EXPRESSED IN BRAIN, SIGNAL = 1.7; EXPRESSED IN PLACENTA, SIGNAL = 1.7; EXPRESSED IN HELA, SIGNAL = 1.2; EXPRESSED IN HEART, SIGNAL = 1.6; EXPRESSED IN BONE MARROW, SIGNAL = 2.5; SWISSPROT HIT: P53793, EVALUE 3.70e+00
DVPWYHGTVVGAKEECHELADGSKFWGLVGWEEFLEK

SEQ ID NO: 42638 - protein, 66 aa, Homo sapiens
  MAP TO AC004032.7; EXPRESSED IN HEART, SIGNAL =   3; EXPRESSED IN BONE MARROW, SIGNAL = 4.8; EXPRESSED IN LUNG, SIGNAL = 4.4; EXPRESSED IN FETAL LIVER, SIGNAL = 4.3; EXPRESSED IN ADULT LIVER, SIGNAL = 5.8; EXPRESSED IN PLACENTA, SIGNAL = 4.1; EXPRESSED IN BRAIN, SIGNAL = 3.7; EXPRESSED IN HELA, SIGNAL = 4.7; EST_HUMAN HIT: AU117972.1, EVALUE 2.00e-34; SWISSPROT HIT: Q08168, EVALUE 1.40e+00
LRSLQIPAKAQRRLSRLSKRVPHPSQGWGCPGWTGDGMGEVEEIHAVPSFFPGMPGQEQLSEKGKG

SEQ ID NO: 42639 - protein, 42 aa, Homo sapiens
  MAP TO AC007556.2; EXPRESSED IN BRAIN, SIGNAL = 2.2; EXPRESSED IN HELA, SIGNAL = 1.9; EXPRESSED IN PLACENTA, SIGNAL = 4.1; EXPRESSED IN BONE MARROW, SIGNAL = 1.9; EXPRESSED IN HEART, SIGNAL = 1.6; EXPRESSED IN LUNG, SIGNAL = 1.2; EXPRESSED IN ADULT LIVER, SIGNAL =   3; EXPRESSED IN FETAL LIVER, SIGNAL =   3; EST_HUMAN HIT: AI652733.1, EVALUE 2.80e-01; SWISSPROT HIT: P98164, EVALUE 2.00e-11
RKPTPKPCTEYEYKCGNGHCIPHDNVCDDADDCGDWSDELGC

SEQ ID NO: 42640 - protein, 34 aa, Homo sapiens
  MAP TO AC007556.2; EXPRESSED IN BRAIN, SIGNAL = 2.2; EXPRESSED IN HELA, SIGNAL = 1.9; EXPRESSED IN PLACENTA, SIGNAL = 4.1; EXPRESSED IN BONE MARROW, SIGNAL = 1.9; EXPRESSED IN HEART, SIGNAL = 1.6; EXPRESSED IN LUNG, SIGNAL = 1.2; EXPRESSED IN ADULT LIVER, SIGNAL =   3; EXPRESSED IN FETAL LIVER, SIGNAL =   3
ENRPLNLVQNMNISVAMGIAFHMTMCVMMPMTVV

SEQ ID NO: 42641 - protein, 25 aa, Homo sapiens
  MAP TO AL035681.13; EXPRESSED IN HEART, SIGNAL = 2.8; EXPRESSED IN BONE MARROW, SIGNAL = 6.7; EXPRESSED IN LUNG, SIGNAL = 3.7; EXPRESSED IN FETAL LIVER, SIGNAL = 4.5; EXPRESSED IN ADULT LIVER, SIGNAL = 3.9; EXPRESSED IN HELA, SIGNAL = 5.1; EXPRESSED IN PLACENTA, SIGNAL = 5.5; EXPRESSED IN BRAIN, SIGNAL = 4.5
RRSDMAHHPTFRKIYCDAVPYLFKK

SEQ ID NO: 42642 - protein, 61 aa, Homo sapiens
  MAP TO AP000350.1; EXPRESSED IN LUNG, SIGNAL = 8.6; EXPRESSED IN ADULT LIVER, SIGNAL =  13; EXPRESSED IN FETAL LIVER, SIGNAL = 9.4; EXPRESSED IN PLACENTA, SIGNAL = 7.6; EXPRESSED IN BONE MARROW, SIGNAL =  15; EXPRESSED IN HEART, SIGNAL = 5.6; EXPRESSED IN BRAIN, SIGNAL = 6.7; EXPRESSED IN HELA, SIGNAL = 8.6; SWISSPROT HIT: P30046, EVALUE 7.00e-28; EST_HUMAN HIT: AV655183.1, EVALUE 3.00e-28
RVNVTVRPGLAMALSGSTEPCAQLSISSIGVVGTAEDNRSHSAHFFEFLTKELALGQDRCV

SEQ ID NO: 42643 - protein, 78 aa, Homo sapiens
  MAP TO AL035681.13; EXPRESSED IN HEART, SIGNAL = 2.9; EXPRESSED IN BONE MARROW, SIGNAL = 2.4; EXPRESSED IN LUNG, SIGNAL = 3.3; EXPRESSED IN FETAL LIVER, SIGNAL = 4.8; EXPRESSED IN ADULT LIVER, SIGNAL = 4.2; EXPRESSED IN HELA, SIGNAL = 2.7; EXPRESSED IN PLACENTA, SIGNAL = 4.3; EXPRESSED IN BRAIN, SIGNAL = 2.4; SWISSPROT HIT: Q61079, EVALUE 5.70e+00; EST_HUMAN HIT: AI521311.1, EVALUE 2.70e+00
MAHRAQSVLHRPPLRPPLVASGSFSQRPQGGVQPGAPRDYNSQNALHPGPSALPERFCSRNFVDNRYCWLLGLLGKTQ

SEQ ID NO: 42644 - protein, 45 aa, Homo sapiens
  MAP TO AP000352.2; EXPRESSED IN HEART, SIGNAL = 1.8; EXPRESSED IN BONE MARROW, SIGNAL = 1.8; EXPRESSED IN ADULT LIVER, SIGNAL = 1.5; EXPRESSED IN FETAL LIVER, SIGNAL = 1.8; EST_HUMAN HIT: BF332018.1, EVALUE 1.00e-18; SWISSPROT HIT: Q9Y6J0, EVALUE 1.00e-19
AVSSGDEKEGLKHPGLILKYSTYKNLAQLAAQREDLETAMEFYLE

SEQ ID NO: 42645 - protein, 37 aa, Homo sapiens
  MAP TO AP000041.1; EXPRESSED IN HEART, SIGNAL = 2.4; EXPRESSED IN FETAL LIVER, SIGNAL = 5.3; EXPRESSED IN ADULT LIVER, SIGNAL = 6.6; EXPRESSED IN PLACENTA, SIGNAL = 5.2; EXPRESSED IN HELA, SIGNAL = 4.1; EXPRESSED IN BRAIN, SIGNAL = 5.1; EXPRESSED IN BONE MARROW, SIGNAL = 4.5; EXPRESSED IN LUNG, SIGNAL = 4.9
AIWPERENLAHHAYPIKQKKVPDCMSVIPLNLLGGPT

SEQ ID NO: 42646 - protein, 33 aa, Homo sapiens
  MAP TO AL034406.1; EXPRESSED IN FETAL LIVER, SIGNAL = 4.6; EXPRESSED IN HELA, SIGNAL = 4.2; EXPRESSED IN PLACENTA, SIGNAL = 2.3; EXPRESSED IN BRAIN, SIGNAL = 4.5; EXPRESSED IN BONE MARROW, SIGNAL = 2.9; EXPRESSED IN LUNG, SIGNAL =   2; EXPRESSED IN HEART, SIGNAL = 3.4; EXPRESSED IN ADULT LIVER, SIGNAL = 4.5; EST_HUMAN HIT: H52716.1, EVALUE 8.80e-01; SWISSPROT HIT: P75298, EVALUE 2.90e+00
MTQWKSPTIVFPVGTPNLTTIYTKSTLIRIKNQ

SEQ ID NO: 42647 - protein, 56 aa, Homo sapiens
  MAP TO AC007539.8; EXPRESSED IN LUNG, SIGNAL = 6.5; EXPRESSED IN BONE MARROW, SIGNAL = 5.9; EXPRESSED IN FETAL LIVER, SIGNAL = 7.9; EXPRESSED IN ADULT LIVER, SIGNAL = 9.7; EXPRESSED IN BRAIN, SIGNAL = 3.9; EXPRESSED IN HELA, SIGNAL = 4.6; EXPRESSED IN PLACENTA, SIGNAL = 7.4; EXPRESSED IN HEART, SIGNAL = 3.4; SWISSPROT HIT: P40024, EVALUE 7.00e-01
DLECSALTYVNDKRSSISGDGDNRVGQMTQAGRTAGRQAVSAAACPTCTEREELHR

SEQ ID NO: 42648 - protein, 47 aa, Homo sapiens
  MAP TO AC007032.2; EXPRESSED IN ADULT LIVER, SIGNAL = 3.4; EXPRESSED IN LUNG, SIGNAL = 3.9; EXPRESSED IN HELA, SIGNAL = 1.3; EXPRESSED IN PLACENTA, SIGNAL = 0.7; EXPRESSED IN BT474, SIGNAL = 2.1; EXPRESSED IN BONE MARROW, SIGNAL =   2; EXPRESSED IN HBL100, SIGNAL = 2.5; EXPRESSED IN BRAIN, SIGNAL = 0.69; EXPRESSED IN FETAL LIVER, SIGNAL = 3.5; SWISSPROT HIT: P43490, EVALUE 3.00e-22; EST_HUMAN HIT: BF083063.1, EVALUE 4.00e-21; EST_HUMAN HIT: R61438.1, EVALUE 3.00e-21
IVEGMKQKMWSIENIAFGSGGGLLQKLTRDLLNCSFKCSYVVTNGLG

SEQ ID NO: 42649 - protein, 57 aa, Homo sapiens
  MAP TO AB000882.1; EXPRESSED IN LUNG, SIGNAL = 1.6; EXPRESSED IN BRAIN, SIGNAL = 1.6; EXPRESSED IN HBL100, SIGNAL = 2.6; EXPRESSED IN ADULT LIVER, SIGNAL = 0.81; EXPRESSED IN BONE MARROW, SIGNAL = 1.7; EXPRESSED IN HELA, SIGNAL = 1.3; EST_HUMAN HIT: AW961093.1, EVALUE 8.00e-29; SWISSPROT HIT: P37727, EVALUE 7.70e+00
HAVGPTGPITICTNQGLLAIKNVEKSFYRHSSTPACRKHSAGGRVPSFRTWCILKIK

SEQ ID NO: 42650 - protein, 137 aa, Homo sapiens
  MAP TO AC000353.21; EXPRESSED IN PLACENTA, SIGNAL = 0.62; EXPRESSED IN BT474, SIGNAL =   2; EXPRESSED IN HBL100, SIGNAL = 1.8; EXPRESSED IN FETAL LIVER, SIGNAL =  39; EXPRESSED IN ADULT LIVER, SIGNAL = 0.91; EXPRESSED IN BRAIN, SIGNAL = 1.2; EXPRESSED IN LUNG, SIGNAL = 1.3; EXPRESSED IN HELA, SIGNAL = 2.4; SWISSPROT HIT: Q00587, EVALUE 3.00e-07; EST_HUMAN HIT: BF058866.1, EVALUE 4.00e-76; EST_HUMAN HIT: T75138.1, EVALUE 3.00e-60
TPWNECFLWLRVGEEVWSQQAARSLTARPGGEVTMSTKVPIYLKRGSRKGKKEKLRDLLSSDMISPPLGDFRHTIHIGSGGGSDMFGDISFLQGKFHLLPGTMVEGPEEDGTFDLPFQFTRTATVCGRELPDGPSPL

SEQ ID NO: 42651 - protein, 54 aa, Homo sapiens
  MAP TO AC002470.5; EXPRESSED IN BT474, SIGNAL = 1.2; EXPRESSED IN BONE MARROW, SIGNAL = 2.1; EXPRESSED IN HBL100, SIGNAL = 1.2; EXPRESSED IN FETAL LIVER, SIGNAL = 0.89; EXPRESSED IN HELA, SIGNAL = 0.74; EXPRESSED IN ADULT LIVER, SIGNAL = 1.2; EXPRESSED IN PLACENTA, SIGNAL =   1; EXPRESSED IN LUNG, SIGNAL = 0.66; EXPRESSED IN BRAIN, SIGNAL = 1.2; EST_HUMAN HIT: AW363993.1, EVALUE 4.00e-18; SWISSPROT HIT: Q57824, EVALUE 3.40e+00
AELSELRSTIINLLDPPPEVSALINKLDFAMSTYLLSVYRLEYMRYTCLHHHAH

SEQ ID NO: 42652 - protein, 63 aa, Homo sapiens; identical to SEQ ID NO: 34870
  MAP TO AC002470.5; EXPRESSED IN BRAIN, SIGNAL =   2; EXPRESSED IN HELA, SIGNAL = 0.9; EXPRESSED IN ADULT LIVER, SIGNAL = 0.94; EXPRESSED IN BT474, SIGNAL = 1.4; EXPRESSED IN BONE MARROW, SIGNAL = 0.73; EXPRESSED IN HBL100, SIGNAL = 0.96; EXPRESSED IN LUNG, SIGNAL = 0.85; EXPRESSED IN PLACENTA, SIGNAL = 0.61; EXPRESSED IN FETAL LIVER, SIGNAL = 0.8; EST_HUMAN HIT: BE314516.1, EVALUE 3.00e-19; SWISSPROT HIT: P24733, EVALUE 2.60e+00

SEQ ID NO: 42653 - protein, 65 aa, Homo sapiens
  MAP TO AC006160.9; EXPRESSED IN FETAL LIVER, SIGNAL = 2.1; EXPRESSED IN ADULT LIVER, SIGNAL = 0.88; EXPRESSED IN BRAIN, SIGNAL = 0.87; EXPRESSED IN BONE MARROW, SIGNAL = 2.2; EXPRESSED IN HBL100, SIGNAL = 2.5; EXPRESSED IN HELA, SIGNAL = 1.4; EXPRESSED IN PLACENTA, SIGNAL =   1; EXPRESSED IN BT474, SIGNAL = 2.1; EXPRESSED IN LUNG, SIGNAL = 1.2; SWISSPROT HIT: Q02224, EVALUE 1.10e+00; EST_HUMAN HIT: BF440088.1, EVALUE 2.00e-31; EST_HUMAN HIT: AW803116.1, EVALUE 1.00e-31
DVSELRNELQRKDALVQKHLTKLRHWQQVLEDINVQHKKPADIPQGSLAYLEQASANIPAPLKPT

SEQ ID NO: 42654 - protein, 86 aa, Homo sapiens
  MAP TO AC004832.2; EXPRESSED IN HELA, SIGNAL = 3.5; EXPRESSED IN FETAL LIVER, SIGNAL = 1.8; EXPRESSED IN LUNG, SIGNAL = 0.94; EXPRESSED IN PLACENTA, SIGNAL =   1; EXPRESSED IN BT474, SIGNAL = 2.2; EXPRESSED IN BONE MARROW, SIGNAL = 0.65; EXPRESSED IN ADULT LIVER, SIGNAL = 1.3; EXPRESSED IN BRAIN, SIGNAL = 1.3; EXPRESSED IN HBL100, SIGNAL = 1.9; EST_HUMAN HIT: BE262303.1, EVALUE 1.00e-37; SWISSPROT HIT: Q51956, EVALUE 4.80e-01; EST_HUMAN HIT: BE513907.1, EVALUE 1.00e-38
WIKCLCAHQVPSPEAGRSARVTVAVVDTFVWQALASVAIPGFTINRVCAASLYVLGTATRWPLAVRKWTTTALGLLTIPIIIHPID

SEQ ID NO: 42655 - protein, 53 aa, Homo sapiens
  MAP TO AC007403.2; EXPRESSED IN BRAIN, SIGNAL =   1; EST_HUMAN HIT: AI004091.1, EVALUE 7.00e-26; SWISSPROT HIT: P13963, EVALUE 5.90e+00
YVHAADIKDEVVGQEVLCNLEQLLNGNHKQNEFHPHVKTLLPTELFQDTYLNN

SEQ ID NO: 42656 - protein, 74 aa, Homo sapiens
  MAP TO AC008273.1; EXPRESSED IN HELA, SIGNAL = 3.6; EXPRESSED IN ADULT LIVER, SIGNAL = 1.1; EXPRESSED IN BRAIN, SIGNAL = 1.7; EST_HUMAN HIT: BE219510.1, EVALUE 9.00e-44; SWISSPROT HIT: P46531, EVALUE 9.00e-18
YFGSACEEKVDPCASSPCQNNGTCYVDGVHFTCNCSPGFTGPTCAQLIDFCALSPCAHGTCRSVGTSYKCLCDP

SEQ ID NO: 42657 - protein, 55 aa, Homo sapiens
  MAP TO AC008273.1; EXPRESSED IN HELA, SIGNAL = 3.6; EXPRESSED IN ADULT LIVER, SIGNAL = 1.1; EXPRESSED IN BRAIN, SIGNAL = 1.7; EST_HUMAN HIT: BE219510.1, EVALUE 9.00e-09; EST_HUMAN HIT: BF437865.1, EVALUE 5.00e-09
GYTLPATAARASQGRPVPSLLTSVPSAPVLMARAAAWAPATNASVIQVGTAPTQY

SEQ ID NO: 42658 - protein, 161 aa, Homo sapiens
  MAP TO AF118808.1; EXPRESSED IN ADULT LIVER, SIGNAL = 1.3; EXPRESSED IN BRAIN, SIGNAL = 0.81; EXPRESSED IN PLACENTA, SIGNAL = 0.79; EXPRESSED IN BONE MARROW, SIGNAL = 0.85; EXPRESSED IN HBL100, SIGNAL = 2.1; EXPRESSED IN LUNG, SIGNAL = 0.59; EXPRESSED IN HELA, SIGNAL = 0.69; EXPRESSED IN BT474, SIGNAL = 2.9; EXPRESSED IN FETAL LIVER, SIGNAL = 0.77; SWISSPROT HIT: P52742, EVALUE 3.00e-65; EST_HUMAN HIT: AW996149.1, EVALUE 1.00e-64; EST_HUMAN HIT: AU141046.1, EVALUE 2.00e-69
PYKCKECGKAFNRQSNLIQHQRIHSGEKPYDCKECGKAFSTQLFLIQHQRIHTGEKPYECNECAKSFSLNRTLTVHQRIHTGEKPYRCNECGKSFSQCSQVIQHKRIHTGEKPYICNECGKSFGARLSLIQHQRIHTGEKPYGCSVCGKTFSQKGHLIQHQ

SEQ ID NO: 42659 - protein, 76 aa, Homo sapiens
  MAP TO AF118808.1; EXPRESSED IN ADULT LIVER, SIGNAL = 1.3; EXPRESSED IN BRAIN, SIGNAL = 0.81; EXPRESSED IN PLACENTA, SIGNAL = 0.79; EXPRESSED IN BONE MARROW, SIGNAL = 0.85; EXPRESSED IN HBL100, SIGNAL = 2.1; EXPRESSED IN LUNG, SIGNAL = 0.59; EXPRESSED IN HELA, SIGNAL = 0.69; EXPRESSED IN BT474, SIGNAL = 2.9; EXPRESSED IN FETAL LIVER, SIGNAL = 0.77; SWISSPROT HIT: P17098, EVALUE 4.00e-03; EST_HUMAN HIT: BE162832.1, EVALUE 6.00e-36; EST_HUMAN HIT: BE162832.1, EVALUE 6.00e-36
LVLVYPLSSIREFTLERNLMVVVCVGKPLVKRDILFSISEFTQERNPMNVVSVEKLSARVLILFTIKEHTMVRSPM

SEQ ID NO: 42660 - protein, 26 aa, Homo sapiens
  MAP TO AL034553.12; EXPRESSED IN LUNG, SIGNAL =   1; EXPRESSED IN HELA, SIGNAL = 2.9; EXPRESSED IN BRAIN, SIGNAL = 0.92; EXPRESSED IN PLACENTA, SIGNAL = 0.77; EXPRESSED IN HBL100, SIGNAL =   3; EXPRESSED IN FETAL LIVER, SIGNAL = 1.4; EXPRESSED IN ADULT LIVER, SIGNAL =   1; EXPRESSED IN BT474, SIGNAL = 4.2; EXPRESSED IN BONE MARROW, SIGNAL = 1.3; EST_HUMAN HIT: BE081109.1, EVALUE 1.00e-07
MLSIKMALLPYIMQLPKTGMRLLSCY

SEQ ID NO: 42661 - protein, 159 aa, Homo sapiens
  MAP TO AL096772.5; EXPRESSED IN LUNG, SIGNAL = 4.5; EXPRESSED IN PLACENTA, SIGNAL = 1.2; EXPRESSED IN ADULT LIVER, SIGNAL = 0.93; EXPRESSED IN BRAIN, SIGNAL = 1.2; EXPRESSED IN FETAL LIVER, SIGNAL = 0.97; SWISSPROT HIT: Q61549, EVALUE 5.00e-04; EST_HUMAN HIT: AV725650.1, EVALUE 4.00e-59; EST_HUMAN HIT: T53270.1, EVALUE 1.00e-17
VFFWMLTLGLMLFYRLVFILHETSRSTQKAIAFCLGYGCPLAISVITLGATQPREVYTRKNVCWLNWEDTKALLAFAIPALIIVVVNITITIVVITKILRPSIGDKPCKQEKSSLFQISKSIGVLTPLLGLTWGFGLTTVFPGTNLVFHIIFAILNVFQ

SEQ ID NO: 42662 - protein, 20 aa, Homo sapiens
  MAP TO AL096772.5; EXPRESSED IN LUNG, SIGNAL = 4.5; EXPRESSED IN PLACENTA, SIGNAL = 1.2; EXPRESSED IN ADULT LIVER, SIGNAL = 0.93; EXPRESSED IN BRAIN, SIGNAL = 1.2; EXPRESSED IN FETAL LIVER, SIGNAL = 0.97; EST_HUMAN HIT: W21055.1, EVALUE 1.00e-05; EST_HUMAN HIT: W03697.1, EVALUE 1.00e-05
VLSWEYSWILFLMLGWAFPS

SEQ ID NO: 42663 - protein, 52 aa, Homo sapiens; identical to SEQ ID NO: 37840
  MAP TO AP000110.1; EXPRESSED IN BT474, SIGNAL = 0.64; EXPRESSED IN LUNG, SIGNAL = 0.93; EXPRESSED IN FETAL LIVER, SIGNAL = 1.1; EXPRESSED IN ADULT LIVER, SIGNAL = 0.75; EXPRESSED IN BRAIN, SIGNAL = 2.2; EXPRESSED IN PLACENTA, SIGNAL = 0.77; EXPRESSED IN HELA, SIGNAL = 1.2; EST_HUMAN HIT: BE145141.1, EVALUE 1.90e+00; EST_HUMAN HIT: BE841807.1, EVALUE 2.90e+00; SWISSPROT HIT: P49147, EVALUE 2.00e+00

SEQ ID NO: 42664 - protein, 39 aa, Homo sapiens
  MAP TO AP000246.1; EXPRESSED IN FETAL LIVER, SIGNAL = 0.61; EXPRESSED IN LUNG, SIGNAL = 0.7; EXPRESSED IN ADULT LIVER, SIGNAL = 0.67; EXPRESSED IN BRAIN, SIGNAL = 1.7; EXPRESSED IN PLACENTA, SIGNAL = 0.7; EXPRESSED IN HBL100, SIGNAL = 0.86; EXPRESSED IN BT474, SIGNAL = 0.65; EXPRESSED IN HELA, SIGNAL = 0.7; EST_HUMAN HIT: AA233606.1, EVALUE 3.00e-15; SWISSPROT HIT: Q60610, EVALUE 3.00e-16
AIKTMNKVASHINEMQKIHEEFGAVFDQLIAEQTGEKKE

SEQ ID NO: 42665 - protein, 155 aa, Homo sapiens; identical to SEQ ID NO: 34129
  MAP TO AP000207.1; EXPRESSED IN FETAL LIVER, SIGNAL = 0.83; EXPRESSED IN HELA, SIGNAL = 0.69; EXPRESSED IN ADULT LIVER, SIGNAL = 0.73; EXPRESSED IN PLACENTA, SIGNAL = 0.66; EXPRESSED IN BRAIN, SIGNAL = 1.9; EXPRESSED IN LUNG, SIGNAL = 0.95; EXPRESSED IN HBL100, SIGNAL = 1.2; EXPRESSED IN BONE MARROW, SIGNAL = 0.63; EXPRESSED IN BT474, SIGNAL =   1; SWISSPROT HIT: Q13009, EVALUE 2.00e-77; EST_HUMAN HIT: BE711811.1, EVALUE 8.00e-53; EST_HUMAN HIT: AW450445.1, EVALUE 2.00e-25

SEQ ID NO: 42666 - protein, 34 aa, Homo sapiens
  MAP TO AP000057.1; EXPRESSED IN FETAL LIVER, SIGNAL = 0.9; EXPRESSED IN LUNG, SIGNAL = 1.3; EXPRESSED IN PLACENTA, SIGNAL = 0.89; EXPRESSED IN BONE MARROW, SIGNAL = 3.1; EXPRESSED IN HBL100, SIGNAL = 1.7; EXPRESSED IN ADULT LIVER, SIGNAL = 0.67; EXPRESSED IN BRAIN, SIGNAL = 0.68; EXPRESSED IN BT474, SIGNAL = 1.6; EXPRESSED IN HELA, SIGNAL = 0.74; EST_HUMAN HIT: R73338.1, EVALUE 4.00e-13; SWISSPROT HIT: Q01196, EVALUE 4.00e-14
KSFTLTITVFTNPPQVATYHRAIKITVDGPREPR

SEQ ID NO: 42667 - protein, 26 aa, Homo sapiens
  MAP TO AP000057.1; EXPRESSED IN FETAL LIVER, SIGNAL = 0.9; EXPRESSED IN LUNG, SIGNAL = 1.3; EXPRESSED IN PLACENTA, SIGNAL = 0.89; EXPRESSED IN BONE MARROW, SIGNAL = 3.1; EXPRESSED IN HBL100, SIGNAL = 1.7; EXPRESSED IN ADULT LIVER, SIGNAL = 0.67; EXPRESSED IN BRAIN, SIGNAL = 0.68; EXPRESSED IN BT474, SIGNAL = 1.6; EXPRESSED IN HELA, SIGNAL = 0.74; EST_HUMAN HIT: R73338.1, EVALUE 3.00e-10
EKLHSDHHCLHKPTASRHLPQSHQNH

SEQ ID NO: 42668 - protein, 57 aa, Homo sapiens
  MAP TO AP000047.1; EXPRESSED IN HBL100, SIGNAL = 1.7; EXPRESSED IN FETAL LIVER, SIGNAL = 1.1; EXPRESSED IN ADULT LIVER, SIGNAL =   1; EXPRESSED IN PLACENTA, SIGNAL = 0.77; EXPRESSED IN BT474, SIGNAL =   1; EXPRESSED IN BRAIN, SIGNAL = 6.8; EXPRESSED IN HELA, SIGNAL = 1.7; EXPRESSED IN LUNG, SIGNAL = 0.69; EXPRESSED IN BONE MARROW, SIGNAL = 0.67; EST_HUMAN HIT: R91790.1, EVALUE 3.00e-27; SWISSPROT HIT: Q29043, EVALUE 7.70e+00
PSSKSTELPVDWSIKTRLLFTSSQPFTWADHLKAQEEAQGLVQHCRATEVTLPKSIQ

SEQ ID NO: 42669 - protein, 27 aa, Homo sapiens
  MAP TO AP000047.1; EXPRESSED IN HBL100, SIGNAL = 1.7; EXPRESSED IN FETAL LIVER, SIGNAL = 1.1; EXPRESSED IN ADULT LIVER, SIGNAL =   1; EXPRESSED IN PLACENTA, SIGNAL = 0.77; EXPRESSED IN BT474, SIGNAL =   1; EXPRESSED IN BRAIN, SIGNAL = 6.8; EXPRESSED IN HELA, SIGNAL = 1.7; EXPRESSED IN LUNG, SIGNAL = 0.69; EXPRESSED IN BONE MARROW, SIGNAL = 0.67; EST_HUMAN HIT: AW268419.1, EVALUE 6.00e-10; EST_HUMAN HIT: BE887063.1, EVALUE 9.00e-10
LCFQMICPGKGLRRGEKESRFNTPVHR

SEQ ID NO: 42670 - protein, 83 aa, Homo sapiens; identical to SEQ ID NO: 33615
  MAP TO AP000046.1; EXPRESSED IN ADULT LIVER, SIGNAL = 0.85; EXPRESSED IN BONE MARROW, SIGNAL = 2.2; EXPRESSED IN BRAIN, SIGNAL = 1.3; EXPRESSED IN PLACENTA, SIGNAL = 1.4; EXPRESSED IN BT474, SIGNAL = 1.2; EXPRESSED IN FETAL LIVER, SIGNAL = 1.8; EXPRESSED IN LUNG, SIGNAL = 1.1; EXPRESSED IN HELA, SIGNAL = 1.2; EXPRESSED IN HBL100, SIGNAL = 2.6; EST_HUMAN HIT: AU131027.1, EVALUE 1.00e-42; EST_HUMAN HIT: AI363299.1, EVALUE 3.00e-31; SWISSPROT HIT: P22102, EVALUE 1.00e-43

SEQ ID NO: 42671 - protein, 19 aa, Homo sapiens
  MAP TO AL049575.7; EXPRESSED IN FETAL LIVER, SIGNAL = 0.57; EXPRESSED IN PLACENTA, SIGNAL = 0.72; EXPRESSED IN BT474, SIGNAL = 0.64; EXPRESSED IN BONE MARROW, SIGNAL = 0.84; EXPRESSED IN LUNG, SIGNAL = 0.77; EXPRESSED IN HELA, SIGNAL = 0.66; EXPRESSED IN ADULT LIVER, SIGNAL = 0.76; EXPRESSED IN BRAIN, SIGNAL = 1.9
MVPPTSDRSQESSAVLNGE

SEQ ID NO: 42672 - protein, 102 aa, Homo sapiens
  MAP TO AL031280.6; EXPRESSED IN PLACENTA, SIGNAL = 1.9; EXPRESSED IN LUNG, SIGNAL = 0.72; EXPRESSED IN BRAIN, SIGNAL = 1.2; EXPRESSED IN FETAL LIVER, SIGNAL = 0.7; EXPRESSED IN BONE MARROW, SIGNAL = 0.75; EXPRESSED IN ADULT LIVER, SIGNAL = 0.67; EST_HUMAN HIT: AA299780.1, EVALUE 1.60e-01; SWISSPROT HIT: Q45477, EVALUE 2.40e+00
GETEVITDEVNNLPGVTQASCLPLSPVLFLLYVMSSHNEVGVGNKEMEGCVGCFCVTTLHPHHSQVRWCHTHFIDEETDPGKLSDLPSISIPNGKAKFIRRF

SEQ ID NO: 42673 - protein, 122 aa, Homo sapiens
  MAP TO AC008266.1; EXPRESSED IN PLACENTA, SIGNAL = 0.63; EXPRESSED IN HELA, SIGNAL = 1.4; EXPRESSED IN BT474, SIGNAL = 2.9; EXPRESSED IN BONE MARROW, SIGNAL = 1.2; EXPRESSED IN HBL100, SIGNAL = 2.7; EXPRESSED IN FETAL LIVER, SIGNAL = 0.96; EXPRESSED IN BRAIN, SIGNAL = 0.97; EST_HUMAN HIT: AI133015.1, EVALUE 1.00e-16; SWISSPROT HIT: P79108, EVALUE 1.50e+00; EST_HUMAN HIT: BE885510.1, EVALUE 6.00e-36
LFSPMPSEEKAASPPKPLLSNASATPVGRRGRLANLAATICSWEDDVNHSFAKQNSVQEQPGTACLSKFSSASGASARINSSSVKQEATFCSQRDGDASLNKALSSSADDASLVNASISSSV

SEQ ID NO: 42674 - protein, 47 aa, Homo sapiens [sequence omitted]

SEQ ID NO: 42675 - protein, 51 aa, Homo sapiens
  MAP TO AC007790.1; EXPRESSED IN BONE MARROW, SIGNAL = 0.75; EXPRESSED IN BT474, SIGNAL = 1.1; EXPRESSED IN FETAL LIVER, SIGNAL = 0.73; EXPRESSED IN LUNG, SIGNAL = 0.72; EXPRESSED IN HELA, SIGNAL = 1.9; EXPRESSED IN BRAIN, SIGNAL = 0.74; EXPRESSED IN HBL100, SIGNAL = 1.4; EST_HUMAN HIT: AW900048.1, EVALUE 3.00e-04
KKVFREKNKVFMPTDAASVTAPQISFSFTMALTLNSFILIWQETTAADLNV

SEQ ID NO: 42676 - protein, 82 aa, Homo sapiens
  MAP TO AC007677.2; EXPRESSED IN PLACENTA, SIGNAL = 0.95; EXPRESSED IN BRAIN, SIGNAL = 0.98; EXPRESSED IN HBL100, SIGNAL = 1.1; EXPRESSED IN FETAL LIVER, SIGNAL = 1.6; EXPRESSED IN BONE MARROW, SIGNAL = 0.77; EXPRESSED IN LUNG, SIGNAL = 0.7; EXPRESSED IN ADULT LIVER, SIGNAL = 3.7; EST_HUMAN HIT: BE047905.1, EVALUE 2.00e-44; SWISSPROT HIT: P31040, EVALUE 1.90e-01
VTYLGKVSTTGMQFLSGCTEKPVIELWKKHTLAREDVFPANALLEIRPFQVWLHHLDHKGEATVHMDTFQVARIAYCTADHN

SEQ ID NO: 42677 - protein, 23 aa, Homo sapiens
  MAP TO AC007677.2; EXPRESSED IN PLACENTA, SIGNAL = 0.95; EXPRESSED IN BRAIN, SIGNAL = 0.98; EXPRESSED IN HBL100, SIGNAL = 1.1; EXPRESSED IN FETAL LIVER, SIGNAL = 1.6; EXPRESSED IN BONE MARROW, SIGNAL = 0.77; EXPRESSED IN LUNG, SIGNAL = 0.7; EXPRESSED IN ADULT LIVER, SIGNAL = 3.7; EST_HUMAN HIT: BE047905.1, EVALUE 8.00e-06
PLACSFCQAAQKSQSLSSGRSTR

SEQ ID NO: 42678 - protein, 76 aa, Homo sapiens
  MAP TO AC007567.1; EXPRESSED IN FETAL LIVER, SIGNAL = 2.6; EXPRESSED IN BONE MARROW, SIGNAL = 1.6; EXPRESSED IN BRAIN, SIGNAL = 2.6; EXPRESSED IN ADULT LIVER, SIGNAL = 0.7; EXPRESSED IN BT474, SIGNAL =   2; EXPRESSED IN PLACENTA, SIGNAL = 0.86; EXPRESSED IN HELA, SIGNAL = 1.4; EXPRESSED IN LUNG, SIGNAL = 2.3; EST_HUMAN HIT: AL134791.1, EVALUE 4.00e-28; SWISSPROT HIT: P35331, EVALUE 2.00e-19
PTPIIYWAKEDGMLPKNRTVYKNFEKTLQIIHVSEADSGNYQCIAKNALGAIHHTISVRVKGILFKIHSSCLHERP

SEQ ID NO: 42679 - protein, 21 aa, Homo sapiens
  MAP TO AC007567.1; EXPRESSED IN FETAL LIVER, SIGNAL = 2.6; EXPRESSED IN BONE MARROW, SIGNAL = 1.6; EXPRESSED IN BRAIN, SIGNAL = 2.6; EXPRESSED IN ADULT LIVER, SIGNAL = 0.7; EXPRESSED IN BT474, SIGNAL =   2; EXPRESSED IN PLACENTA, SIGNAL = 0.86; EXPRESSED IN HELA, SIGNAL = 1.4; EXPRESSED IN LUNG, SIGNAL = 2.3; EST_HUMAN HIT: AL134791.1, EVALUE 1.00e-03
AYPNYLLGKGRWNATQKQDSL

SEQ ID NO: 42680 - protein, 56 aa, Homo sapiens
  MAP TO AC007040.2; EXPRESSED IN BONE MARROW, SIGNAL = 1.2; EXPRESSED IN PLACENTA, SIGNAL = 0.64; EXPRESSED IN BT474, SIGNAL = 1.4; EXPRESSED IN LUNG, SIGNAL =   1; EXPRESSED IN HELA, SIGNAL = 0.66; EXPRESSED IN BRAIN, SIGNAL =   2; EXPRESSED IN FETAL LIVER, SIGNAL = 1.3; SWISSPROT HIT: P78067, EVALUE 5.90e+00; EST_HUMAN HIT: AI521435.1, EVALUE 9.00e-24
LICSKLLSRPTTTPGLIGTSCSCSSLTAKKGGESSKQQLSGWRNMHQLITKTPKSM

SEQ ID NO: 42681 - protein, 25 aa, Homo sapiens
  MAP TO AC006970.2; EXPRESSED IN BRAIN, SIGNAL =   1; EXPRESSED IN BT474, SIGNAL = 1.9; EXPRESSED IN HBL100, SIGNAL = 2.2; EXPRESSED IN FETAL LIVER, SIGNAL = 1.2; EXPRESSED IN LUNG, SIGNAL = 1.2; EXPRESSED IN HELA, SIGNAL = 1.1; EXPRESSED IN ADULT LIVER, SIGNAL = 1.7; EXPRESSED IN PLACENTA, SIGNAL = 0.95; EXPRESSED IN BONE MARROW, SIGNAL = 1.3; EST_HUMAN HIT: AA456946.1, EVALUE 2.00e-06
KCGVWFVPCWNFFTLIMRRKESIVK

SEQ ID NO: 42682 - protein, 131 aa, Homo sapiens
  MAP TO AC004890.2; EXPRESSED IN PLACENTA, SIGNAL = 1.5; EXPRESSED IN HBL100, SIGNAL = 2.2; EXPRESSED IN LUNG, SIGNAL = 0.99; EXPRESSED IN HELA, SIGNAL = 1.4; EXPRESSED IN ADULT LIVER, SIGNAL = 1.9; EXPRESSED IN BT474, SIGNAL = 2.3; EXPRESSED IN BONE MARROW, SIGNAL = 2.3; EXPRESSED IN FETAL LIVER, SIGNAL = 1.3; EXPRESSED IN BRAIN, SIGNAL = 0.85; EST_HUMAN HIT: AU119822.1, EVALUE 3.00e-32; EST_HUMAN HIT: AW977845.1, EVALUE 4.00e-29; SWISSPROT HIT: Q42498, EVALUE 2.60e+00
ECLTSLQPLPLPTPPAANEAHLQTAAISLWTVVAAVQAIERKVEIHSRRLLHLEGRTGTAEKKLASCEKTVTELGNQLEGKWAVLGTLLQEYGLLQRRLENLENLLRNRNFWILRLPPGIKGDIPKVIPSF

SEQ ID NO: 42683 - protein, 47 aa, Homo sapiens
  MAP TO Z98884.11; EXPRESSED IN PLACENTA, SIGNAL = 0.86; EXPRESSED IN BRAIN, SIGNAL = 1.8; EST_HUMAN HIT: AV752157.1, EVALUE 4.60e-01; EST_HUMAN HIT: AW965361.1, EVALUE 3.50e+00; SWISSPROT HIT: P80945, EVALUE 7.90e+00
QLGQNPRIHCPASEEPSTESWMAQWHSEAISSPEIPKGVTVIASTNP

SEQ ID NO: 42684 - protein, 77 aa, Homo sapiens
  MAP TO AL049569.13; EXPRESSED IN BONE MARROW, SIGNAL = 2.7; EXPRESSED IN BT474, SIGNAL =   2; EXPRESSED IN BRAIN, SIGNAL =   3; EST_HUMAN HIT: AI823622.1, EVALUE 4.00e-43; SWISSPROT HIT: Q9Y2J8, EVALUE 5.00e-44
VNMIVLDKDLGIPKPFGPQVEEECCLEMHVRGLLEPLGLECTFIDDISAYHKFLGEVHCGTNVRRKPFTFKWWHMVP

SEQ ID NO: 42685 - protein, 74 aa, Homo sapiens
  MAP TO AL049569.13; EXPRESSED IN BONE MARROW, SIGNAL = 2.7; EXPRESSED IN BT474, SIGNAL =   2; EXPRESSED IN BRAIN, SIGNAL =   3; EST_HUMAN HIT: AI823622.1, EVALUE 2.00e-19
HSGHRLRRNAAWRCTCVASWSPWASNAPSSTTFLPTTNFWGKSTVAPTSAGSPSPSSGGTWCPDLPGALAFASF

SEQ ID NO: 42686 - protein, 59 aa, Homo sapiens
  MAP TO AL049569.13; EXPRESSED IN BT474, SIGNAL = 1.3; EXPRESSED IN BONE MARROW, SIGNAL = 1.9; EXPRESSED IN BRAIN, SIGNAL =   1; SWISSPROT HIT: Q9Y2J8, EVALUE 7.00e-30; EST_HUMAN HIT: BE089551.1, EVALUE 6.00e-29
PFFGQRYIHILGRRKLYHVVKYTGGSAELLFFVEGLCFPDEGFSGLVSIHVSLLEYMAQ

SEQ ID NO: 42687 - protein, 46 aa, Homo sapiens
  MAP TO AL049569.13; EXPRESSED IN BT474, SIGNAL = 1.3; EXPRESSED IN BONE MARROW, SIGNAL = 1.9; EXPRESSED IN BRAIN, SIGNAL =   1; EST_HUMAN HIT: BE089551.1, EVALUE 5.00e-22; SWISSPROT HIT: P49606, EVALUE 5.30e-01
GSSTMWSSTRVAPRSCCSSWKASVSPTRASQAWSPSMSACWSTWPR

SEQ ID NO: 42688 - protein, 30 aa, Homo sapiens
  MAP TO AC009225.1; EXPRESSED IN LUNG, SIGNAL = 1.1; EXPRESSED IN BRAIN, SIGNAL = 0.86; EXPRESSED IN BONE MARROW, SIGNAL = 4.1
GMFEDDTFVYMIEPLELVHDEVSLCHQLPD

SEQ ID NO: 42689 - protein, 50 aa, Homo sapiens
  MAP TO AC007664.7; EXPRESSED IN HBL100, SIGNAL = 1.7; EXPRESSED IN LUNG, SIGNAL = 1.3; EXPRESSED IN HELA, SIGNAL = 1.2; EXPRESSED IN ADULT LIVER, SIGNAL = 1.6; EXPRESSED IN PLACENTA, SIGNAL = 1.3; EXPRESSED IN BT474, SIGNAL = 1.7; EXPRESSED IN BONE MARROW, SIGNAL = 1.9; EXPRESSED IN FETAL LIVER, SIGNAL = 1.6; EXPRESSED IN BRAIN, SIGNAL = 1.1; EST_HUMAN HIT: AL043314.2, EVALUE 2.00e-22; SWISSPROT HIT: P11274, EVALUE 1.00e-22
EAVNKMSLHNLGTVFGPTLLRPSEKESKLPANPSQPITMTDSWSLEVMSQ

SEQ ID NO: 42690 - protein, 236 aa, Homo sapiens
  MAP TO AC007655.1; EXPRESSED IN PLACENTA, SIGNAL = 0.71; EXPRESSED IN FETAL LIVER, SIGNAL = 1.9; EXPRESSED IN ADULT LIVER, SIGNAL = 1.7; EXPRESSED IN BRAIN, SIGNAL = 0.87; EXPRESSED IN BT474, SIGNAL = 0.7; EXPRESSED IN BONE MARROW, SIGNAL = 0.76; EXPRESSED IN HBL100, SIGNAL = 0.66; EXPRESSED IN LUNG, SIGNAL = 0.76; EXPRESSED IN HELA, SIGNAL = 0.63; EST_HUMAN HIT: W04281.1, EVALUE 1.00e-73; SWISSPROT HIT: Q93070, EVALUE 0.00e+00
VAIKIDFDFAPGSFDDQYQGCSKQVMEKLTQGDYFTKDIEAQKNYFRMWQKAHLAWLNQGKVLPQNMTTTHAVAILFYTLNSNVHSDFTRAMASVARTPQQYERSFHFKYLHYYLTSAIQLLRKDSIMENGTLCYEVHYRTKDVHFNAYTGATIRFGQFLSTSLLKEEAQEFGNQTLFTIFTCLGAPVQYFSLKKEVLIPPYELFKVINMSYHPRGDWLQLRSTGNLSTYNCQLLK

SEQ ID NO: 42691 - protein, 28 aa, Homo sapiens
  MAP TO AC007655.1; EXPRESSED IN PLACENTA, SIGNAL = 0.71; EXPRESSED IN FETAL LIVER, SIGNAL = 1.9; EXPRESSED IN ADULT LIVER, SIGNAL = 1.7; EXPRESSED IN BRAIN, SIGNAL = 0.87; EXPRESSED IN BT474, SIGNAL = 0.7; EXPRESSED IN BONE MARROW, SIGNAL = 0.76; EXPRESSED IN HBL100, SIGNAL = 0.66; EXPRESSED IN LUNG, SIGNAL = 0.76; EXPRESSED IN HELA, SIGNAL = 0.63; EST_HUMAN HIT: AA905180.1, EVALUE 5.00e-03
LQLKSTSTSHQVLLMISTKAVANRLWRN

SEQ ID NO: 42692 - protein, 84 aa, Homo sapiens
  MAP TO AC007554.1; EXPRESSED IN PLACENTA, SIGNAL = 1.2; EXPRESSED IN BT474, SIGNAL = 1.1; EXPRESSED IN BONE MARROW, SIGNAL = 3.2; EXPRESSED IN HBL100, SIGNAL = 0.86; EXPRESSED IN FETAL LIVER, SIGNAL = 0.7; EXPRESSED IN LUNG, SIGNAL = 0.88; EXPRESSED IN BRAIN, SIGNAL = 0.71; SWISSPROT HIT: P13611, EVALUE 1.00e-37; EST_HUMAN HIT: AU140801.1, EVALUE 9.00e-37
FPLEEDFSGDFREYSTVSHPIAKEETVMMEGSGDAAFRDTQTSPSTVPTSVHISHISDSEGPSSTMVSTSAFPWEEFTSSAEGS

SEQ ID NO: 42693 - protein, 42 aa, Homo sapiens
  MAP TO AC007554.1; EXPRESSED IN PLACENTA, SIGNAL = 1.2; EXPRESSED IN BT474, SIGNAL = 1.1; EXPRESSED IN BONE MARROW, SIGNAL = 3.2; EXPRESSED IN HBL100, SIGNAL = 0.86; EXPRESSED IN FETAL LIVER, SIGNAL = 0.7; EXPRESSED IN LUNG, SIGNAL = 0.88; EXPRESSED IN BRAIN, SIGNAL = 0.71; SWISSPROT HIT: P13611, EVALUE 3.00e-17; EST_HUMAN HIT: AU140801.1, EVALUE 4.00e-16
SSIIDEGLGEVGTVNEIDRRSTILPTAEVEGTKAPVEKEEVK

SEQ ID NO: 42694 - protein, 57 aa, Homo sapiens
  MAP TO AC007405.2; EXPRESSED IN PLACENTA, SIGNAL = 0.6; EXPRESSED IN LUNG, SIGNAL = 0.68; EXPRESSED IN ADULT LIVER, SIGNAL = 0.86; EXPRESSED IN BRAIN, SIGNAL = 2.9; EST_HUMAN HIT: M85674.1, EVALUE 1.00e-25; SWISSPROT HIT: P48319, EVALUE 8.00e-27
VAPKIKALMMESGTTMVGYQPQGDKANFFRMVISNPAATQSDIDFLIEEIERLGQDL

SEQ ID NO: 42695 - protein, 82 aa, Homo sapiens
  MAP TO AC007404.2; EXPRESSED IN FETAL LIVER, SIGNAL = 1.2; EXPRESSED IN ADULT LIVER, SIGNAL = 0.79; EXPRESSED IN BONE MARROW, SIGNAL =   6; EXPRESSED IN LUNG, SIGNAL = 1.6; EXPRESSED IN HELA, SIGNAL = 0.7; EXPRESSED IN BRAIN, SIGNAL = 0.69; EXPRESSED IN PLACENTA, SIGNAL = 0.64; EXPRESSED IN BT474, SIGNAL = 0.97; SWISSPROT HIT: P55183, EVALUE 1.20e+00; EST_HUMAN HIT: BE938008.1, EVALUE 2.00e-26
LSDVSPFAPGVSSRTDIHCRHQGVNITETGLEGLLFGMLDRETDRKLCSDIHDTLGHMLSSLAVEKLSHWLMLCKDVLAASS

SEQ ID NO: 42696 - protein, 89 aa, Homo sapiens
  MAP TO AC007245.3; EXPRESSED IN BRAIN, SIGNAL = 4.5; SWISSPROT HIT: P49418, EVALUE 7.00e-47; EST_HUMAN HIT: F13083.1, EVALUE 5.00e-44
EKVIPSVVIEPASNHEEEGENEITIGAEPKETTEDAAPPGPTSETPELATEQKPIQDPQPTPSAPAMGAADQLASAREASQELPPGFLY

SEQ ID NO: 42697 - protein, 46 aa, Homo sapiens
  MAP TO AC007224.2; EXPRESSED IN PLACENTA, SIGNAL =   4; EXPRESSED IN LUNG, SIGNAL = 1.7; EXPRESSED IN HELA, SIGNAL = 0.73; EXPRESSED IN ADULT LIVER, SIGNAL = 3.8; EXPRESSED IN BRAIN, SIGNAL = 0.72; EXPRESSED IN BT474, SIGNAL = 1.5; EXPRESSED IN BONE MARROW, SIGNAL = 0.71; EXPRESSED IN HBL100, SIGNAL = 1.1; EXPRESSED IN FETAL LIVER, SIGNAL = 1.3; EST_HUMAN HIT: AA443456.1, EVALUE 2.00e-19; SWISSPROT HIT: P80404, EVALUE 2.00e-20
VEDLIVKYRKKKKTVAGIIVEPIQSEGGDNHASDDFFRKLRDIARK

SEQ ID NO: 42698 - protein, 23 aa, Homo sapiens
  MAP TO AC007224.2; EXPRESSED IN PLACENTA, SIGNAL =   4; EXPRESSED IN LUNG, SIGNAL = 1.7; EXPRESSED IN HELA, SIGNAL = 0.73; EXPRESSED IN ADULT LIVER, SIGNAL = 3.8; EXPRESSED IN BRAIN, SIGNAL = 0.72; EXPRESSED IN BT474, SIGNAL = 1.5; EXPRESSED IN BONE MARROW, SIGNAL = 0.71; EXPRESSED IN HBL100, SIGNAL = 1.1; EXPRESSED IN FETAL LIVER, SIGNAL = 1.3; EST_HUMAN HIT: AA443456.1, EVALUE 6.00e-08
EEDGGRDHRGAHPVRGWRQPRIR

SEQ ID NO: 42699 - protein, 62 aa, Homo sapiens
  MAP TO AC005064.2; EXPRESSED IN FETAL LIVER, SIGNAL = 1.9; EXPRESSED IN BRAIN, SIGNAL = 0.99; EXPRESSED IN ADULT LIVER, SIGNAL = 1.9; EST_HUMAN HIT: R55918.1, EVALUE 7.00e-31; SWISSPROT HIT: Q46654, EVALUE 5.80e+00
HDYILLPEDALTNTTRLRWWQPFVISNGIVVSGVERAQWALDNILIGGAEINPSQLVDTFDD

SEQ ID NO: 42700 - protein, 172 aa, Homo sapiens [sequence omitted]

SEQ ID NO: 42701 - protein, 49 aa, Homo sapiens
  MAP TO AC007098.2; EXPRESSED IN BT474, SIGNAL = 1.1; EXPRESSED IN FETAL LIVER, SIGNAL = 0.95; EXPRESSED IN ADULT LIVER, SIGNAL = 2.5; EXPRESSED IN HELA, SIGNAL = 1.1; EXPRESSED IN PLACENTA, SIGNAL =   1; EXPRESSED IN HBL100, SIGNAL = 2.4; EXPRESSED IN BONE MARROW, SIGNAL = 0.93; EXPRESSED IN LUNG, SIGNAL =   1; EXPRESSED IN BRAIN, SIGNAL = 1.8; EST_HUMAN HIT: BE773299.1, EVALUE 1.00e-10
QQDEERRRQLRERARQLIAEARSGVKMSELPSYGEMAAEKLKERSKASG

SEQ ID NO: 42702 - protein, 28 aa, Homo sapiens
  MAP TO AC007375.4; EXPRESSED IN BONE MARROW, SIGNAL = 1.2; EXPRESSED IN BRAIN, SIGNAL = 2.8; EXPRESSED IN ADULT LIVER, SIGNAL = 0.98; EXPRESSED IN BT474, SIGNAL = 2.2; EXPRESSED IN HBL100, SIGNAL = 1.4
VASGGLRSRSVVLVLALQFQPFLELGRV

SEQ ID NO: 42703 - protein, 51 aa, Homo sapiens
  MAP TO AC009497.2; EXPRESSED IN BT474, SIGNAL = 1.6; EXPRESSED IN FETAL LIVER, SIGNAL =   1; EXPRESSED IN HELA, SIGNAL = 1.7; EXPRESSED IN PLACENTA, SIGNAL = 1.2; EXPRESSED IN HBL100, SIGNAL = 1.7; EXPRESSED IN BONE MARROW, SIGNAL = 0.99; EXPRESSED IN LUNG, SIGNAL = 0.88; EXPRESSED IN BRAIN, SIGNAL = 0.97; EST_HUMAN HIT: AW385529.1, EVALUE 2.00e-21; SWISSPROT HIT: Q60284, EVALUE 6.00e+00
ARGLGQLIRAKNIKTIGDLSTLTASEIKTLPIRSPKVSNVKKALRIYHEQQ

SEQ ID NO: 42704 - protein, 56 aa, Homo sapiens
  MAP TO AC009294.6; EXPRESSED IN LUNG, SIGNAL = 1.4; EXPRESSED IN BRAIN, SIGNAL = 1.2; EXPRESSED IN BT474, SIGNAL = 1.2; SWISSPROT HIT: P56884, EVALUE 5.90e+00
QQTSASCSSKSQQNSHIKEKLYSQMPLSPKRGQMWVYLMKANSTMSLITRMISLVS

SEQ ID NO: 42705 - protein, 52 aa, Homo sapiens
  MAP TO AP000407.1; EXPRESSED IN BRAIN, SIGNAL = 0.95; EXPRESSED IN FETAL LIVER, SIGNAL = 1.3; EST_HUMAN HIT: W00660.1, EVALUE 5.00e-23; SWISSPROT HIT: O60711, EVALUE 4.00e-24
ALLEELERSTLQDSDEYSNPAPLPLDQHSRKETNLDETSEILSIQDNTSPLP

SEQ ID NO: 42706 - protein, 53 aa, Homo sapiens
  MAP TO AL035454.16; EXPRESSED IN HELA, SIGNAL =   1; EXPRESSED IN PLACENTA, SIGNAL = 1.2; EXPRESSED IN HBL100, SIGNAL = 1.3; EXPRESSED IN BRAIN, SIGNAL = 0.97; EXPRESSED IN BT474, SIGNAL = 1.6; EXPRESSED IN FETAL LIVER, SIGNAL = 3.8; EST_HUMAN HIT: AI001718.1, EVALUE 4.00e-16; SWISSPROT HIT: P17886, EVALUE 4.00e-03
SDAGWEEYFDYIFPEDAANQPNLKLLAMAKLWKKQQQEKEDAEHHPDEDVDES

SEQ ID NO: 42707 - protein, 66 aa, Homo sapiens
  MAP TO AC007038.3; EXPRESSED IN BT474, SIGNAL = 1.2; EXPRESSED IN FETAL LIVER, SIGNAL = 0.93; EXPRESSED IN BRAIN, SIGNAL = 3.1; SWISSPROT HIT: P09619, EVALUE 3.30e+00; EST_HUMAN HIT: BF530735.1, EVALUE 6.00e-14
DQKRSVTFIEAQPEPAAAPTDALPATGQLQGCSPAPSRKPEAMDEPVLTSSPAIVVADLHSVSPKQ

SEQ ID NO: 42708 - protein, 51 aa, Homo sapiens
  MAP TO AL080249.11; EXPRESSED IN BRAIN, SIGNAL = 0.98; EXPRESSED IN ADULT LIVER, SIGNAL = 4.1; EXPRESSED IN FETAL LIVER, SIGNAL =  15; EXPRESSED IN BONE MARROW, SIGNAL = 0.93; SWISSPROT HIT: P18428, EVALUE 5.00e-22
KLQGSFDVSVKGISISVNLLLGSESSGRPTVTASSCSSDIADVEVDMSGDL

SEQ ID NO: 42709 - protein, 35 aa, Homo sapiens
  MAP TO AL080249.11; EXPRESSED IN BRAIN, SIGNAL = 0.98; EXPRESSED IN ADULT LIVER, SIGNAL = 4.1; EXPRESSED IN FETAL LIVER, SIGNAL =  15; EXPRESSED IN BONE MARROW, SIGNAL = 0.93
STSCWAASPPGGPQLLPPAAAVTSLTWRWTCRETW

SEQ ID NO: 42710 - protein, 87 aa, Homo sapiens
  MAP TO AC007898.1; EXPRESSED IN BRAIN, SIGNAL = 1.1; EXPRESSED IN BONE MARROW, SIGNAL = 0.97; EXPRESSED IN BT474, SIGNAL = 1.6; SWISSPROT HIT: Q04263, EVALUE 8.40e+00; EST_HUMAN HIT: BF527303.1, EVALUE 3.10e+00
  unsure 59
  unsure 65
MLLGNTCLDLAPDHSFASAMGVRGMLGHRMLRGPQMAMEGRAGDHRMTNIQAHQATSFXGLQVCXFPAKLVRRNIVLALKYSTKSKD

SEQ ID NO: 42711 - protein, 54 aa, Homo sapiens
  MAP TO AC009444.1; EXPRESSED IN BRAIN, SIGNAL = 1.9; EXPRESSED IN BT474, SIGNAL = 1.4; SWISSPROT HIT: Q21313, EVALUE 4.60e-02; EST_HUMAN HIT: BF345183.1, EVALUE 4.00e-17
EQGKIGVVFNIGTVDISIKEERTPVNDGKYHVVRFTRNGGNATLQVDNWPVNEH

SEQ ID NO: 42712 - protein, 18 aa, Homo sapiens
  MAP TO AC009444.1; EXPRESSED IN BRAIN, SIGNAL = 1.9; EXPRESSED IN BT474, SIGNAL = 1.4
FFIIGTGENWSCLQHWHS

SEQ ID NO: 42713 - protein, 61 aa, Homo sapiens
  MAP TO AC009408.2; EXPRESSED IN BONE MARROW, SIGNAL = 1.1; EXPRESSED IN BRAIN, SIGNAL = 1.1; EXPRESSED IN BT474, SIGNAL = 0.96; EXPRESSED IN ADULT LIVER, SIGNAL =   1; EXPRESSED IN HBL100, SIGNAL =   1; EST_HUMAN HIT: BF062942.1, EVALUE 6.90e-01; SWISSPROT HIT: P25304, EVALUE 3.40e+00
MGKKLCQSLTTSHLDEGCPAGKAGTLCHGARHTPGSAVIELKEGAGPGGAGAGPDAVPANK

SEQ ID NO: 42714 - protein, 38 aa, Homo sapiens
  MAP TO AC009408.2; EXPRESSED IN BONE MARROW, SIGNAL = 1.1; EXPRESSED IN BRAIN, SIGNAL = 1.1; EXPRESSED IN BT474, SIGNAL = 0.96; EXPRESSED IN ADULT LIVER, SIGNAL =   1; EXPRESSED IN HBL100, SIGNAL =   1; EST_HUMAN HIT: AA081792.1, EVALUE 2.90e-01; SWISSPROT HIT: Q28758, EVALUE 4.70e+00
WARNCVSHSPPPTLMKGVLQEKLVPFVMELDTHLAQQS

SEQ ID NO: 42715 - protein, 33 aa, Homo sapiens
  MAP TO AC010888.1; EXPRESSED IN BONE MARROW, SIGNAL = 0.97; EXPRESSED IN BRAIN, SIGNAL = 1.3; EXPRESSED IN FETAL LIVER, SIGNAL =   1; EXPRESSED IN BT474, SIGNAL = 1.4; EXPRESSED IN HBL100, SIGNAL = 1.3; EXPRESSED IN HELA, SIGNAL = 0.96; SWISSPROT HIT: P54750, EVALUE 3.00e-13; EST_HUMAN HIT: AU120157.1, EVALUE 4.00e-12
MGSSATEIEELENTTFKYLTGEQTEKMWQRLKG

SEQ ID NO: 42716 - protein, 25 aa, Homo sapiens
  MAP TO AC010888.1; EXPRESSED IN BONE MARROW, SIGNAL = 0.97; EXPRESSED IN BRAIN, SIGNAL = 1.3; EXPRESSED IN FETAL LIVER, SIGNAL =   1; EXPRESSED IN BT474, SIGNAL = 1.4; EXPRESSED IN HBL100, SIGNAL = 1.3; EXPRESSED IN HELA, SIGNAL = 0.96; EST_HUMAN HIT: AU120157.1, EVALUE 7.00e-08
WGLVPQRLKNWKTPLLSILQENRLK

SEQ ID NO: 42717 - protein, 37 aa, Homo sapiens
  MAP TO AC010092.1; EXPRESSED IN BONE MARROW, SIGNAL = 1.1; EXPRESSED IN BRAIN, SIGNAL = 1.4; EXPRESSED IN ADULT LIVER, SIGNAL = 1.3; EXPRESSED IN BT474, SIGNAL = 1.6; EXPRESSED IN FETAL LIVER, SIGNAL = 0.96; EXPRESSED IN HELA, SIGNAL = 1.6; EXPRESSED IN PLACENTA, SIGNAL = 2.9; EXPRESSED IN HBL100, SIGNAL = 1.6; SWISSPROT HIT: P34314, EVALUE 6.00e-04; EST_HUMAN HIT: BE173600.1, EVALUE 2.00e-15
REKSMQDRLRLGHFTTVRHGASFTEQWTDGFAFQNLV

SEQ ID NO: 42718 - protein, 36 aa, Homo sapiens
  MAP TO AC010092.1; EXPRESSED IN BONE MARROW, SIGNAL = 1.1; EXPRESSED IN BRAIN, SIGNAL = 1.4; EXPRESSED IN ADULT LIVER, SIGNAL = 1.3; EXPRESSED IN BT474, SIGNAL = 1.6; EXPRESSED IN FETAL LIVER, SIGNAL = 0.96; EXPRESSED IN HELA, SIGNAL = 1.6; EXPRESSED IN PLACENTA, SIGNAL = 2.9; EXPRESSED IN HBL100, SIGNAL = 1.6; EST_HUMAN HIT: BE173600.1, EVALUE 8.00e-14
ERRVCKIDYASGTLQQLDMALHLLNNGQMVLHFRIL

SEQ ID NO: 42719 - protein, 51 aa, Homo sapiens; identical to SEQ ID NO: 37309
  MAP TO AC010885.1; EXPRESSED IN BRAIN, SIGNAL = 1.2; EXPRESSED IN ADULT LIVER, SIGNAL =   1

SEQ ID NO: 42720 - protein, 42 aa, Homo sapiens
  MAP TO AC010885.1; EXPRESSED IN BRAIN, SIGNAL = 1.2; EXPRESSED IN ADULT LIVER, SIGNAL =   1
KKQRREKEKEEREMEKRRKERKRKGRKDGSKEGKKEEKRLSF

SEQ ID NO: 42721 - protein, 83 aa, Homo sapiens
  MAP TO AC010102.1; EXPRESSED IN BRAIN, SIGNAL = 1.1; EXPRESSED IN ADULT LIVER, SIGNAL = 0.91; SWISSPROT HIT: P22519, EVALUE 4.60e+00
GHCESLAAAQDGGRHLQPGKTDLGVVPASPGAVFAYVLHRARFYQSEGKADCIPHLTAGTKVAIRGELFPLGSRYLQKQGQES

SEQ ID NO: 42722 - protein, 26 aa, Homo sapiens
  MAP TO AL049821.6; EXPRESSED IN ADULT LIVER, SIGNAL = 1.5; EXPRESSED IN BT474, SIGNAL = 1.2; EXPRESSED IN HBL100, SIGNAL = 1.1; EXPRESSED IN BONE MARROW, SIGNAL = 1.4; EXPRESSED IN BRAIN, SIGNAL = 1.2
MSMMSQERDQEVETVCEAVMLMNDCG

SEQ ID NO: 42723 - protein, 79 aa, Homo sapiens; identical to SEQ ID NO: 37446
  MAP TO AL050342.29; EXPRESSED IN BONE MARROW, SIGNAL = 0.93; EXPRESSED IN BRAIN, SIGNAL = 1.3; EXPRESSED IN BT474, SIGNAL = 1.3; EST_HUMAN HIT: BF364721.1, EVALUE 2.00e-10

SEQ ID NO: 42724 - protein, 28 aa, Homo sapiens
  MAP TO AL050342.29; EXPRESSED IN BONE MARROW, SIGNAL = 0.93; EXPRESSED IN BRAIN, SIGNAL = 1.3; EXPRESSED IN BT474, SIGNAL = 1.3; EST_HUMAN HIT: F08485.1, EVALUE 2.00e-09
FDAMFSTNYSHMENYRKREDLVYQSTVR

SEQ ID NO: 42725 - protein, 57 aa, Homo sapiens
  MAP TO AL033527.25; EXPRESSED IN FETAL LIVER, SIGNAL = 0.98; EXPRESSED IN ADULT LIVER, SIGNAL = 0.98; EXPRESSED IN BT474, SIGNAL = 1.1; EXPRESSED IN HELA, SIGNAL = 1.4; EXPRESSED IN PLACENTA, SIGNAL = 1.2; EXPRESSED IN BONE MARROW, SIGNAL = 1.4; EXPRESSED IN BRAIN, SIGNAL = 1.2; EST_HUMAN HIT: BE242161.1, EVALUE 3.00e-21; SWISSPROT HIT: Q9KAC3, EVALUE 2.00e-04
VYEGLDIITNKVSAQEQRICRHHMISFVDPLVTNYTVVDFRNRATALISLGKAAAGF

SEQ ID NO: 42726 - protein, 142 aa, Homo sapiens
  MAP TO AC011290.1; EXPRESSED IN BT474, SIGNAL = 1.5; EXPRESSED IN HBL100, SIGNAL = 0.99; EXPRESSED IN BRAIN, SIGNAL = 1.2; EST_HUMAN HIT: AI627542.1, EVALUE 2.00e-66; SWISSPROT HIT: Q59119, EVALUE 1.30e+00
ALLSWCHLHNNNSTLINKINNLLDAVGQCEEYVLKHLKSITPPSHVVDLLDSIEDMDLCHVVPAEKKIDEAKDERLCENNAEFNKNCSKSHSGIDCSYVECCRTQEHAHSENPSPTWILEQTASLVKQLGLSVDVLQHLKQL

SEQ ID NO: 42727 - protein, 106 aa, Homo sapiens
  MAP TO AC009403.1; EXPRESSED IN HBL100, SIGNAL = 1.1; EXPRESSED IN HELA, SIGNAL = 1.2; EXPRESSED IN LUNG, SIGNAL = 0.95; EXPRESSED IN BRAIN, SIGNAL = 1.2; EXPRESSED IN ADULT LIVER, SIGNAL =   1; EXPRESSED IN PLACENTA, SIGNAL = 1.5; EXPRESSED IN BONE MARROW, SIGNAL = 1.4; EXPRESSED IN FETAL LIVER, SIGNAL = 1.2; EXPRESSED IN BT474, SIGNAL = 1.3; EST_HUMAN HIT: AW976097.1, EVALUE 5.00e-34
SQGVTISLNATSGMVTSFELSDNTNDQSGEQESEYEQEQGEDELVYHKSDGSELYTQEYPEEGQYEGHEAELTEDQIEYVEEPEEEQLYTDEVLDIEINEPLDEFT

SEQ ID NO: 42728 - protein, 63 aa, Homo sapiens [sequence omitted]

SEQ ID NO: 42729 - protein, 74 aa, Homo sapiens
  MAP TO AF176315.1; EXPRESSED IN PLACENTA, SIGNAL =   1; EXPRESSED IN BRAIN, SIGNAL = 0.93; EST_HUMAN HIT: T92522.1, EVALUE 5.00e-24; SWISSPROT HIT: P23471, EVALUE 1.20e+00
VPTSATAGTSGNPVSTFSSTRHSIFPVPSRFYIPSNQIRAFLLPSSFTNACLFITSIQMCGITFLVGFALPYDE

SEQ ID NO: 42730 - protein, 65 aa, Homo sapiens [sequence omitted]

SEQ ID NO: 42731 - protein, 46 aa, Homo sapiens
  MAP TO AL034582.10; EXPRESSED IN LUNG, SIGNAL = 0.88; EXPRESSED IN BONE MARROW, SIGNAL = 1.2; EXPRESSED IN BRAIN, SIGNAL = 3.3; EXPRESSED IN FETAL LIVER, SIGNAL = 0.98; EXPRESSED IN BT474, SIGNAL =   3; EXPRESSED IN PLACENTA, SIGNAL = 0.99; EXPRESSED IN HELA, SIGNAL = 1.3; EXPRESSED IN HBL100, SIGNAL = 1.5; EST_HUMAN HIT: AI686914.1, EVALUE 7.00e-21
LNLKLLFPMGLWKTMTTFLRSTLLPPCQSCKKSTAPEVPLGSPTES

SEQ ID NO: 42732 - protein, 53 aa, Homo sapiens
  MAP TO AL022068.2; EXPRESSED IN BONE MARROW, SIGNAL = 1.3; EXPRESSED IN LUNG, SIGNAL = 6.4; EXPRESSED IN BRAIN, SIGNAL = 1.1; EXPRESSED IN BT474, SIGNAL =  31; EXPRESSED IN ADULT LIVER, SIGNAL =  13; EXPRESSED IN FETAL LIVER, SIGNAL =  14; EXPRESSED IN HELA, SIGNAL =  47; EXPRESSED IN PLACENTA, SIGNAL =  74; EXPRESSED IN HBL100, SIGNAL =  27; EST_HUMAN HIT: BE394846.1, EVALUE 8.00e-15; SWISSPROT HIT: P05783, EVALUE 7.00e-16
ESTTEVTMQSAKVRAAEMTFMELRRTVQSLEIDLDLMRNPKASLENSLREVEA

SEQ ID NO: 42733 - protein, 29 aa, Homo sapiens
  MAP TO AC007708.13; EXPRESSED IN PLACENTA, SIGNAL = 4.5; EXPRESSED IN HBL100, SIGNAL = 1.5; EXPRESSED IN HELA, SIGNAL = 0.92; EXPRESSED IN BRAIN, SIGNAL = 0.91; EXPRESSED IN FETAL LIVER, SIGNAL = 0.98; EXPRESSED IN BT474, SIGNAL = 3.1; EST_HUMAN HIT: BE171984.1, EVALUE 7.10e-02
SERCRSSAPWTLPSPMPSTPSASAEGRSS

SEQ ID NO: 42734 - protein, 22 aa, Homo sapiens
  MAP TO AC011415.1; EXPRESSED IN HBL100, SIGNAL = 1.3; EXPRESSED IN BRAIN, SIGNAL = 1.2; EXPRESSED IN ADULT LIVER, SIGNAL = 0.98; EST_HUMAN HIT: BE266599.1, EVALUE 5.00e-05
ANEDLRTKLTDIQIELHQEKSK

SEQ ID NO: 42735 - protein, 22 aa, Homo sapiens
  MAP TO AC011415.1; EXPRESSED IN HBL100, SIGNAL = 1.3; EXPRESSED IN BRAIN, SIGNAL = 1.2; EXPRESSED IN ADULT LIVER, SIGNAL = 0.98; EST_HUMAN HIT: BE266599.1, EVALUE 1.00e-05
RHSLLPFKLPMKTSGPSSQTFR

SEQ ID NO: 42736 - protein, 38 aa, Homo sapiens; identical to SEQ ID NO: 38138
  MAP TO NM_006994.1; EXPRESSED IN PLACENTA, SIGNAL = 1.4; EXPRESSED IN HBL100, SIGNAL = 2.1; EXPRESSED IN BONE MARROW, SIGNAL = 1.3; EXPRESSED IN LUNG, SIGNAL = 1.2; EXPRESSED IN BRAIN, SIGNAL = 1.5; EXPRESSED IN BT474, SIGNAL = 1.2; EXPRESSED IN ADULT LIVER, SIGNAL = 1.3; EXPRESSED IN HELA, SIGNAL = 1.1; EST_HUMAN HIT: BE840049.1, EVALUE 2.00e-13; SWISSPROT HIT: P18892, EVALUE 6.00e-06

SEQ ID NO: 42737 - protein, 31 aa, Homo sapiens; identical to SEQ ID NO: 38137
  MAP TO NM_006994.1; EXPRESSED IN PLACENTA, SIGNAL = 1.4; EXPRESSED IN HBL100, SIGNAL = 2.1; EXPRESSED IN BONE MARROW, SIGNAL = 1.3; EXPRESSED IN LUNG, SIGNAL = 1.2; EXPRESSED IN BRAIN, SIGNAL = 1.5; EXPRESSED IN BT474, SIGNAL = 1.2; EXPRESSED IN ADULT LIVER, SIGNAL = 1.3; EXPRESSED IN HELA, SIGNAL = 1.1; SWISSPROT HIT: P18892, EVALUE 3.00e-04; EST_HUMAN HIT: H67836.1, EVALUE 4.00e-09

SEQ ID NO: 42738 - protein, 36 aa, Homo sapiens
  MAP TO AC007064.22; EXPRESSED IN BT474, SIGNAL = 0.96; EXPRESSED IN BRAIN, SIGNAL = 1.1
ILNRRRKRLKLASQRETRCWKGRLHSQSGIISCSRR

SEQ ID NO: 42739 - protein, 75 aa, Homo sapiens
  MAP TO AC010140.1; EXPRESSED IN PLACENTA, SIGNAL = 0.94; EXPRESSED IN HBL100, SIGNAL = 1.4; EXPRESSED IN BRAIN, SIGNAL = 1.3; EXPRESSED IN BONE MARROW, SIGNAL = 1.7; EXPRESSED IN ADULT LIVER, SIGNAL = 1.6; EXPRESSED IN BT474, SIGNAL = 1.4; EXPRESSED IN HELA, SIGNAL = 1.5; SWISSPROT HIT: P26640, EVALUE 4.10e-01; EST_HUMAN HIT: AW857140.1, EVALUE 1.00e-17
PQRGLLHRQMPFRIHLMGQCGREVWGWTPHRESPLWHCLVELWKQSCSLLDPKVVDPLTACTLSLEKPQTLNFNP

SEQ ID NO: 42740 - protein, 25 aa, Homo sapiens
  MAP TO AC010721.1; EXPRESSED IN PLACENTA, SIGNAL = 1.5; EXPRESSED IN BRAIN, SIGNAL = 1.9; EXPRESSED IN FETAL LIVER, SIGNAL = 4.9; EXPRESSED IN BONE MARROW, SIGNAL = 2.3; EXPRESSED IN ADULT LIVER, SIGNAL = 1.1; EXPRESSED IN HELA, SIGNAL = 1.1
ILRRILILMLILAGSVLSTLGANLE

SEQ ID NO: 42741 - protein, 68 aa, Homo sapiens
  MAP TO AC011370.1; EXPRESSED IN HBL100, SIGNAL = 1.6; EXPRESSED IN BRAIN, SIGNAL = 1.4; EXPRESSED IN FETAL LIVER, SIGNAL = 2.3; EST_HUMAN HIT: AA234271.1, EVALUE 3.00e-05; SWISSPROT HIT: P43572, EVALUE 1.00e-03
RIQELEATLYNALQQETVIKFGELLSEKQQEELRTAVEKLRRQMLRKSREYDCQILQERMELLQQAHQ

SEQ ID NO: 42742 - protein, 48 aa, Homo sapiens
  MAP TO AL035685.13; EXPRESSED IN HBL100, SIGNAL = 1.1; EXPRESSED IN BONE MARROW, SIGNAL = 1.5; EXPRESSED IN BRAIN, SIGNAL = 1.2; EXPRESSED IN BT474, SIGNAL = 1.1; EXPRESSED IN HELA, SIGNAL = 2.5; EST_HUMAN HIT: BE622619.1, EVALUE 4.50e-01; SWISSPROT HIT: P06924, EVALUE 2.40e-01
PTMADEACPHQGGSWITGPGLAPGNDPSPGGCALDPLSPPSSTFPQKE

SEQ ID NO: 42743 - protein, 50 aa, Homo sapiens
  MAP TO AL031963.11; EXPRESSED IN BRAIN, SIGNAL = 1.2; EXPRESSED IN BONE MARROW, SIGNAL = 1.7; EXPRESSED IN BT474, SIGNAL = 1.3; EXPRESSED IN ADULT LIVER, SIGNAL =   2; EXPRESSED IN PLACENTA, SIGNAL = 1.6; EXPRESSED IN HBL100, SIGNAL = 1.2; SWISSPROT HIT: P56490, EVALUE 7.80e+00; EST_HUMAN HIT: AW850271.1, EVALUE 1.00e-03
FCSRLLPPSTIHVAAKMVVLKGTCNPLPHILEILPRCSVVFRMKFEFLSV

SEQ ID NO: 42744 - protein, 64 aa, Homo sapiens
  MAP TO AL117338.4; EXPRESSED IN PLACENTA, SIGNAL = 1.2; EXPRESSED IN HELA, SIGNAL = 1.8; EXPRESSED IN HBL100, SIGNAL = 1.8; EXPRESSED IN BONE MARROW, SIGNAL = 2.4; EXPRESSED IN BRAIN, SIGNAL = 1.4; EXPRESSED IN ADULT LIVER, SIGNAL = 1.8; EXPRESSED IN BT474, SIGNAL = 1.5; EXPRESSED IN FETAL LIVER, SIGNAL =   1; EST_HUMAN HIT: AI342100.1, EVALUE 2.00e-04; SWISSPROT HIT: P53993, EVALUE 7.50e+00
LMKGHEARVMERNGKICNTTIASWNLRYLFRLFACLTPMAPPGPKASLTSCGPTQKQLSLTGQH

SEQ ID NO: 42745 - protein, 47 aa, Homo sapiens
  MAP TO AL109756.7; EXPRESSED IN BRAIN, SIGNAL = 1.1
SFNRNASLGVVLVNIIRLIMWKRAWCQLDQERAGGCLVVLVRMGKEA

SEQ ID NO: 42746 - protein, 77 aa, Homo sapiens
  MAP TO AL109801.5; EXPRESSED IN HBL100, SIGNAL = 4.9; EXPRESSED IN HELA, SIGNAL =   3; EXPRESSED IN BONE MARROW, SIGNAL = 2.4; EXPRESSED IN BT474, SIGNAL = 1.2; EXPRESSED IN FETAL LIVER, SIGNAL = 1.6; EXPRESSED IN ADULT LIVER, SIGNAL = 1.1; EXPRESSED IN PLACENTA, SIGNAL = 1.1; EXPRESSED IN BRAIN, SIGNAL = 1.5; EST_HUMAN HIT: BF316696.1, EVALUE 5.10e+00; SWISSPROT HIT: P29894, EVALUE 7.80e+00
SNNDDDEDEDDEDEDEDEDEDEDEDKEEEEEDCSEEYLERQLQAEFIESGQYRANEGTSSIGKSEKTKGWDQGGWQC

SEQ ID NO: 42747 - protein, 111 aa, Homo sapiens
  MAP TO AL079307.2; EXPRESSED IN BONE MARROW, SIGNAL = 1.2; EXPRESSED IN BRAIN, SIGNAL = 1.3; EXPRESSED IN LUNG, SIGNAL = 0.92; EXPRESSED IN ADULT LIVER, SIGNAL =   1; EXPRESSED IN BT474, SIGNAL = 1.5; EXPRESSED IN HELA, SIGNAL = 1.2; EXPRESSED IN PLACENTA, SIGNAL = 2.1; EXPRESSED IN HBL100, SIGNAL = 8.4; EST_HUMAN HIT: BE144364.1, EVALUE 2.00e-27
KKQYRESYISDNLDLDMDQLEKRSRASGSSAGSMKHKRLSRHSTASHSSSHTSGIEADTKPRDTGPEDSYSSSAIHRKLKTCSSMTSHGSSHTSGVESGGKDRLEEDLQDD

SEQ ID NO: 42748 - protein, 22 aa, Homo sapiens
  MAP TO AL079307.2; EXPRESSED IN BONE MARROW, SIGNAL = 1.2; EXPRESSED IN BRAIN, SIGNAL = 1.3; EXPRESSED IN LUNG, SIGNAL = 0.92; EXPRESSED IN ADULT LIVER, SIGNAL =   1; EXPRESSED IN BT474, SIGNAL = 1.5; EXPRESSED IN HELA, SIGNAL = 1.2; EXPRESSED IN PLACENTA, SIGNAL = 2.1; EXPRESSED IN HBL100, SIGNAL = 8.4; EST_HUMAN HIT: BE144364.1, EVALUE 2.00e-05
TWTSTWTSWKNGRGPAGAVRAA

SEQ ID NO: 42749 - protein, 172 aa, Homo sapiens
  MAP TO AC011503.1; EXPRESSED IN HBL100, SIGNAL = 1.2; EXPRESSED IN PLACENTA, SIGNAL = 1.7; EXPRESSED IN BRAIN, SIGNAL = 1.2; EXPRESSED IN BONE MARROW, SIGNAL = 1.4; EXPRESSED IN BT474, SIGNAL =   2; SWISSPROT HIT: Q05481, EVALUE 1.00e-82; EST_HUMAN HIT: BE177799.1, EVALUE 2.00e-63
ICPHFAQDIWPEQGVEDSFQKVILRRFEKCGHENLQLRKGCKSVDECKVHKEGYNGLNQCFTTTQGKASQCGKYLKVFYKFINLNRYKIRHTRKKPFKCKNCVKSFCMFSHKTQHKSIYTTEKSYKCKECGKTFNWSSTLTNHKKTHTEEKPYKCEEYGKAFNQSSNYTTHK

SEQ ID NO: 42750 - protein, 177 aa, Homo sapiens
  MAP TO AL079299.8; EXPRESSED IN PLACENTA, SIGNAL = 1.1; EXPRESSED IN BONE MARROW, SIGNAL = 1.3; EXPRESSED IN LUNG, SIGNAL = 0.94; EXPRESSED IN BRAIN, SIGNAL = 1.1; EXPRESSED IN BT474, SIGNAL = 1.5; EXPRESSED IN FETAL LIVER, SIGNAL = 0.95; EXPRESSED IN HELA, SIGNAL =   1; EXPRESSED IN HBL100, SIGNAL = 2.2; EXPRESSED IN ADULT LIVER, SIGNAL = 1.3; EST_HUMAN HIT: BE222374.1, EVALUE 7.00e-95; SWISSPROT HIT: Q64623, EVALUE 2.00e-21
FRQPSVSGLSQITKSLYISNGVAANNKLMLSSNQITMVINVSVEVVNTLYEDIQYMQVPVADSPNSRLCDFFDPIADHIHSVEMKQGRTLLHCAAGVSRSAALCLAYLMKYHAMSLLDAHTWTKSCRPIIRPNSGFWEQLIHYEFQLFGKNTVHMVSSPVGMIPDIYEKEVRLMIPL

SEQ ID NO: 42751 - protein, 30 aa, Homo sapiens
  MAP TO AL079299.8; EXPRESSED IN PLACENTA, SIGNAL = 1.1; EXPRESSED IN BONE MARROW, SIGNAL = 1.3; EXPRESSED IN LUNG, SIGNAL = 0.94; EXPRESSED IN BRAIN, SIGNAL = 1.1; EXPRESSED IN BT474, SIGNAL = 1.5; EXPRESSED IN FETAL LIVER, SIGNAL = 0.95; EXPRESSED IN HELA, SIGNAL =   1; EXPRESSED IN HBL100, SIGNAL = 2.2; EXPRESSED IN ADULT LIVER, SIGNAL = 1.3; EST_HUMAN HIT: AA356476.1, EVALUE 2.00e-11
PAALSQRPLADNQKPVYQQWCGRQQQAHAV

SEQ ID NO: 42752 - protein, 105 aa, Homo sapiens
  MAP TO AB023048.1; EXPRESSED IN HBL100, SIGNAL = 1.5; EXPRESSED IN HELA, SIGNAL =   2; EXPRESSED IN BRAIN, SIGNAL = 1.4; EXPRESSED IN BT474, SIGNAL = 1.3; EXPRESSED IN FETAL LIVER, SIGNAL = 1.2; EXPRESSED IN ADULT LIVER, SIGNAL = 1.3; EXPRESSED IN PLACENTA, SIGNAL = 0.96; EXPRESSED IN BONE MARROW, SIGNAL = 1.4
SETTTASTAISTSNMAVSTASEVTSGSGSSMASTTGSEATMPSTAVSVTSTAFALASSPFLASTTASGATATSTTVSATFVPNKVTDISTQTITKTVVSGTNPHV

SEQ ID NO: 42753 - protein, 154 aa, Homo sapiens
  MAP TO AC006364.3; EXPRESSED IN BT474, SIGNAL = 1.6; EXPRESSED IN BRAIN, SIGNAL = 1.1; EXPRESSED IN BONE MARROW, SIGNAL = 0.91; SWISSPROT HIT: Q9QYS1, EVALUE 8.00e-89; EST_HUMAN HIT: BF360293.1, EVALUE 3.00e-51
AVAKLMSVDCRCHGVSGSCAVKTCWKTMSSFEKIGHLLKDKYENSIQISDKTKRKMRRREKDQRKIPIHKDDLLYVNKSPNYCVEDKKLGIPGTQGRECNRTSEGADGCNLLCCGRGYNTHVVRHVERCECKFIWCCYVRCRRCESMTDVHTCK

SEQ ID NO: 42754 - protein, 17 aa, Homo sapiens
  MAP TO AL034348.5; EXPRESSED IN BONE MARROW, SIGNAL = 1.6; EXPRESSED IN LUNG, SIGNAL = 5.6; EXPRESSED IN ADULT LIVER, SIGNAL = 9.6; EXPRESSED IN BT474, SIGNAL =  31; EXPRESSED IN FETAL LIVER, SIGNAL = 8.1; EXPRESSED IN PLACENTA, SIGNAL =  53; EXPRESSED IN HBL100, SIGNAL =  22; EXPRESSED IN HELA, SIGNAL =  19; EXPRESSED IN BRAIN, SIGNAL = 1.2
MQLPKSEMQGDAHGAER

SEQ ID NO: 42755 - protein, 34 aa, Homo sapiens
  MAP TO AC006466.3; EXPRESSED IN BRAIN, SIGNAL = 1.3; EST_HUMAN HIT: AI815550.1, EVALUE 1.00e-13; SWISSPROT HIT: P41586, EVALUE 1.00e-14
PAMHSDCIFKKEQAMCLEKIQRANELMGFNDSSP

SEQ ID NO: 42756 - protein, 39 aa, Homo sapiens; identical to SEQ ID NO: 33338
  MAP TO AC004019.11; EXPRESSED IN ADULT LIVER, SIGNAL = 0.94; EXPRESSED IN BT474, SIGNAL = 1.1; EXPRESSED IN HBL100, SIGNAL = 1.2; EXPRESSED IN BONE MARROW, SIGNAL =   1; EXPRESSED IN BRAIN, SIGNAL = 1.6; SWISSPROT HIT: P53320, EVALUE 1.80e-01; EST_HUMAN HIT: AV661919.1, EVALUE 5.00e-15

SEQ ID NO: 42757 - protein, 45 aa, Homo sapiens
  MAP TO AC009532.2; EXPRESSED IN FETAL LIVER, SIGNAL = 0.87; EXPRESSED IN ADULT LIVER, SIGNAL = 0.92; EXPRESSED IN HBL100, SIGNAL = 1.2; EXPRESSED IN PLACENTA, SIGNAL = 0.97; EXPRESSED IN BRAIN, SIGNAL = 1.1; EXPRESSED IN BONE MARROW, SIGNAL = 1.2
  unsure 43
FQEGLKKTKELQDLKEEEEEQKSESPEEPEEVEETEEEEKGPXKQ

SEQ ID NO: 42758 - protein, 41 aa, Homo sapiens
  MAP TO AC009664.3; EXPRESSED IN BONE MARROW, SIGNAL =   1; EXPRESSED IN BRAIN, SIGNAL = 1.2; EXPRESSED IN BT474, SIGNAL = 1.2; EXPRESSED IN HELA, SIGNAL =   1
FSMSTRQNNNNKKKKKKKKKEEEEEEKEEEKEEEERGKVGP

SEQ ID NO: 42759 - protein, 48 aa, Homo sapiens
  MAP TO AC009664.3; EXPRESSED IN BONE MARROW, SIGNAL =   1; EXPRESSED IN BRAIN, SIGNAL = 1.2; EXPRESSED IN BT474, SIGNAL = 1.2; EXPRESSED IN HELA, SIGNAL =   1
  unsure 45
EEEEEEEGGGGGGEGGGEGGGRAGEGWTCRQDIGFTVFKLSSNTXISM

SEQ ID NO: 42760 - protein, 61 aa, Homo sapiens; identical to SEQ ID NO: 36444
  MAP TO AC010099.2; EXPRESSED IN BT474, SIGNAL = 0.95; EXPRESSED IN FETAL LIVER, SIGNAL = 1.6; EXPRESSED IN HBL100, SIGNAL = 1.1; EXPRESSED IN BRAIN, SIGNAL = 0.97; EXPRESSED IN BONE MARROW, SIGNAL = 0.92

SEQ ID NO: 42761 - protein, 19 aa, Homo sapiens
  MAP TO AC010099.2; EXPRESSED IN BT474, SIGNAL = 0.95; EXPRESSED IN FETAL LIVER, SIGNAL = 1.6; EXPRESSED IN HBL100, SIGNAL = 1.1; EXPRESSED IN BRAIN, SIGNAL = 0.97; EXPRESSED IN BONE MARROW, SIGNAL = 0.92
LLYSSSTQALAMAVVVVAY

SEQ ID NO: 42762 - protein, 38 aa, Homo sapiens
  MAP TO AL035462.12; EXPRESSED IN ADULT LIVER, SIGNAL = 0.95; EXPRESSED IN BT474, SIGNAL = 0.96; EXPRESSED IN FETAL LIVER, SIGNAL = 1.3; EXPRESSED IN HBL100, SIGNAL = 9.2; EXPRESSED IN BONE MARROW, SIGNAL = 1.2; EXPRESSED IN BRAIN, SIGNAL = 1.3; SWISSPROT HIT: P52546, EVALUE 3.60e+00; EST_HUMAN HIT: AI768135.1, EVALUE 1.00e-13
AKILEHDDVSYLKKILGELAMVLDQIEAELEKRKLENE

SEQ ID NO: 42763 - protein, 18 aa, Homo sapiens
  MAP TO AL035462.12; EXPRESSED IN ADULT LIVER, SIGNAL = 0.95; EXPRESSED IN BT474, SIGNAL = 0.96; EXPRESSED IN FETAL LIVER, SIGNAL = 1.3; EXPRESSED IN HBL100, SIGNAL = 9.2; EXPRESSED IN BONE MARROW, SIGNAL = 1.2; EXPRESSED IN BRAIN, SIGNAL = 1.3
ANSASLGPVLPPGQDLGA

SEQ ID NO: 42764 - protein, 21 aa, Homo sapiens
  MAP TO AC011309.1; EXPRESSED IN BRAIN, SIGNAL = 1.2; EXPRESSED IN BONE MARROW, SIGNAL = 2.1; EXPRESSED IN FETAL LIVER, SIGNAL = 1.2; EXPRESSED IN BT474, SIGNAL = 0.96; EXPRESSED IN ADULT LIVER, SIGNAL = 1.3; EXPRESSED IN HELA, SIGNAL = 1.4; EXPRESSED IN PLACENTA, SIGNAL = 1.3; EXPRESSED IN HBL100, SIGNAL = 1.2; EST_HUMAN HIT: AA781847.1, EVALUE 5.00e-03
LLNVKMLRMKTFMIIQFHLMN

SEQ ID NO: 42765 - protein, 50 aa, Homo sapiens
  MAP TO AC011364.1; EXPRESSED IN PLACENTA, SIGNAL = 2.9; EXPRESSED IN HBL100, SIGNAL = 0.97; EXPRESSED IN BRAIN, SIGNAL = 1.1; EXPRESSED IN BT474, SIGNAL = 1.1; SWISSPROT HIT: P56192, EVALUE 2.70e+00; EST_HUMAN HIT: BE301316.1, EVALUE 8.70e+00
SLRRSLTCIKESLRIFIDLGETDKAAEAWLGAGRLHYLMQEDELVELCLQ

SEQ ID NO: 42766 - protein, 38 aa, Homo sapiens
  MAP TO AC011364.1; EXPRESSED IN PLACENTA, SIGNAL = 2.9; EXPRESSED IN HBL100, SIGNAL = 0.97; EXPRESSED IN BRAIN, SIGNAL = 1.1; EXPRESSED IN BT474, SIGNAL = 1.1; EST_HUMAN HIT: BE622377.1, EVALUE 4.30e+00
CVSSLTWGRQTRLLRPGLGRGDSTTSCRKTSWWSCACR

SEQ ID NO: 42767 - protein, 54 aa, Homo sapiens
  MAP TO AL035587.5; EXPRESSED IN PLACENTA, SIGNAL =   2; EXPRESSED IN HELA, SIGNAL = 2.2; EXPRESSED IN BRAIN, SIGNAL = 1.1; EXPRESSED IN BONE MARROW, SIGNAL = 1.3; EXPRESSED IN LUNG, SIGNAL = 1.5; EXPRESSED IN ADULT LIVER, SIGNAL = 1.6; EXPRESSED IN BT474, SIGNAL = 2.9; EXPRESSED IN FETAL LIVER, SIGNAL = 1.1; EXPRESSED IN HBL100, SIGNAL =   3; SWISSPROT HIT: P17937, EVALUE 4.00e-04; EST_HUMAN HIT: BE409626.1, EVALUE 7.00e-25
QKKGKGLRFKRLESFLHDSWRQKRDKVRLRRLEVKPHALELPDKHSLAFVVRIE

SEQ ID NO: 42768 - protein, 21 aa, Homo sapiens
  MAP TO AL035553.10; EXPRESSED IN BT474, SIGNAL = 1.1; EXPRESSED IN HELA, SIGNAL = 1.1; EXPRESSED IN HBL100, SIGNAL = 1.3; EXPRESSED IN BRAIN, SIGNAL = 1.5; EXPRESSED IN PLACENTA, SIGNAL = 1.7; EXPRESSED IN BONE MARROW, SIGNAL = 2.1; EXPRESSED IN ADULT LIVER, SIGNAL = 1.8; EXPRESSED IN FETAL LIVER, SIGNAL = 0.99
SPDPECADALILDFLASRAEK

SEQ ID NO: 42769 - protein, 88 aa, Homo sapiens
  MAP TO AL121760.1; EXPRESSED IN BONE MARROW, SIGNAL =   1; EXPRESSED IN BT474, SIGNAL = 1.1; EXPRESSED IN HELA, SIGNAL = 1.3; EXPRESSED IN PLACENTA, SIGNAL = 0.99; EXPRESSED IN BRAIN, SIGNAL =   1; SWISSPROT HIT: Q60843, EVALUE 1.20e+00; EST_HUMAN HIT: BE734972.1, EVALUE 1.00e+00
VTVQCRSTPHGHSETQVLPSRGGDLDFFFDLLHPPAEERKRQGVEEHGGGFMGRPGRDSWPIHLVLCGGVGSDLGVKEGAVSCPAVPP

SEQ ID NO: 42770 - protein, 129 aa, Homo sapiens
  MAP TO AL096678.8; EXPRESSED IN PLACENTA, SIGNAL = 0.97; EXPRESSED IN HELA, SIGNAL = 0.89; EXPRESSED IN HBL100, SIGNAL = 1.2; EXPRESSED IN BONE MARROW, SIGNAL = 1.3; EXPRESSED IN BRAIN, SIGNAL = 1.1; EXPRESSED IN ADULT LIVER, SIGNAL = 0.98; EXPRESSED IN BT474, SIGNAL = 1.1; EST_HUMAN HIT: BE263313.1, EVALUE 1.80e+00; SWISSPROT HIT: P23883, EVALUE 7.30e+00
RTDSQLQGQVLFRHLAGLAELLPESRRQEYMQNCEQLLLGSSQAFQHVGQTLGDMAGQEVLPKELLCQLLTSLHHFVGEGESKRSLPEPAQRGSLWVSLGLLQIQTWLPQARFDPAVKREYKLNYVKEE

SEQ ID NO: 42771 - protein, 23 aa, Homo sapiens
  MAP TO AL096678.8; EXPRESSED IN PLACENTA, SIGNAL = 0.97; EXPRESSED IN HELA, SIGNAL = 0.89; EXPRESSED IN HBL100, SIGNAL = 1.2; EXPRESSED IN BONE MARROW, SIGNAL = 1.3; EXPRESSED IN BRAIN, SIGNAL = 1.1; EXPRESSED IN ADULT LIVER, SIGNAL = 0.98; EXPRESSED IN BT474, SIGNAL = 1.1; EST_HUMAN HIT: BE965341.2, EVALUE 8.20e+00
PAWEPLGEPRLAPDSDMASPGTL

SEQ ID NO: 42772 - protein, 47 aa, Homo sapiens
  MAP TO AL096678.8; EXPRESSED IN PLACENTA, SIGNAL = 0.97; EXPRESSED IN HELA, SIGNAL = 0.89; EXPRESSED IN HBL100, SIGNAL = 1.2; EXPRESSED IN BONE MARROW, SIGNAL = 1.3; EXPRESSED IN BRAIN, SIGNAL = 1.1; EXPRESSED IN ADULT LIVER, SIGNAL = 0.98; EXPRESSED IN BT474, SIGNAL = 1.1
QYKPFSAFFLSPQTHGFPTPGAGAVPAPGRPSRAAPRVPAAGVHAEL

SEQ ID NO: 42773 - protein, 37 aa, Homo sapiens
  MAP TO AF170802.1; EXPRESSED IN FETAL LIVER, SIGNAL = 1.2; EXPRESSED IN BT474, SIGNAL = 0.97; EXPRESSED IN HBL100, SIGNAL = 0.92; EXPRESSED IN BRAIN, SIGNAL = 1.1; EXPRESSED IN BONE MARROW, SIGNAL = 0.97; EST_HUMAN HIT: BE090200.1, EVALUE 1.70e+00
MVAAVLLGLSWLCSPLGALVLDFNNIRSSADLHGARK

SEQ ID NO: 42774 - protein, 21 aa, Homo sapiens
  MAP TO AF170802.1; EXPRESSED IN FETAL LIVER, SIGNAL = 1.2; EXPRESSED IN BT474, SIGNAL = 0.97; EXPRESSED IN HBL100, SIGNAL = 0.92; EXPRESSED IN BRAIN, SIGNAL = 1.1; EXPRESSED IN BONE MARROW, SIGNAL = 0.97
TVLGPSRSPGIEGWWRPSCWG

SEQ ID NO: 42775 - protein, 72 aa, Homo sapiens
  MAP TO AL109801.5; EXPRESSED IN BONE MARROW, SIGNAL = 1.7; EXPRESSED IN FETAL LIVER, SIGNAL = 0.96; EXPRESSED IN BRAIN, SIGNAL = 0.91; EST_HUMAN HIT: AA282466.1, EVALUE 3.00e-33; SWISSPROT HIT: P35991, EVALUE 4.00e-38
NLSHEKLVQLYGVCTKQRPIFIITEYMANGCLLNYLREMRHRFQTQQLLEMCKDVCEAMEYLESKQFLHRDL

SEQ ID NO: 42776 - protein, 75 aa, Homo sapiens
  MAP TO AC009944.2; EXPRESSED IN FETAL LIVER, SIGNAL = 1.6; EXPRESSED IN ADULT LIVER, SIGNAL = 1.2; EXPRESSED IN PLACENTA, SIGNAL = 6.6; EXPRESSED IN HELA, SIGNAL = 1.8; EXPRESSED IN BONE MARROW, SIGNAL = 1.4; EXPRESSED IN BRAIN, SIGNAL = 1.2; EXPRESSED IN BT474, SIGNAL = 4.3; EXPRESSED IN HBL100, SIGNAL = 3.8; EXPRESSED IN LUNG, SIGNAL = 2.5; EST_HUMAN HIT: BF001231.1, EVALUE 1.00e-23; SWISSPROT HIT: P17027, EVALUE 5.50e+00
ETSTAHSATPASAAPRELSNGTHETLTAAFALVLPSAYNGKTFTPKRNLLSHHLQTKPSQVTVEEKMARDHILRP

SEQ ID NO: 42777 - protein, 38 aa, Homo sapiens
  MAP TO AC006020.2; EXPRESSED IN FETAL LIVER, SIGNAL = 1.6; EXPRESSED IN BRAIN, SIGNAL = 1.6; EST_HUMAN HIT: BE797441.1, EVALUE 7.30e+00
MHVLQGLNLLMPCLIMRAPNTSSLFLTVLQYLCMILWV

SEQ ID NO: 42778 - protein, 19 aa, Homo sapiens
  MAP TO AC008132.19; EXPRESSED IN PLACENTA, SIGNAL = 1.1; EXPRESSED IN BONE MARROW, SIGNAL = 1.3; EXPRESSED IN BRAIN, SIGNAL = 1.5; EXPRESSED IN BT474, SIGNAL = 1.4; EXPRESSED IN FETAL LIVER, SIGNAL = 2.6; EXPRESSED IN HBL100, SIGNAL = 1.5; EXPRESSED IN LUNG, SIGNAL = 0.92; EXPRESSED IN ADULT LIVER, SIGNAL = 1.4; EST_HUMAN HIT: AW611477.1, EVALUE 8.00e-06
MCTPGLPWPRMPSSAWRLG

SEQ ID NO: 42779 - protein, 56 aa, Homo sapiens
  MAP TO AC008132.19; EXPRESSED IN PLACENTA, SIGNAL = 1.1; EXPRESSED IN BONE MARROW, SIGNAL = 1.3; EXPRESSED IN BRAIN, SIGNAL = 1.5; EXPRESSED IN BT474, SIGNAL = 1.4; EXPRESSED IN FETAL LIVER, SIGNAL = 2.6; EXPRESSED IN HBL100, SIGNAL = 1.5; EXPRESSED IN LUNG, SIGNAL = 0.92; EXPRESSED IN ADULT LIVER, SIGNAL = 1.4; EST_HUMAN HIT: AI222095.1, EVALUE 8.00e-08; SWISSPROT HIT: P19440, EVALUE 5.00e-08
GCSRAMKKKLVVLGLLAVVLVLVIVGLCLWLPSASKEPDNHVYTRAAVAADAKQCL

SEQ ID NO: 42780 - protein, 88 aa, Homo sapiens
  MAP TO AL049697.8; EXPRESSED IN ADULT LIVER, SIGNAL = 1.1; EXPRESSED IN FETAL LIVER, SIGNAL = 5.9; EXPRESSED IN PLACENTA, SIGNAL = 1.1; EXPRESSED IN HELA, SIGNAL = 4.2; EXPRESSED IN HBL100, SIGNAL = 1.1; EXPRESSED IN BONE MARROW, SIGNAL =   1; EXPRESSED IN BRAIN, SIGNAL = 0.94; EST_HUMAN HIT: AA627493.1, EVALUE 2.00e-09; SWISSPROT HIT: O97681, EVALUE 3.90e+00
LVYLSFPSFPNTVPISITVPTTSNSNPTLERFYGLGAEVTGKDPIGFFKMRFVLPALPPTTAPFTNLRNKTMPRLMPNDKSKVSVVEI

SEQ ID NO: 42781 - protein, 43 aa, Homo sapiens
  MAP TO AL121796.1; EXPRESSED IN HELA, SIGNAL = 1.3; EXPRESSED IN PLACENTA, SIGNAL = 1.7; EXPRESSED IN HBL100, SIGNAL = 1.7; EXPRESSED IN LUNG, SIGNAL = 0.88; EXPRESSED IN BRAIN, SIGNAL = 1.1; EXPRESSED IN BONE MARROW, SIGNAL = 1.7; EXPRESSED IN BT474, SIGNAL = 1.4; EXPRESSED IN FETAL LIVER, SIGNAL = 5.5; EXPRESSED IN ADULT LIVER, SIGNAL = 1.4; SWISSPROT HIT: P48630, EVALUE 3.60e+00
TTPALLSHGHTLDIVAHNHKVFSLHEDNSEWPTSSRSIAILDK

SEQ ID NO: 42782 - protein, 223 aa, Homo sapiens
  MAP TO AC008015.4; EXPRESSED IN BONE MARROW, SIGNAL = 1.3; EXPRESSED IN FETAL LIVER, SIGNAL = 0.93; EXPRESSED IN HBL100, SIGNAL = 3.3; EXPRESSED IN HELA, SIGNAL = 1.4; EXPRESSED IN LUNG, SIGNAL = 1.8; EXPRESSED IN BRAIN, SIGNAL = 1.1; EXPRESSED IN ADULT LIVER, SIGNAL = 1.4; EXPRESSED IN BT474, SIGNAL = 2.6; EXPRESSED IN PLACENTA, SIGNAL = 1.8; EST_HUMAN HIT: AI088363.1, EVALUE 1.00e-78; SWISSPROT HIT: P41891, EVALUE 6.70e+00
CGLMDELVHDLASALEQTSEQNKLGELWEEMALSPRQQRRQLRKRRGRKRRSDFTHLAEHTCCYSEASESSLDEATKDCREVAPVTNFSDSDDTMVAKRHPALNAIVKSKQHSWHESDSFTENAPCRPLRRRRKVKRVTSEVAASLQQKLKVSDWSYERGCRFKSAKKQRLSRWKENTPWTSSGHGLCESAENRTFLSKTGRKERMECETDEQKQGSDENMSE

SEQ ID NO: 42783 - protein, 19 aa, Homo sapiens
  MAP TO AC008015.4; EXPRESSED IN BONE MARROW, SIGNAL = 1.3; EXPRESSED IN FETAL LIVER, SIGNAL = 0.93; EXPRESSED IN HBL100, SIGNAL = 3.3; EXPRESSED IN HELA, SIGNAL = 1.4; EXPRESSED IN LUNG, SIGNAL = 1.8; EXPRESSED IN BRAIN, SIGNAL = 1.1; EXPRESSED IN ADULT LIVER, SIGNAL = 1.4; EXPRESSED IN BT474, SIGNAL = 2.6; EXPRESSED IN PLACENTA, SIGNAL = 1.8; EST_HUMAN HIT: BE901104.1, EVALUE 4.00e-05
PWSRHLSRISLVNCGRRWR

SEQ ID NO: 42784 - protein, 19 aa, Homo sapiens
  MAP TO AC009401.1; EXPRESSED IN PLACENTA, SIGNAL = 7.4; EXPRESSED IN HBL100, SIGNAL = 1.3; EXPRESSED IN BRAIN, SIGNAL = 1.1; EXPRESSED IN BONE MARROW, SIGNAL =   1; EXPRESSED IN BT474, SIGNAL =   1; EXPRESSED IN ADULT LIVER, SIGNAL = 1.2; EXPRESSED IN FETAL LIVER, SIGNAL = 0.93; EXPRESSED IN HELA, SIGNAL =   1
RNLASFWRIQGSSLRSLLS

SEQ ID NO: 42785 - protein, 86 aa, Homo sapiens
  MAP TO AC007666.12; EXPRESSED IN ADULT LIVER, SIGNAL = 1.1; EXPRESSED IN HELA, SIGNAL = 7.7; EXPRESSED IN PLACENTA, SIGNAL =   1; EXPRESSED IN LUNG, SIGNAL = 2.9; EXPRESSED IN BRAIN, SIGNAL = 0.97; EST_HUMAN HIT: BF184938.1, EVALUE 2.60e+00
MMKHFPGEDGDTDEEFWIREDEKREKRRSRAGRSGGSHVWTRSRDPEGSSRKQQPMENGGKSLPPTRRAPSSGDDQSSSSTQPPRE

SEQ ID NO: 42786 - protein, 60 aa, Homo sapiens
  MAP TO AC009185.2; EXPRESSED IN BT474, SIGNAL = 1.4; EXPRESSED IN HBL100, SIGNAL = 1.4; EXPRESSED IN BONE MARROW, SIGNAL = 0.98; EXPRESSED IN BRAIN, SIGNAL = 1.4; SWISSPROT HIT: P75445, EVALUE 4.40e+00; EST_HUMAN HIT: AW500792.1, EVALUE 9.00e-29
RKAIERFCSEVKRLCHAERRKDFVSEAYLLTLGKFINMFAVLDELKNMKCSVKNDHSAYK

SEQ ID NO: 42787 - protein, 48 aa, Homo sapiens
  MAP TO AP000407.1; EXPRESSED IN PLACENTA, SIGNAL = 1.4; EXPRESSED IN BRAIN, SIGNAL = 0.9; EXPRESSED IN BT474, SIGNAL = 2.1; EXPRESSED IN FETAL LIVER, SIGNAL = 1.4; EXPRESSED IN HBL100, SIGNAL = 1.6; EXPRESSED IN HELA, SIGNAL = 1.2; EST_HUMAN HIT: N33561.1, EVALUE 5.00e-20; SWISSPROT HIT: P13034, EVALUE 4.60e+00
IPRKKKRKKTILPSLRKFPLLHLDLAGAGVVVGHLFLAIVIQRTPEAL

SEQ ID NO: 42788 - protein, 80 aa, Homo sapiens
  MAP TO AL096702.3; EXPRESSED IN FETAL LIVER, SIGNAL = 0.92; EXPRESSED IN ADULT LIVER, SIGNAL = 1.1; EXPRESSED IN BT474, SIGNAL = 1.8; EXPRESSED IN HBL100, SIGNAL = 1.5; EXPRESSED IN HELA, SIGNAL = 1.1; EXPRESSED IN PLACENTA, SIGNAL = 1.6; EXPRESSED IN LUNG, SIGNAL = 0.93; EXPRESSED IN BRAIN, SIGNAL = 1.4; EXPRESSED IN BONE MARROW, SIGNAL = 1.3; EST_HUMAN HIT: AI140682.1, EVALUE 1.00e-36; SWISSPROT HIT: P54348, EVALUE 6.80e-01
SHAVNDNPSYLHSSASSRLWFPCSSCQRSDNPSERAQPVRPAPHALPAGASPQPEEQLPCGPCQMVWLRCATATPALHAR

SEQ ID NO: 42789 - protein, 42 aa, Homo sapiens
  MAP TO AC010083.1; EXPRESSED IN BRAIN, SIGNAL = 1.2; EST_HUMAN HIT: BE257514.1, EVALUE 2.00e-03; SWISSPROT HIT: Q03333, EVALUE 1.00e-18
MWTISINSAINDGRTALYDESCSSTLASTFSNGRKRNPEAGV

SEQ ID NO: 42790 - protein, 64 aa, Homo sapiens
  MAP TO AC010083.1; EXPRESSED IN BRAIN, SIGNAL = 1.2; EST_HUMAN HIT: BE257514.1, EVALUE 4.40e-01
RAAAAKAASTCGPPGTAAAMTTATATATPPACGPSPSTQPSTTAGLPCTTRAALPPWLPPSATG

SEQ ID NO: 42791 - protein, 436 aa, Homo sapiens
  MAP TO AL096711.9; EXPRESSED IN BRAIN, SIGNAL =   2; EXPRESSED IN LUNG, SIGNAL = 2.3; EXPRESSED IN BT474, SIGNAL =   1; EXPRESSED IN HELA, SIGNAL =  13; EXPRESSED IN HBL100, SIGNAL = 1.2; SWISSPROT HIT: Q00816, EVALUE 1.60e-01; EST_HUMAN HIT: BE781859.1, EVALUE 1.00e-110
EMPNVTNIPHGDPMINNDQCILPISLEKEKQKNRKNLSCTNVLQSNSTKKCGIDTIDLKRNETPPVPPPRSTSRNFPSSDSEQAYERWKERLDHNSWVPHEGRSKRNYNPHFPLRQQEMSMLYPNEGKTSKDGIIFSSLVPEVKIDSKPPSNEDVGLSMWSCDIGIGAKRSPSTSWFQKTCSTPSNPKYEMVIPDHPAKSHPDLHVSNDCSSSVAESSSPLRNFSCGFERTTRNEKLAAKTDEFNRTVFRTDRNCQAIQQNHSCSKSSEDLKPCDTSSTHTGSISQSNDVSGIWKTNAHMPVPMENVPDNPTKKSTTGLVRQMQGHLSPRSYRNMLHEHDWRPSNLSGRPRSADPRSNYGVVEKLLKTYETATESALQNSKCFQDNWTKCNSDVSGGATLSQHLEMLQMEQQFQQKTAVWGGQEVKQGIDPKKITE

SEQ ID NO: 42792 - protein, 85 aa, Homo sapiens
  MAP TO AP000512.1; EXPRESSED IN ADULT LIVER, SIGNAL = 1.1; EXPRESSED IN BT474, SIGNAL = 1.9; EXPRESSED IN FETAL LIVER, SIGNAL = 0.88; EXPRESSED IN PLACENTA, SIGNAL = 1.5; EXPRESSED IN HELA, SIGNAL =   2; EXPRESSED IN HBL100, SIGNAL = 1.9; EXPRESSED IN LUNG, SIGNAL =   1; EXPRESSED IN BONE MARROW, SIGNAL = 1.3; EXPRESSED IN BRAIN, SIGNAL = 1.2; SWISSPROT HIT: O60231, EVALUE 4.00e-28; EST_HUMAN HIT: AL134956.1, EVALUE 1.00e-25
VPELRKKSRREYLAKREREKLEDLEAELADEEFLFGDVELSRHERQELKYKRRVRDLAREYRAAGEQEKLEATNRYHMPKETRGQ

SEQ ID NO: 42793 - protein, 50 aa, Homo sapiens
  MAP TO AC007898.1; EXPRESSED IN FETAL LIVER, SIGNAL = 0.92; EXPRESSED IN BRAIN, SIGNAL = 1.1; EXPRESSED IN BONE MARROW, SIGNAL = 1.1
DTRPIPPPPPPPQPIQCEDNDDEGLYSNPCTNVPGALIGKQNLSQSLLPI

SEQ ID NO: 42794 - protein, 70 aa, Homo sapiens
  MAP TO AC005412.5; EXPRESSED IN PLACENTA, SIGNAL = 0.97; EXPRESSED IN LUNG, SIGNAL = 0.91; EXPRESSED IN BRAIN, SIGNAL = 1.1; EXPRESSED IN FETAL LIVER, SIGNAL = 0.96; EXPRESSED IN BT474, SIGNAL = 1.2; EXPRESSED IN HELA, SIGNAL = 1.8; EXPRESSED IN HBL100, SIGNAL = 0.92; EXPRESSED IN ADULT LIVER, SIGNAL = 1.3; SWISSPROT HIT: P38175, EVALUE 4.30e+00
KDKDKDGGRKEKKEKKEKKERMSAAELRSLEEMSLRRGFFNLNRSSKRESKTRLEISNPIPIKVASGSDL

SEQ ID NO: 42795 - protein, 38 aa, Homo sapiens
  MAP TO AC007970.3; EXPRESSED IN BT474, SIGNAL = 1.5; EXPRESSED IN PLACENTA, SIGNAL =   1; EXPRESSED IN HELA, SIGNAL = 1.3; EXPRESSED IN BRAIN, SIGNAL = 1.6; EST_HUMAN HIT: AV653666.1, EVALUE 1.00e-15
TPEFSQRLTNKIRELLQQMERGLKSADPRDGTGYTGWA

SEQ ID NO: 42796 - protein, 94 aa, Homo sapiens; identical to SEQ ID NO: 37536
  MAP TO AC010130.2; EXPRESSED IN BRAIN, SIGNAL = 2.3; EXPRESSED IN BONE MARROW, SIGNAL = 1.6; EXPRESSED IN ADULT LIVER, SIGNAL = 1.2; EST_HUMAN HIT: AI633677.1, EVALUE 1.00e-06

SEQ ID NO: 42797 - protein, 25 aa, Homo sapiens
  MAP TO AC010130.2; EXPRESSED IN BRAIN, SIGNAL = 2.3; EXPRESSED IN BONE MARROW, SIGNAL = 1.6; EXPRESSED IN ADULT LIVER, SIGNAL = 1.2; SWISSPROT HIT: Q01842, EVALUE 5.70e-01
TNWRCPPAPSWDQLTELREILLPVY

SEQ ID NO: 42798 - protein, 46 aa, Homo sapiens
  MAP TO AL079299.8; EXPRESSED IN BRAIN, SIGNAL = 1.1; EXPRESSED IN BONE MARROW, SIGNAL = 1.4; EXPRESSED IN BT474, SIGNAL = 1.3; EXPRESSED IN ADULT LIVER, SIGNAL = 0.95; EXPRESSED IN PLACENTA, SIGNAL = 0.94; EXPRESSED IN HBL100, SIGNAL = 1.1; SWISSPROT HIT: P16258, EVALUE 9.00e-12; EST_HUMAN HIT: AI698611.1, EVALUE 1.00e-10
TGTTYSATLSLLPLDSFEGWLLKWTNYLKGYQRRWFVLGNGLLSYY

SEQ ID NO: 42799 - protein, 103 aa, Homo sapiens
  MAP TO AC007882.2; EXPRESSED IN BONE MARROW, SIGNAL =   1; EXPRESSED IN BRAIN, SIGNAL = 1.6; EXPRESSED IN BT474, SIGNAL = 1.1; EXPRESSED IN FETAL LIVER, SIGNAL = 0.94; EXPRESSED IN PLACENTA, SIGNAL = 0.98; EXPRESSED IN HBL100, SIGNAL = 1.1; EXPRESSED IN HELA, SIGNAL = 1.4; EST_HUMAN HIT: AA397608.1, EVALUE 1.00e-56; SWISSPROT HIT: Q63244, EVALUE 2.80e-01
PSALRPTAGSGPDTRTPGTVEDGSAPCPAFRSPAVSPCGEEPCCFQISPAEETLELGRLVSPGNCDTLSPRAAGFYACHVRSLIPCRSTKGRWPLTASAAVLS

SEQ ID NO: 42800 - protein, 74 aa, Homo sapiens
  MAP TO AC007638.1; EXPRESSED IN BRAIN, SIGNAL = 1.3; EXPRESSED IN ADULT LIVER, SIGNAL =   1; SWISSPROT HIT: Q16534, EVALUE 7.00e-19; EST_HUMAN HIT: BF309490.1, EVALUE 1.00e-12
  unsure 31
VSCCQQTAIHQVPLILTPSRSQWVMSQTQQXLALSSIPGQEMFDPRKRKFSEEELKPQPMIKKARKVFIPDDLK

SEQ ID NO: 42801 - protein, 42 aa, Homo sapiens
  MAP TO AC007638.1; EXPRESSED IN BRAIN, SIGNAL = 1.3; EXPRESSED IN ADULT LIVER, SIGNAL =   1; EST_HUMAN HIT: BE222342.1, EVALUE 2.00e-03; SWISSPROT HIT: Q64709, EVALUE 7.00e-12
  unsure 30
QLLPANRNTPSPIDPDTIQVPVGYEPDPAXSCPFQHPWPGNV

SEQ ID NO: 42802 - protein, 48 aa, Homo sapiens
  MAP TO AC006020.2; EXPRESSED IN BRAIN, SIGNAL = 1.1; EST_HUMAN HIT: AU124025.1, EVALUE 9.00e-21; SWISSPROT HIT: P23471, EVALUE 7.00e-22
QYVFIHDTLVEAILSKETEVLDSHIHAYVNALLIPGPAGKTKLEKQFQ

SEQ ID NO: 42803 - protein, 42 aa, Homo sapiens
  MAP TO AC006020.2; EXPRESSED IN BRAIN, SIGNAL = 1.1; EST_HUMAN HIT: AU124025.1, EVALUE 7.00e-19
NMSSFMIHWLRPYLVKKLRCWTVIFMPMLMHSSFLDQQAKQS

SEQ ID NO: 42804 - protein, 71 aa, Homo sapiens
  MAP TO AC006318.2; EXPRESSED IN HELA, SIGNAL = 0.94; EXPRESSED IN PLACENTA, SIGNAL = 1.1; EXPRESSED IN BRAIN, SIGNAL = 0.96; EST_HUMAN HIT: BF309084.1, EVALUE 3.00e-19; SWISSPROT HIT: P51979, EVALUE 1.90e+00
KDVALKPQERVEKRQTPLTKKKREALTNGLSFHSKKSRLSHPHHYSSDRENDRNLCQHLGKRKKMPKALRQ

SEQ ID NO: 42805 - protein, 231 aa, Homo sapiens
  MAP TO AC010150.2; EXPRESSED IN HBL100, SIGNAL = 1.8; EXPRESSED IN HELA, SIGNAL = 1.7; EXPRESSED IN LUNG, SIGNAL = 1.2; EXPRESSED IN BRAIN, SIGNAL =   1; EXPRESSED IN ADULT LIVER, SIGNAL = 1.6; EXPRESSED IN BT474, SIGNAL = 1.9; EXPRESSED IN PLACENTA, SIGNAL = 1.5; EXPRESSED IN BONE MARROW, SIGNAL = 1.4; EST_HUMAN HIT: BE072624.1, EVALUE 2.00e-83; SWISSPROT HIT: P45386, EVALUE 5.00e-04
KKLTASPSDPKVKKTPAEQPKSMPVSEASLIRIVPVVSQSECKEEALQMSSPGRKEECESQGEVQPNFSTSSEPLLSSALNTHELSSILPIKCPKDEDLLEQKPVTSAEQESEKNHLTTASNYNKSESQESLVTSPSKPKSPGVEKPIVKPTAGAGPQETNMKEPLATLVDQSPESLKRKSSLTQEEAPVSWEKRPRVTENRQHQQPFQVSPQPFLNRGDRIQVRKVPPLK

SEQ ID NO: 42806 - protein, 65 aa, Homo sapiens
  MAP TO Z98752.9; EXPRESSED IN BT474, SIGNAL = 1.1; EXPRESSED IN ADULT LIVER, SIGNAL =   1; EXPRESSED IN HELA, SIGNAL = 2.4; EXPRESSED IN PLACENTA, SIGNAL = 0.99; EXPRESSED IN BRAIN, SIGNAL = 1.6; EXPRESSED IN BONE MARROW, SIGNAL = 1.1; EXPRESSED IN LUNG, SIGNAL =   3; EST_HUMAN HIT: AA380168.1, EVALUE 6.00e-27; SWISSPROT HIT: Q01538, EVALUE 3.00e-10
KCPTPGCDGSGHVTGKFTAHHCLSGCPLAERNQSRLKAELSDSEASARKKNLSGFSPRKKPRHHG

SEQ ID NO: 42807 - protein, 99 aa, Homo sapiens
  MAP TO AL035698.12; EXPRESSED IN BT474, SIGNAL =   1; EXPRESSED IN BRAIN, SIGNAL = 1.5; EST_HUMAN HIT: AW953253.1, EVALUE 5.00e-17; SWISSPROT HIT: Q13255, EVALUE 1.00e-43
CEPIPVRYLEWSNIESIIAIAFSCLGILVTLFVTLIFVLYRDTPVVKSSSRELCYIILAGIFLGYVCPFTLIAKPTTTSCYLQRLLVGLSSAMCYSALV

SEQ ID NO: 42808 - protein, 39 aa, Homo sapiens
  MAP TO AC007666.12; EXPRESSED IN HBL100, SIGNAL = 0.95; EXPRESSED IN BONE MARROW, SIGNAL = 0.91; EXPRESSED IN BRAIN, SIGNAL = 1.6; EXPRESSED IN ADULT LIVER, SIGNAL = 1.1; EXPRESSED IN FETAL LIVER, SIGNAL = 0.93; EST_HUMAN HIT: BF329616.1, EVALUE 2.00e-13; SWISSPROT HIT: Q99297, EVALUE 8.20e-02
MQRNLKMEMLAGCGAGMCQVVVTCPMEMLKIQLQDAGRL

SEQ ID NO: 42809 - protein, 30 aa, Homo sapiens
  MAP TO AL049697.8; EXPRESSED IN BT474, SIGNAL = 2.3; EXPRESSED IN LUNG, SIGNAL = 5.3; EXPRESSED IN BRAIN, SIGNAL = 0.9; EST_HUMAN HIT: AA460853.1, EVALUE 7.00e-09
ITEAMVERTMAAAAEKPFMMLSVYLTTTEV

SEQ ID NO: 42810 - protein, 62 aa, Homo sapiens; identical to SEQ ID NO: 35167
  MAP TO AF186192.1; EXPRESSED IN FETAL LIVER, SIGNAL =  18; EXPRESSED IN BONE MARROW, SIGNAL = 1.1; EXPRESSED IN BRAIN, SIGNAL = 1.2; SWISSPROT HIT: P13864, EVALUE 1.50e+00; EST_HUMAN HIT: BF248119.1, EVALUE 7.90e-02

SEQ ID NO: 42811 - protein, 46 aa, Homo sapiens
  MAP TO AF186192.1; EXPRESSED IN FETAL LIVER, SIGNAL =  18; EXPRESSED IN BONE MARROW, SIGNAL = 1.1; EXPRESSED IN BRAIN, SIGNAL = 1.2; SWISSPROT HIT: P37935, EVALUE 4.60e+00; EST_HUMAN HIT: BE836950.1, EVALUE 4.00e+00
GQQEALEAEFLEVLPKAMPEGNSPSSRKEPQKSSIANADGPEVDLK

SEQ ID NO: 42812 - protein, 27 aa, Homo sapiens
  MAP TO AP000425.1; EXPRESSED IN PLACENTA, SIGNAL = 0.96; EXPRESSED IN HELA, SIGNAL = 1.2; EXPRESSED IN LUNG, SIGNAL = 4.1; EXPRESSED IN BRAIN, SIGNAL = 0.96; EXPRESSED IN BONE MARROW, SIGNAL = 0.93; EXPRESSED IN ADULT LIVER, SIGNAL = 0.99; EXPRESSED IN BT474, SIGNAL = 1.2; EST_HUMAN HIT: AA351588.1, EVALUE 8.00e-08; SWISSPROT HIT: Q08960, EVALUE 6.00e-03
SLKKIDRPLFKDFWQQFLDSLKALAVK

SEQ ID NO: 42813 - protein, 68 aa, Homo sapiens
  MAP TO AL035703.17; EXPRESSED IN BRAIN, SIGNAL = 1.1; EXPRESSED IN BONE MARROW, SIGNAL =   1; EXPRESSED IN BT474, SIGNAL = 1.5; EXPRESSED IN ADULT LIVER, SIGNAL = 1.1; EXPRESSED IN HBL100, SIGNAL = 1.2; EXPRESSED IN HELA, SIGNAL = 2.1; EXPRESSED IN PLACENTA, SIGNAL = 1.2; EST_HUMAN HIT: BE964974.2, EVALUE 3.00e-21; SWISSPROT HIT: P18714, EVALUE 1.50e-02
VHMKRCRVAKSKQVQCKECSETKDSKKELDKHQLEAHGAGGEPDAPKKKKKRLPVTCDLCGREFAHAS

SEQ ID NO: 42814 - protein, 52 aa, Homo sapiens; identical to SEQ ID NO: 38187
  MAP TO AL080274.10; EXPRESSED IN HBL100, SIGNAL = 1.1; EXPRESSED IN BRAIN, SIGNAL = 1.7; EXPRESSED IN BONE MARROW, SIGNAL = 1.4; EXPRESSED IN FETAL LIVER, SIGNAL = 1.2; EXPRESSED IN BT474, SIGNAL = 1.2

SEQ ID NO: 42815 - protein, 71 aa, Homo sapiens
  MAP TO AC009946.1; EXPRESSED IN BONE MARROW, SIGNAL = 1.1; EXPRESSED IN BRAIN, SIGNAL = 1.4; EXPRESSED IN BT474, SIGNAL = 0.98; EST_HUMAN HIT: AA873561.1, EVALUE 2.00e-20; SWISSPROT HIT: P10069, EVALUE 1.90e+00
TYEEAVSFPVAEGPPTPPAYPTEEALEPSGSRDALLSTQPAWPPPSYESISLALDAVSAETTPSATRSCSG

SEQ ID NO: 42816 - protein, 66 aa, Homo sapiens
  MAP TO AL031848.11; EXPRESSED IN BT474, SIGNAL = 1.9; EXPRESSED IN FETAL LIVER, SIGNAL = 1.1; EXPRESSED IN HBL100, SIGNAL = 1.1; EXPRESSED IN BRAIN, SIGNAL =   1; EXPRESSED IN BONE MARROW, SIGNAL = 1.2; EST_HUMAN HIT: AV658699.1, EVALUE 9.80e+00; SWISSPROT HIT: P39653, EVALUE 3.30e+00
VEHRVLSRDPSAELEAKQPDSGMSSPNTTVSVQPLNFDLSSPTSTLSNYDSCSSSHSSIKGQHPPC

SEQ ID NO: 42817 - protein, 67 aa, Homo sapiens
  MAP TO AL080275.8; EXPRESSED IN BONE MARROW, SIGNAL = 1.5; EXPRESSED IN LUNG, SIGNAL = 1.2; EXPRESSED IN BRAIN, SIGNAL =   1; EST_HUMAN HIT: AU119275.1, EVALUE 2.20e-01
SPQGQKQALFLNMVEITLPNKEPSGVLELLPCHLSFQEVQGAQASQGGQGYPENPGKQKQSPRSYCH

SEQ ID NO: 42818 - protein, 44 aa, Homo sapiens
  MAP TO AL034582.10; EXPRESSED IN BRAIN, SIGNAL = 1.3; EXPRESSED IN BONE MARROW, SIGNAL = 0.9; EXPRESSED IN LUNG, SIGNAL = 6.3; EXPRESSED IN BT474, SIGNAL = 1.1; EXPRESSED IN HBL100, SIGNAL = 1.8; EST_HUMAN HIT: AA426636.1, EVALUE 1.00e-04
SMTVVTVKAVAGMLVLSIQGNLQLDYPIFYVMFVCMVQPPSIRL

SEQ ID NO: 42819 - protein, 19 aa, Homo sapiens
  MAP TO AL034582.10; EXPRESSED IN BRAIN, SIGNAL = 1.3; EXPRESSED IN BONE MARROW, SIGNAL = 0.9; EXPRESSED IN LUNG, SIGNAL = 6.3; EXPRESSED IN BT474, SIGNAL = 1.1; EXPRESSED IN HBL100, SIGNAL = 1.8
GCLSCPFKGTCSLTTPSST

SEQ ID NO: 42820 - protein, 57 aa, Homo sapiens
  MAP TO AL080317.11; EXPRESSED IN LUNG, SIGNAL = 1.6; EXPRESSED IN BRAIN, SIGNAL = 0.98; EXPRESSED IN BT474, SIGNAL = 1.2; EXPRESSED IN PLACENTA, SIGNAL = 1.2; EXPRESSED IN HBL100, SIGNAL = 0.93; EXPRESSED IN HELA, SIGNAL = 1.2; SWISSPROT HIT: Q61493, EVALUE 1.00e-28; EST_HUMAN HIT: BF529600.1, EVALUE 4.00e-04
QRSQMRAPQCVPLIMEPESRFYSNSVLVLDFQSLYPSIVIAYNYCFSTCLGHVENLG

SEQ ID NO: 42821 - protein, 43 aa, Homo sapiens
  MAP TO AC008014.5; EXPRESSED IN BRAIN, SIGNAL = 3.2; EXPRESSED IN ADULT LIVER, SIGNAL = 1.2; SWISSPROT HIT: P36417, EVALUE 1.20e+00
LERSAEILQPPECTVRDQHYEGSKSSQCHQALSSDQHHGHLVF

SEQ ID NO: 42822 - protein, 43 aa, Homo sapiens
  MAP TO AC010899.1; EXPRESSED IN BRAIN, SIGNAL = 1.1; EST_HUMAN HIT: AI968110.1, EVALUE 5.00e-18; SWISSPROT HIT: P54764, EVALUE 4.00e-19
SSPEFSAVVSVGDWLQAIKMDRYKDNFTAAGYTTLEAVVHVNQ

SEQ ID NO: 42823 - protein, 34 aa, Homo sapiens
  MAP TO AC010899.1; EXPRESSED IN BRAIN, SIGNAL = 1.1; EST_HUMAN HIT: AI968110.1, EVALUE 6.00e-14
APLNSLLWYQWAIGSRPLKWTGIRITSQLLVIPH

SEQ ID NO: 42824 - protein, 45 aa, Homo sapiens
  MAP TO AC011282.1; EXPRESSED IN ADULT LIVER, SIGNAL = 0.99; EXPRESSED IN BT474, SIGNAL =   1; EXPRESSED IN FETAL LIVER, SIGNAL = 1.1; EXPRESSED IN HELA, SIGNAL = 0.93; EXPRESSED IN HBL100, SIGNAL = 1.4; EXPRESSED IN LUNG, SIGNAL = 0.9; EXPRESSED IN BONE MARROW, SIGNAL = 1.3; EXPRESSED IN BRAIN, SIGNAL = 1.3; EST_HUMAN HIT: AA297560.1, EVALUE 1.20e-02
LQHGHALLQCSLRCPIKVLLVSPHHNTFTGNLHLATGELQQSSPH

SEQ ID NO: 42825 - protein, 46 aa, Homo sapiens [sequence omitted]

SEQ ID NO: 42826 - protein, 69 aa, Homo sapiens
  MAP TO AC011425.1; EXPRESSED IN BT474, SIGNAL = 1.3; EXPRESSED IN HELA, SIGNAL = 1.9; EXPRESSED IN PLACENTA, SIGNAL = 1.1; EXPRESSED IN HBL100, SIGNAL = 3.1; EXPRESSED IN BRAIN, SIGNAL = 2.1; SWISSPROT HIT: P24054, EVALUE 1.00e-03; EST_HUMAN HIT: AA236371.1, EVALUE 9.00e-36
ILPICKDSLGWMFNKLDMNYDLLLDPSEINAIYLDKYEPCIKPLFNSCDSFKDGKLSNNEWCYCFQKPG

SEQ ID NO: 42827 - protein, 193 aa, Homo sapiens; identical to SEQ ID NO: 34148
  MAP TO AP000181.1; EXPRESSED IN BT474, SIGNAL =   1; EXPRESSED IN HELA, SIGNAL = 1.5; EXPRESSED IN PLACENTA, SIGNAL = 1.3; EXPRESSED IN BRAIN, SIGNAL = 1.6; EST_HUMAN HIT: AU131904.1, EVALUE 1.00e-73; SWISSPROT HIT: O43426, EVALUE 1.00e-108

SEQ ID NO: 42828 - protein, 46 aa, Homo sapiens
  MAP TO AP000181.1; EXPRESSED IN BT474, SIGNAL =   1; EXPRESSED IN HELA, SIGNAL = 1.5; EXPRESSED IN PLACENTA, SIGNAL = 1.3; EXPRESSED IN BRAIN, SIGNAL = 1.6
LEALLACNLQNSKHYFALQKATESTSLGLGWEQVTFEQIAEPLIQQ

SEQ ID NO: 42829 - protein, 122 aa, Homo sapiens
  MAP TO AL035448.28; EXPRESSED IN PLACENTA, SIGNAL = 2.2; EXPRESSED IN BRAIN, SIGNAL = 1.9; EXPRESSED IN BT474, SIGNAL = 3.7; EXPRESSED IN HBL100, SIGNAL = 3.1; EXPRESSED IN HELA, SIGNAL =  20; SWISSPROT HIT: Q9JWD6, EVALUE 8.40e-01; EST_HUMAN HIT: AW959703.1, EVALUE 4.00e-57
RCHRFQSCAYRSNQWRYRGRCDSIQFAVDKRVFIAGFGLYGSSCGSAEYSAKIELKRQGVVLGQNLSKYFSDGSSNTFPVWFEYPVQIEPDTFYTASVILDGNELSYFGQEGMTEVQCGKVT

SEQ ID NO: 42830 - protein, 22 aa, Homo sapiens
  MAP TO AL035448.28; EXPRESSED IN PLACENTA, SIGNAL = 2.2; EXPRESSED IN BRAIN, SIGNAL = 1.9; EXPRESSED IN BT474, SIGNAL = 3.7; EXPRESSED IN HBL100, SIGNAL = 3.1; EXPRESSED IN HELA, SIGNAL =  20; EST_HUMAN HIT: T98859.1, EVALUE 2.00e-04
LSMRPTTSSSGILQPKSLSFSL

SEQ ID NO: 42831 - protein, 178 aa, Homo sapiens
  MAP TO AC008116.8; EXPRESSED IN BRAIN, SIGNAL = 1.2; EXPRESSED IN BONE MARROW, SIGNAL = 1.4; EXPRESSED IN BT474, SIGNAL = 1.9; EXPRESSED IN ADULT LIVER, SIGNAL = 1.6; EXPRESSED IN HBL100, SIGNAL = 2.2; EXPRESSED IN HELA, SIGNAL = 3.6; EST_HUMAN HIT: AW504330.1, EVALUE 1.00e-66; SWISSPROT HIT: Q93075, EVALUE 5.00e-99
VDSKDSSHNSTNSEFAAEAEGQNDTIEEPNKVQKRKRDRLRDQGSTMIYLKAIQGILGKSMPKRKGEAATRAKPSAAEHPSHGEGPARSEGPAKTAEGAARSVTVTAAQKEKDATPEISMEEDKTVPERSSFYDRRVVIDPQEKPSEEPLGDRRTVIDKCSPPLEFLDDSDSHLEIQK

SEQ ID NO: 42832 - protein, 29 aa, Homo sapiens
  MAP TO AC008116.8; EXPRESSED IN BRAIN, SIGNAL = 1.2; EXPRESSED IN BONE MARROW, SIGNAL = 1.4; EXPRESSED IN BT474, SIGNAL = 1.9; EXPRESSED IN ADULT LIVER, SIGNAL = 1.6; EXPRESSED IN HBL100, SIGNAL = 2.2; EXPRESSED IN HELA, SIGNAL = 3.6; EST_HUMAN HIT: AI004523.1, EVALUE 5.00e-07
KLRVRMIQLRNPTRSRKGRGIDFETRAPQ

SEQ ID NO: 42833 - protein, 88 aa, Homo sapiens
  MAP TO AL117343.1; EXPRESSED IN BONE MARROW, SIGNAL = 0.91; EXPRESSED IN BT474, SIGNAL = 1.4; EXPRESSED IN HBL100, SIGNAL = 1.2; EXPRESSED IN HELA, SIGNAL = 1.6; EXPRESSED IN LUNG, SIGNAL = 2.2; EXPRESSED IN BRAIN, SIGNAL = 1.2; EST_HUMAN HIT: AW844171.1, EVALUE 4.00e-30; SWISSPROT HIT: P46100, EVALUE 4.00e-02
GAVRSPPVDCPRKDTKAAEHNGNSERIEEIKTPDSFEESQGEEIGKVERSDSKSSPQAGRRYGVQVMGSGLLAEMKAKQEKRAACAQK

SEQ ID NO: 42834 - protein, 23 aa, Homo sapiens
  MAP TO AL117343.1; EXPRESSED IN BONE MARROW, SIGNAL = 0.91; EXPRESSED IN BT474, SIGNAL = 1.4; EXPRESSED IN HBL100, SIGNAL = 1.2; EXPRESSED IN HELA, SIGNAL = 1.6; EXPRESSED IN LUNG, SIGNAL = 2.2; EXPRESSED IN BRAIN, SIGNAL = 1.2; EST_HUMAN HIT: AW844171.1, EVALUE 9.00e-07
GSQKSTCGLSQEGHKGRRAQWQF

SEQ ID NO: 42835 - protein, 79 aa, Homo sapiens
  MAP TO Z82188.2; EXPRESSED IN HELA, SIGNAL =   4; EXPRESSED IN PLACENTA, SIGNAL = 4.8; EXPRESSED IN HBL100, SIGNAL = 2.2; EXPRESSED IN BONE MARROW, SIGNAL = 1.8; EXPRESSED IN BRAIN, SIGNAL = 1.7; EXPRESSED IN ADULT LIVER, SIGNAL = 1.2; EXPRESSED IN BT474, SIGNAL =   3; EXPRESSED IN FETAL LIVER, SIGNAL =   1; EST_HUMAN HIT: AA011278.1, EVALUE 5.00e-35; SWISSPROT HIT: P29279, EVALUE 5.00e-01
VTMGTAALGPVWAALLLFLLMCEIPMVELTFDRAVASGCQRCCDSEDPLDPAHVSSASSSGRPHALPEIRPYINITILK

SEQ ID NO: 42836 - protein, 287 aa, Homo sapiens
  MAP TO AL049870.1; EXPRESSED IN BT474, SIGNAL = 1.6; EXPRESSED IN HELA, SIGNAL = 1.7; EXPRESSED IN HBL100, SIGNAL = 1.2; EXPRESSED IN BONE MARROW, SIGNAL = 0.96; EXPRESSED IN BRAIN, SIGNAL = 0.98; EXPRESSED IN ADULT LIVER, SIGNAL = 0.98; EST_HUMAN HIT: U69560.1, EVALUE 3.00e-55; SWISSPROT HIT: Q04652, EVALUE 3.00e-57
MDHTSPTYMLANLTHLHSEQLLQGLNLLRQHHELCDIILRVGDVKIHAHKVVLASVSPYFKAMFTGNLSEKENSEVEFQCIDETALQAIVEYAYTGTVFISQDTVESLLPAANLLQIKLVLKECCAFLESQLDPGNCIGISRFAETYGCRDLYLAATKYICQNFEAVCQTEEFFELTHADLDEIVSNDCLNVATEETVFYALESWIKYDVQERQKYLAQLLNSVRLPLLSVKFLTRLYEANHLIRDDRTCKHLLNEALKYHFMPEHRLSHQTVLMTRPRCAPKVLCA

SEQ ID NO: 42837 - protein, 233 aa, Homo sapiens; identical to SEQ ID NO: 36229
  MAP TO AC009962.1; EXPRESSED IN BONE MARROW, SIGNAL =   1; EXPRESSED IN BT474, SIGNAL = 2.2; EXPRESSED IN HBL100, SIGNAL = 4.2; EXPRESSED IN BRAIN, SIGNAL = 1.5; EXPRESSED IN LUNG, SIGNAL = 1.5; EXPRESSED IN ADULT LIVER, SIGNAL = 1.9; EXPRESSED IN FETAL LIVER, SIGNAL = 0.94; EXPRESSED IN PLACENTA, SIGNAL =   4; EXPRESSED IN HELA, SIGNAL =  11; EST_HUMAN HIT: AW842451.1, EVALUE 1.00e-22; SWISSPROT HIT: P39520, EVALUE 2.00e-05

SEQ ID NO: 42838 - protein, 28 aa, Homo sapiens
  MAP TO AC009962.1; EXPRESSED IN BONE MARROW, SIGNAL =   1; EXPRESSED IN BT474, SIGNAL = 2.2; EXPRESSED IN HBL100, SIGNAL = 4.2; EXPRESSED IN BRAIN, SIGNAL = 1.5; EXPRESSED IN LUNG, SIGNAL = 1.5; EXPRESSED IN ADULT LIVER, SIGNAL = 1.9; EXPRESSED IN FETAL LIVER, SIGNAL = 0.94; EXPRESSED IN PLACENTA, SIGNAL =   4; EXPRESSED IN HELA, SIGNAL =  11; EST_HUMAN HIT: BE083092.1, EVALUE 2.00e-10
LLLWPMRFLLYILKSPGRPCRELEVCPQ

SEQ ID NO: 42839 - protein, 33 aa, Homo sapiens
  MAP TO AL035415.20; EXPRESSED IN ADULT LIVER, SIGNAL = 1.2; EXPRESSED IN FETAL LIVER, SIGNAL = 0.87; EXPRESSED IN HELA, SIGNAL =   2; EXPRESSED IN BONE MARROW, SIGNAL = 0.95; EXPRESSED IN BRAIN, SIGNAL = 0.92
STISLSQPSVLFRVTTWHSNASKPSSVNHHAPP

SEQ ID NO: 42840 - protein, 52 aa, Homo sapiens [sequence omitted]

SEQ ID NO: 42841 - protein, 84 aa, Homo sapiens
  MAP TO AP000567.1; EXPRESSED IN ADULT LIVER, SIGNAL =   1; EXPRESSED IN BRAIN, SIGNAL = 1.4; EXPRESSED IN BONE MARROW, SIGNAL = 1.1; SWISSPROT HIT: P02438, EVALUE 4.00e-03; EST_HUMAN HIT: W76571.1, EVALUE 4.00e-14
FGGYLYYPGSYPSSLVYSTALCSPSTCQLRSSLYRDCQKTCWEPASCQKSCYRPRTSILCCPCQTTCSGSLGFRSSSCRSQGYG

SEQ ID NO: 42842 - protein, 38 aa, Homo sapiens
  MAP TO AL121657.1; EXPRESSED IN ADULT LIVER, SIGNAL = 1.7; EXPRESSED IN BRAIN, SIGNAL = 1.2; EST_HUMAN HIT: AI673575.1, EVALUE 4.00e-11; SWISSPROT HIT: P47989, EVALUE 2.00e-15
AVGEPPLFLAASIFFAIKDAIRAARAQHTGNNVKELFR

SEQ ID NO: 42843 - protein, 41 aa, Homo sapiens
  MAP TO AL121657.1; EXPRESSED IN ADULT LIVER, SIGNAL = 1.7; EXPRESSED IN BRAIN, SIGNAL = 1.2; EST_HUMAN HIT: AI673575.1, EVALUE 2.00e-11; SWISSPROT HIT: Q62168, EVALUE 1.60e+00
LSPCPVPCLCSGCWRAAPLPGCFYLLCHQRCHPCSSSSAHR

SEQ ID NO: 42844 - protein, 98 aa, Homo sapiens
  MAP TO AL118496.4; EXPRESSED IN PLACENTA, SIGNAL = 0.94; EXPRESSED IN FETAL LIVER, SIGNAL = 1.1; EXPRESSED IN ADULT LIVER, SIGNAL = 0.91; EXPRESSED IN HELA, SIGNAL = 4.6; EXPRESSED IN HBL100, SIGNAL = 1.2; EXPRESSED IN BRAIN, SIGNAL = 0.98; EXPRESSED IN LUNG, SIGNAL = 1.1; EXPRESSED IN BT474, SIGNAL = 4.4; SWISSPROT HIT: P37285, EVALUE 2.00e-01; EST_HUMAN HIT: AL046082.2, EVALUE 7.00e-43
QQFVNYATGKLKMIASSTSANCSHQVKQQMATTFARLCQQADITQRQLEEEIARLPKEIDQWEKIQNNLKLLRNKAVQLEYELENFTKQFLPSRDEES

SEQ ID NO: 42845 - protein, 93 aa, Homo sapiens
  MAP TO AL049762.19; EXPRESSED IN BRAIN, SIGNAL =   1; EXPRESSED IN LUNG, SIGNAL =  11; EXPRESSED IN ADULT LIVER, SIGNAL = 1.8; EST_HUMAN HIT: AW340441.1, EVALUE 3.00e-51; SWISSPROT HIT: P31512, EVALUE 4.00e-53
YIAYMDDIAACIGTKPSIPLLFLKDPRLAWEVFFGPCTPYQYRLMGPGKWDGARNAILTQWDRTLKPLKTRIVPDSSKPASMSHYLKAWGAPV

SEQ ID NO: 42846 - protein, 44 aa, Homo sapiens
  MAP TO AL118513.3; EXPRESSED IN HBL100, SIGNAL = 2.2; EXPRESSED IN HELA, SIGNAL = 2.3; EXPRESSED IN BRAIN, SIGNAL = 0.95; EXPRESSED IN ADULT LIVER, SIGNAL = 1.5; EXPRESSED IN BT474, SIGNAL = 7.5; EST_HUMAN HIT: AV709809.1, EVALUE 1.00e-17; SWISSPROT HIT: Q16943, EVALUE 9.20e-01
TETPIVSKSLSSSLDDTEVKKVMEECKRLQGEVQRLREENKQFK

SEQ ID NO: 42847 - protein, 84 aa, Homo sapiens
  MAP TO AC009966.2; EXPRESSED IN BRAIN, SIGNAL = 1.3; EXPRESSED IN BONE MARROW, SIGNAL = 1.3; EXPRESSED IN BT474, SIGNAL = 0.95; EXPRESSED IN ADULT LIVER, SIGNAL = 1.4; EST_HUMAN HIT: BE741466.1, EVALUE 2.80e-01; SWISSPROT HIT: P08650, EVALUE 5.00e+00
LHGSPRETEREPNHHVVNKCCDRSTAELLLHRIKKVTASPLTLEPWKWAATSPPTQKAPMLCHQQRPNTHSDVRKRRWHGVVVR

SEQ ID NO: 42848 - protein, 63 aa, Homo sapiens
  MAP TO AL035251.11; EXPRESSED IN BRAIN, SIGNAL = 1.3; EXPRESSED IN BONE MARROW, SIGNAL = 1.2; SWISSPROT HIT: P06469, EVALUE 1.90e+00
MVHKCEYHLYCGEDVRAKEKLLKYSTEKYQMPLNKMYRLEEEIFSVCRNDDDDDEDEDDGGDD

SEQ ID NO: 42849 - protein, 363 aa, Homo sapiens
  MAP TO AC007383.2; EXPRESSED IN HELA, SIGNAL = 1.3; EXPRESSED IN PLACENTA, SIGNAL =   1; EXPRESSED IN BONE MARROW, SIGNAL =   1; EXPRESSED IN BRAIN, SIGNAL = 0.93; EST_HUMAN HIT: R63760.1, EVALUE 2.00e-60; SWISSPROT HIT: P46091, EVALUE 0.00e+00
LHSPFSKVMEDLEETLFEEFENYSYDLDYYSLESDLEEKVQLGVVHWVSLVLYCLAFVLGIPGNAIVIWFTGFKWKKTVTTLWFLNLAIADFIFLLFLPLYISYVAMNFHWPFGIWLCKANSFTAQLNMFASVFFLTVISLDHYIHLIHPVLSHRHRTLKNSLIVIIFIWLLASLIGGPALYFRDTVEFNNHTLCYNNFQKHDPDLTLIRHHVLTWVKFIIGYLFPLLTMSICYLCLIFKVKKRSILISSRHFWTILVVVVAFVVCWTPYHLFSIWELTIHHNSYSHHVMQAGIPLSTGLAFLNSCLNPILYVLISKKFQARFRSSVAEILKYTLWEVSCSGTVSEQLRNSETKNLCLLETAQ

SEQ ID NO: 42850 - protein, 26 aa, Homo sapiens
  MAP TO AC007383.2; EXPRESSED IN HELA, SIGNAL = 1.3; EXPRESSED IN PLACENTA, SIGNAL =   1; EXPRESSED IN BONE MARROW, SIGNAL =   1; EXPRESSED IN BRAIN, SIGNAL = 0.93; EST_HUMAN HIT: AA181641.1, EVALUE 3.00e-09
FILHLARSWKIWRKHYLKNLKTIPMT

SEQ ID NO: 42851 - protein, 59 aa, Homo sapiens
  MAP TO AC006452.2; EXPRESSED IN BRAIN, SIGNAL = 1.2; EXPRESSED IN BONE MARROW, SIGNAL = 1.3; EXPRESSED IN ADULT LIVER, SIGNAL = 1.3; EST_HUMAN HIT: BE738056.1, EVALUE 3.60e+00
HSHDFPAPAQCFPQQPFHAPSGSSSKEVPHPQGQVDSGKLESFICVITGQASQPGEQLF

SEQ ID NO: 42852 - protein, 60 aa, Homo sapiens
  MAP TO AC006452.2; EXPRESSED IN BRAIN, SIGNAL = 1.2; EXPRESSED IN BONE MARROW, SIGNAL = 1.3; EXPRESSED IN ADULT LIVER, SIGNAL = 1.3
STPMTSLPLPSASHSSPSTPLLALPPRRSHTPRDRLILGNWNPSSVSSLGRRVNLGNSYS

SEQ ID NO: 42853 - protein, 42 aa, Homo sapiens
  MAP TO AC006977.3; EXPRESSED IN FETAL LIVER, SIGNAL =   1; EXPRESSED IN ADULT LIVER, SIGNAL = 1.3; EXPRESSED IN HELA, SIGNAL = 1.2; EXPRESSED IN PLACENTA, SIGNAL = 1.6; EXPRESSED IN HBL100, SIGNAL = 1.4; EXPRESSED IN BONE MARROW, SIGNAL =   1; EXPRESSED IN BRAIN, SIGNAL =   1
LANLLRDEPVLLEADKPDCQETVMISSVSEEEFSFSPIRKKS

SEQ ID NO: 42854 - protein, 32 aa, Homo sapiens
  MAP TO AC010133.1; EXPRESSED IN BONE MARROW, SIGNAL = 2.2; EXPRESSED IN LUNG, SIGNAL = 1.7; EXPRESSED IN ADULT LIVER, SIGNAL =   1; EXPRESSED IN BRAIN, SIGNAL =   1; EST_HUMAN HIT: BE348794.1, EVALUE 3.00e+00; SWISSPROT HIT: P31126, EVALUE 8.30e+00
FTPFATLQVPLKITFPFWLLSFCACIFHTGSK

SEQ ID NO: 42855 - protein, 31 aa, Homo sapiens
  MAP TO AC010133.1; EXPRESSED IN BONE MARROW, SIGNAL = 2.2; EXPRESSED IN LUNG, SIGNAL = 1.7; EXPRESSED IN ADULT LIVER, SIGNAL =   1; EXPRESSED IN BRAIN, SIGNAL =   1
FEPVWKMQAQKLSNQNGKVIFSGTWRVAKGV

SEQ ID NO: 42856 - protein, 64 aa, Homo sapiens
  MAP TO AC004900.2; EXPRESSED IN BRAIN, SIGNAL = 1.1; EXPRESSED IN LUNG, SIGNAL = 4.3; EXPRESSED IN BT474, SIGNAL = 2.1; EXPRESSED IN ADULT LIVER, SIGNAL = 1.1; EXPRESSED IN HBL100, SIGNAL = 1.4; EXPRESSED IN HELA, SIGNAL = 4.1; EST_HUMAN HIT: U74308.1, EVALUE 3.00e-23; SWISSPROT HIT: P46062, EVALUE 3.00e-07
ISNEFIVLIEQETKSVVFNCSCRDVIGWTSTDTSLKIFYERGECVSVGSFINIEEIKEIVKRLQ

SEQ ID NO: 42857 - protein, 25 aa, Homo sapiens
  MAP TO AC004900.2; EXPRESSED IN BRAIN, SIGNAL = 1.1; EXPRESSED IN LUNG, SIGNAL = 4.3; EXPRESSED IN BT474, SIGNAL = 2.1; EXPRESSED IN ADULT LIVER, SIGNAL = 1.1; EXPRESSED IN HBL100, SIGNAL = 1.4; EXPRESSED IN HELA, SIGNAL = 4.1; EST_HUMAN HIT: U74308.1, EVALUE 2.00e-07
GSPMSSLCSLNRKQRAWSSIVPVEM

SEQ ID NO: 42858 - protein, 59 aa, Homo sapiens
  MAP TO AL022328.21; EXPRESSED IN BRAIN, SIGNAL = 1.1; EXPRESSED IN ADULT LIVER, SIGNAL =   1; EST_HUMAN HIT: BE780912.1, EVALUE 4.00e-04; SWISSPROT HIT: P23249, EVALUE 1.00e-05
LLNMSNYKEKFSTLLWLEEIYAEMELKEYNMSGIILRRNGDLLVLEVPGLAEGRPSLYA

SEQ ID NO: 42859 - protein, 38 aa, Homo sapiens
  MAP TO AL049822.17; EXPRESSED IN LUNG, SIGNAL = 5.2; EXPRESSED IN ADULT LIVER, SIGNAL = 0.96; EXPRESSED IN BRAIN, SIGNAL = 0.91
LGNLFHRTPPQLKEPMLSQEKDRYGALTNLSLYADVTQ

SEQ ID NO: 42860 - protein, 94 aa, Homo sapiens
  MAP TO AL050317.9; EXPRESSED IN LUNG, SIGNAL = 3.4; EXPRESSED IN BRAIN, SIGNAL =   4; EST_HUMAN HIT: BE971475.1, EVALUE 3.40e+00
MSRGPWHSREQPGGALSRELQMNGTLGAAARQTSASSSTLEKTDPGRETSSYPILLPLLHGLPFLPWLPPLSLVFGTQLRHHLFQEVATDALSL

SEQ ID NO: 42861 - protein, 42 aa, Homo sapiens
  MAP TO AL050317.9; EXPRESSED IN LUNG, SIGNAL = 3.4; EXPRESSED IN BRAIN, SIGNAL =   4
EQGSMAQPGAARRSPEQGAANEWDAGSSCQANLGFLVYPGEN

SEQ ID NO: 42862 - protein, 36 aa, Homo sapiens
  MAP TO AC007427.2; EXPRESSED IN BONE MARROW, SIGNAL =   1; EXPRESSED IN LUNG, SIGNAL = 8.7; EXPRESSED IN BRAIN, SIGNAL =   1; EST_HUMAN HIT: AV707488.1, EVALUE 1.10e+00
  unsure 2
  unsure 17
  unsure 26
  unsure 36
MXNPASGQQKAGGSRAXWQPSCLNGXRGSHCDDEKX

SEQ ID NO: 42863 - protein, 25 aa, Homo sapiens
  MAP TO AC009297.2; EXPRESSED IN FETAL LIVER, SIGNAL = 0.89; EXPRESSED IN ADULT LIVER, SIGNAL = 1.5; EXPRESSED IN LUNG, SIGNAL = 1.1; EXPRESSED IN BRAIN, SIGNAL =   1
GGEQGEEGERKVGGEEKVRKRDRRR

SEQ ID NO: 42864 - protein, 22 aa, Homo sapiens
  MAP TO AC009297.2; EXPRESSED IN FETAL LIVER, SIGNAL = 0.89; EXPRESSED IN ADULT LIVER, SIGNAL = 1.5; EXPRESSED IN LUNG, SIGNAL = 1.1; EXPRESSED IN BRAIN, SIGNAL =   1
RRGTGRGRRKESGRRREGEEKG

SEQ ID NO: 42865 - protein, 48 aa, Homo sapiens
  MAP TO AL031768.9; EXPRESSED IN BRAIN, SIGNAL = 1.3; EXPRESSED IN BONE MARROW, SIGNAL =   1; EXPRESSED IN ADULT LIVER, SIGNAL = 1.3; EST_HUMAN HIT: BE614735.1, EVALUE 6.80e-02; SWISSPROT HIT: P23683, EVALUE 4.00e-01
MSPPYWPGTSHSSGPNMPRTAATSGHCGPAQGLGPPWHLLNLIEKKTK

SEQ ID NO: 42866 - protein, 18 aa, Homo sapiens
  MAP TO AL050320.16; EXPRESSED IN BRAIN, SIGNAL = 1.2; EXPRESSED IN ADULT LIVER, SIGNAL =   1; EXPRESSED IN HBL100, SIGNAL = 0.9
RRSRRRLRGCSEKWKMRD

SEQ ID NO: 42867 - protein, 39 aa, Homo sapiens
  MAP TO AL121654.1; EXPRESSED IN HBL100, SIGNAL = 0.98; EXPRESSED IN BONE MARROW, SIGNAL = 1.4; EXPRESSED IN BRAIN, SIGNAL = 1.4; EXPRESSED IN LUNG, SIGNAL = 0.91; EXPRESSED IN ADULT LIVER, SIGNAL = 1.8; EXPRESSED IN BT474, SIGNAL = 1.1; EXPRESSED IN FETAL LIVER, SIGNAL = 0.87; SWISSPROT HIT: P47989, EVALUE 1.00e-16; EST_HUMAN HIT: BE928203.1, EVALUE 2.00e-14
LKDTPRKQLRFEGERVTWIQASTLKELLDLKAQHPDAKL

SEQ ID NO: 42868 - protein, 20 aa, Homo sapiens [sequence omitted]

SEQ ID NO: 42869 - protein, 49 aa, Homo sapiens
  MAP TO AL109659.17; EXPRESSED IN BT474, SIGNAL = 0.99; EXPRESSED IN FETAL LIVER, SIGNAL = 1.4; EXPRESSED IN BONE MARROW, SIGNAL =   1; EXPRESSED IN LUNG, SIGNAL = 4.8; EXPRESSED IN BRAIN, SIGNAL = 1.2; EXPRESSED IN ADULT LIVER, SIGNAL = 1.4; SWISSPROT HIT: P11170, EVALUE 7.00e-05
LRGLMIAVIMAALMSSLTSIFNSSSTLFTIDVWQRFRRKSTEQELMVVG

SEQ ID NO: 42870 - protein, 30 aa, Homo sapiens
  MAP TO AL109659.17; EXPRESSED IN BT474, SIGNAL = 0.99; EXPRESSED IN FETAL LIVER, SIGNAL = 1.4; EXPRESSED IN BONE MARROW, SIGNAL =   1; EXPRESSED IN LUNG, SIGNAL = 4.8; EXPRESSED IN BRAIN, SIGNAL = 1.2; EXPRESSED IN ADULT LIVER, SIGNAL = 1.4
SAGADDCRDHGRSHELTHLHLQQQQHPVHH

SEQ ID NO: 42871 - protein, 88 aa, Homo sapiens
  MAP TO AL031651.32; EXPRESSED IN LUNG, SIGNAL =   1; EXPRESSED IN BRAIN, SIGNAL = 1.2; EXPRESSED IN BONE MARROW, SIGNAL = 1.1; EXPRESSED IN ADULT LIVER, SIGNAL = 0.9; EXPRESSED IN FETAL LIVER, SIGNAL = 1.5; EST_HUMAN HIT: BF529379.1, EVALUE 3.00e-16; SWISSPROT HIT: P13666, EVALUE 5.70e+00
GTTQTKTSGPATAPSPLTEEKAALPEASAGSPERGPTLEEEPPGPEPRIGALGVKVFRSRIACLPGSRGFKQEVVGRELGAPEHLQLL

SEQ ID NO: 42872 - protein, 30 aa, Homo sapiens
  MAP TO AL031651.32; EXPRESSED IN LUNG, SIGNAL =   1; EXPRESSED IN BRAIN, SIGNAL = 1.2; EXPRESSED IN BONE MARROW, SIGNAL = 1.1; EXPRESSED IN ADULT LIVER, SIGNAL = 0.9; EXPRESSED IN FETAL LIVER, SIGNAL = 1.5; EST_HUMAN HIT: BF529379.1, EVALUE 3.00e-03
LLNVLFFVVAFSQLEQLRPKHLAQPLPPAH

SEQ ID NO: 42873 - protein, 165 aa, Homo sapiens
  MAP TO AB020878.1; EXPRESSED IN HELA, SIGNAL = 0.91; EXPRESSED IN PLACENTA, SIGNAL =  33; EXPRESSED IN LUNG, SIGNAL = 1.5; EXPRESSED IN BRAIN, SIGNAL = 1.8; EST_HUMAN HIT: BE300010.1, EVALUE 4.00e-96; SWISSPROT HIT: P55290, EVALUE 1.30e+00
HPDVEQPCKSSVRTWSPNSAVNPHTVPPACPEPQGCYLELEFLYPLVPESLTIWVTFVSTDWDSSGAVNDIKLLAVSGKNISLGPQNVFCDVPLTIRLWDVGEEVYGIQIYTLDEHLEIDAAMLTSTADTPLCLQCKPLKYKVVRDPPLQMDVASILHLNRKFVD

SEQ ID NO: 42874 - protein, 20 aa, Homo sapiens
  MAP TO AB020878.1; EXPRESSED IN HELA, SIGNAL = 0.91; EXPRESSED IN PLACENTA, SIGNAL =  33; EXPRESSED IN LUNG, SIGNAL = 1.5; EXPRESSED IN BRAIN, SIGNAL = 1.8; EST_HUMAN HIT: BF204131.1, EVALUE 7.00e-06
CPHLEPKFSCQPTHGSSSLP

SEQ ID NO: 42875 - protein, 28 aa, Homo sapiens
  MAP TO AF161326.1; EXPRESSED IN LUNG, SIGNAL = 2.6; EXPRESSED IN BRAIN, SIGNAL = 1.5; EXPRESSED IN BONE MARROW, SIGNAL = 1.2; EXPRESSED IN ADULT LIVER, SIGNAL = 1.2; EXPRESSED IN BT474, SIGNAL = 1.1; EXPRESSED IN HELA, SIGNAL = 1.3; EST_HUMAN HIT: AI632488.1, EVALUE 2.00e-10; SWISSPROT HIT: P09057, EVALUE 9.60e-01
MGAYTVGMGSPFWGTQACHITYAMSRVA

SEQ ID NO: 42876 - protein, 50 aa, Homo sapiens
  MAP TO AF161326.1; EXPRESSED IN LUNG, SIGNAL = 2.6; EXPRESSED IN BRAIN, SIGNAL = 1.5; EXPRESSED IN BONE MARROW, SIGNAL = 1.2; EXPRESSED IN ADULT LIVER, SIGNAL = 1.2; EXPRESSED IN BT474, SIGNAL = 1.1; EXPRESSED IN HELA, SIGNAL = 1.3; EST_HUMAN HIT: AI632488.1, EVALUE 3.00e-21; SWISSPROT HIT: P05998, EVALUE 3.10e-01
GTGWSLTTWAPTLWAWVPPFGGPRPATSPMPCPGWPGKRALLENGGMGRN

SEQ ID NO: 42877 - protein, 47 aa, Homo sapiens
  MAP TO AC004852.2; EXPRESSED IN BRAIN, SIGNAL = 0.97; EXPRESSED IN FETAL LIVER, SIGNAL = 1.2; EST_HUMAN HIT: BE879627.1, EVALUE 4.60e-01
SQVSPLWKNRVPRDRHFCNLGLRRSPISPHNRGLQTYMESYVGRDVA

SEQ ID NO: 42878 - protein, 48 aa, Homo sapiens
  MAP TO AC010092.1; EXPRESSED IN HELA, SIGNAL = 1.5; EXPRESSED IN PLACENTA, SIGNAL = 1.8; EXPRESSED IN HBL100, SIGNAL = 1.1; EXPRESSED IN BONE MARROW, SIGNAL =   1; EXPRESSED IN LUNG, SIGNAL = 2.1; EXPRESSED IN BRAIN, SIGNAL = 0.98; EXPRESSED IN ADULT LIVER, SIGNAL = 1.2; EXPRESSED IN BT474, SIGNAL = 2.9; EST_HUMAN HIT: AW948718.1, EVALUE 2.00e-21; SWISSPROT HIT: P34314, EVALUE 2.00e-15
EGNDLDFYLKQHKLMSEKEARSIVMQIVNALRYLNEIKPPIIHYDLKP

SEQ ID NO: 42879 - protein, 43 aa, Homo sapiens
  MAP TO AL109954.10; EXPRESSED IN BONE MARROW, SIGNAL = 0.94; EXPRESSED IN LUNG, SIGNAL = 1.5; EXPRESSED IN BRAIN, SIGNAL =   2; EXPRESSED IN BT474, SIGNAL =   1; EST_HUMAN HIT: AW978005.1, EVALUE 5.00e-16
CLLQLQETHFVRQPSSTCSFRANMTLLPALWMLEMLTKRQIPK

SEQ ID NO: 42880 - protein, 70 aa, Homo sapiens
  MAP TO AP000406.1; EXPRESSED IN PLACENTA, SIGNAL = 1.2; EXPRESSED IN BRAIN, SIGNAL = 1.1; EXPRESSED IN LUNG, SIGNAL = 2.9; EXPRESSED IN BT474, SIGNAL = 1.2; EXPRESSED IN FETAL LIVER, SIGNAL = 0.99; SWISSPROT HIT: O43566, EVALUE 4.90e-01; EST_HUMAN HIT: BF445789.1, EVALUE 1.00e-24
LMSAAGLPVCLTRPPKLVLHPPPVSKSEIKSIPGVSNTSRKTTKKQAKKGTSLLSRGVLRVKDLAVSPES

SEQ ID NO: 42881 - protein, 151 aa, Homo sapiens; identical to SEQ ID NO: 36872
  MAP TO AL096776.9; EXPRESSED IN BT474, SIGNAL = 2.6; EXPRESSED IN FETAL LIVER, SIGNAL = 1.2; EXPRESSED IN PLACENTA, SIGNAL = 2.3; EXPRESSED IN HBL100, SIGNAL = 1.3; EXPRESSED IN LUNG, SIGNAL = 0.93; EXPRESSED IN BRAIN, SIGNAL = 1.3; SWISSPROT HIT: P25763, EVALUE 6.00e-39; EST_HUMAN HIT: AW298134.1, EVALUE 5.00e-86

SEQ ID NO: 42882 - protein, 58 aa, Homo sapiens
  MAP TO AP000103.1; EXPRESSED IN BONE MARROW, SIGNAL = 1.2; EXPRESSED IN FETAL LIVER, SIGNAL =  73; EXPRESSED IN ADULT LIVER, SIGNAL = 0.93; EXPRESSED IN BT474, SIGNAL =  36; EXPRESSED IN HBL100, SIGNAL = 1.1; EXPRESSED IN HELA, SIGNAL = 0.97; EXPRESSED IN BRAIN, SIGNAL = 1.4; EST_HUMAN HIT: BF527521.1, EVALUE 1.60e+00; SWISSPROT HIT: Q14146, EVALUE 3.00e-01
LLLLLTCPISSGSLCRLARACLSLMTAMVTQGPEAARDVCSHFDLNKKTLYTLVTKRD

SEQ ID NO: 42883 - protein, 85 aa, Homo sapiens
  MAP TO AL050325.20; EXPRESSED IN PLACENTA, SIGNAL = 1.1; EXPRESSED IN BRAIN, SIGNAL = 2.1; EXPRESSED IN BONE MARROW, SIGNAL = 1.6; EXPRESSED IN BT474, SIGNAL = 1.7; EXPRESSED IN FETAL LIVER, SIGNAL = 1.8; EXPRESSED IN HBL100, SIGNAL =   1; EST_HUMAN HIT: AW813491.1, EVALUE 6.00e-07; SWISSPROT HIT: Q11194, EVALUE 2.00e+00
MSVAQQTRQEADRGCETLVVQHGHCSYTFLLPKSEPCPPGPEVSRDSNTLQRESLANPLHLGKLPTQQVKQLEQALQNNTQWLKK

SEQ ID NO: 42884 - protein, 36 aa, Homo sapiens
  MAP TO AL050325.20; EXPRESSED IN PLACENTA, SIGNAL = 1.1; EXPRESSED IN BRAIN, SIGNAL = 2.1; EXPRESSED IN BONE MARROW, SIGNAL = 1.6; EXPRESSED IN BT474, SIGNAL = 1.7; EXPRESSED IN FETAL LIVER, SIGNAL = 1.8; EXPRESSED IN HBL100, SIGNAL =   1; SWISSPROT HIT: P78559, EVALUE 5.50e-01; EST_HUMAN HIT: BE258934.1, EVALUE 5.80e-01
SLSPALRGLRSPGTPTPSRENHWPTHCTWGSCPPSR

SEQ ID NO: 42885 - protein, 24 aa, Homo sapiens
  MAP TO AL109823.6; EXPRESSED IN HBL100, SIGNAL = 1.1; EXPRESSED IN HELA, SIGNAL = 2.2; EXPRESSED IN PLACENTA, SIGNAL = 0.99; EXPRESSED IN BRAIN, SIGNAL = 1.1; EXPRESSED IN BONE MARROW, SIGNAL = 0.9; EXPRESSED IN LUNG, SIGNAL = 2.8; EXPRESSED IN BT474, SIGNAL = 1.3; EST_HUMAN HIT: BE883532.1, EVALUE 1.00e-06
QFLLNYLKEKDVADGNVSDFDNEE

SEQ ID NO: 42886 - protein, 39 aa, Homo sapiens
  MAP TO AL049593.4; EXPRESSED IN HBL100, SIGNAL = 0.98; EXPRESSED IN PLACENTA, SIGNAL = 0.96; EXPRESSED IN BRAIN, SIGNAL = 1.5; EXPRESSED IN BONE MARROW, SIGNAL = 1.2; EXPRESSED IN LUNG, SIGNAL = 1.7; EXPRESSED IN BT474, SIGNAL =   1; SWISSPROT HIT: P10687, EVALUE 2.00e-17; EST_HUMAN HIT: AW900793.1, EVALUE 3.00e-16
EVDMFGLPVDTRRKAFKTKTSQGNAVNPVWEEEPIVFKK

SEQ ID NO: 42887 - protein, 73 aa, Homo sapiens
  MAP TO AC005666.1; EXPRESSED IN HBL100, SIGNAL = 0.98; EXPRESSED IN HELA, SIGNAL = 1.3; EXPRESSED IN PLACENTA, SIGNAL = 4.9; EXPRESSED IN FETAL LIVER, SIGNAL = 1.1; EXPRESSED IN BT474, SIGNAL = 2.1; EXPRESSED IN BRAIN, SIGNAL = 1.4; EXPRESSED IN BONE MARROW, SIGNAL = 0.91; SWISSPROT HIT: Q03611, EVALUE 2.20e-01; EST_HUMAN HIT: BE252684.1, EVALUE 5.00e-38
SNTSDPEIKVLEETKGPAPDPSAQDELGRTLDGIGEPPEHCPETEAVSALSKVISNKCDGVCNFPESSQNSPT

SEQ ID NO: 42888 - protein, 405 aa, Homo sapiens; identical to SEQ ID NO: 34867
  MAP TO AC010127.3; EXPRESSED IN BRAIN, SIGNAL = 2.6; EXPRESSED IN HBL100, SIGNAL = 1.4; SWISSPROT HIT: P04774, EVALUE 0.00e+00; EST_HUMAN HIT: AI796228.1, EVALUE 3.00e-83

SEQ ID NO: 42889 - protein, 214 aa, Homo sapiens
  MAP TO AC006213.1; EXPRESSED IN BRAIN, SIGNAL =   1; EXPRESSED IN PLACENTA, SIGNAL = 1.3; EXPRESSED IN ADULT LIVER, SIGNAL = 1.1; EXPRESSED IN FETAL LIVER, SIGNAL =   1; EXPRESSED IN BT474, SIGNAL = 1.4; EXPRESSED IN LUNG, SIGNAL = 1.3; EXPRESSED IN HELA, SIGNAL = 1.2; EXPRESSED IN HBL100, SIGNAL = 1.4; EST_HUMAN HIT: AA746283.1, EVALUE 6.00e-80; SWISSPROT HIT: Q9UK13, EVALUE 0.00e+00
GKIQIEMETVPEAGPHEEWSCQQIWEQIASDLTRSQNSIRNSSQFFKEGDVPCQIEARLSISHVQQKPYRCNECKQSFSDVSVFDLHQQSHSGEKSHTCGECGKSFCYSPALHIHQRVHMGEKCYKCDVCGKEFNQSSHLQTHQRVHTGEKPFKCGQCGKGFHSRSALNVHCKLHTGEKPYNCEECGKAFIHDSQLQEHQRIHTGEKPFKCDIC

SEQ ID NO: 42890 - protein, 21 aa, Homo sapiens
  MAP TO AC006213.1; EXPRESSED IN BRAIN, SIGNAL =   1; EXPRESSED IN PLACENTA, SIGNAL = 1.3; EXPRESSED IN ADULT LIVER, SIGNAL = 1.1; EXPRESSED IN FETAL LIVER, SIGNAL =   1; EXPRESSED IN BT474, SIGNAL = 1.4; EXPRESSED IN LUNG, SIGNAL = 1.3; EXPRESSED IN HELA, SIGNAL = 1.2; EXPRESSED IN HBL100, SIGNAL = 1.4; EST_HUMAN HIT: AW504521.1, EVALUE 4.00e-03
HSFKNIRESILGRSHSNVIYV

SEQ ID NO: 42891 - protein, 32 aa, Homo sapiens
  MAP TO AC006213.1; EXPRESSED IN BRAIN, SIGNAL =   1; EXPRESSED IN PLACENTA, SIGNAL = 1.3; EXPRESSED IN ADULT LIVER, SIGNAL = 1.1; EXPRESSED IN FETAL LIVER, SIGNAL =   1; EXPRESSED IN BT474, SIGNAL = 1.4; EXPRESSED IN LUNG, SIGNAL = 1.3; EXPRESSED IN HELA, SIGNAL = 1.2; EXPRESSED IN HBL100, SIGNAL = 1.4; EST_HUMAN HIT: H65275.1, EVALUE 1.00e-10
EARSKLRWRLFQKQDHMKSGPVSKYGNKLQVT

SEQ ID NO: 42892 - protein, 35 aa, Homo sapiens
  MAP TO AP000072.1; EXPRESSED IN BONE MARROW, SIGNAL =   1; EXPRESSED IN ADULT LIVER, SIGNAL = 1.3; EXPRESSED IN BRAIN, SIGNAL = 1.2; SWISSPROT HIT: P51565, EVALUE 4.90e+00
IQQLNKYLQRAYYGLAPLFVPEISQKAKQMDHMVY

SEQ ID NO: 42893 - protein, 367 aa, Homo sapiens
  MAP TO AC005409.1; EXPRESSED IN BT474, SIGNAL = 1.5; EXPRESSED IN BRAIN, SIGNAL = 2.4; EXPRESSED IN LUNG, SIGNAL = 1.4; EXPRESSED IN PLACENTA, SIGNAL = 0.98; EXPRESSED IN HBL100, SIGNAL = 0.93; EXPRESSED IN HELA, SIGNAL = 1.4; EST_HUMAN HIT: AI499228.1, EVALUE 8.00e-94; SWISSPROT HIT: P36166, EVALUE 2.80e-01
HFHELYKVILLPNQTHYIIPKGECLPYFSFAEVAKRGVEGAYSDNPIIRHASIANKWKTIHLIMHSGMNATTIHFNLTFQNTNDEEFKMQITVEVDTREGPKLNSTAQKGYENLVSPITLLPEAEILFEDIPKEKRFPKFKRHDVNSTRRAQEEVKIPLVNISLLPKDAQLSLNTLDLQLEHGDITLKGYNLSKSALLRSFLMNSQHAKIKNQAIITDETNDSLVAPQEKQVHKSILPNSLGVSERLQRLTFPAVSVKVNGHDQGQNPPLDLETTARFRVETHTQKTIGGNVTKEKPPSLIVPLESQMTKEKKITGKEKENSRMEENAENHIGVTEVLLGRKLQHYTDSYLGFLPWEKKKYFQDLLD

SEQ ID NO: 42894 - protein, 25 aa, Homo sapiens
  MAP TO AC010872.3; EXPRESSED IN LUNG, SIGNAL = 1.1; EXPRESSED IN BRAIN, SIGNAL = 1.2; EXPRESSED IN BONE MARROW, SIGNAL = 0.92; EXPRESSED IN HBL100, SIGNAL = 1.3; EXPRESSED IN HELA, SIGNAL =   1; EXPRESSED IN PLACENTA, SIGNAL = 1.3; EXPRESSED IN ADULT LIVER, SIGNAL = 1.6; EXPRESSED IN BT474, SIGNAL = 0.98; EXPRESSED IN FETAL LIVER, SIGNAL = 1.2; EST_HUMAN HIT: AW936342.1, EVALUE 2.00e-04
RNITYCFERKLFGTKEAFGSWQALT

SEQ ID NO: 42895 - protein, 53 aa, Homo sapiens
  MAP TO AC007949.1; EXPRESSED IN BONE MARROW, SIGNAL = 1.2; EXPRESSED IN LUNG, SIGNAL = 0.8; EXPRESSED IN HELA, SIGNAL = 1.1; EXPRESSED IN BRAIN, SIGNAL = 0.78; EXPRESSED IN BT474, SIGNAL = 1.4; EXPRESSED IN HBL100, SIGNAL = 1.1; EXPRESSED IN FETAL LIVER, SIGNAL = 0.76
  unsure 26
EEVVLPEPENKKMKKKKKRKKRNKIXEKQEEKKESETSREDEYKQKYSRTYDE

SEQ ID NO: 42896 - protein, 17 aa, Homo sapiens
  MAP TO AF007544.1; EXPRESSED IN BRAIN, SIGNAL = 0.98; EXPRESSED IN ADULT LIVER, SIGNAL = 0.97; EXPRESSED IN FETAL LIVER, SIGNAL = 0.97
PKESFSTPTLLTTLLLG

SEQ ID NO: 42897 - protein, 492 aa, Homo sapiens
  MAP TO AC007228.1; EXPRESSED IN BRAIN, SIGNAL = 1.1; EXPRESSED IN BT474, SIGNAL = 1.1; SWISSPROT HIT: P10078, EVALUE 0.00e+00; EST_HUMAN HIT: AL042491.2, EVALUE 0.00e+00; EST_HUMAN HIT: AL042491.2, EVALUE 0.00e+00
QRSVHETQELFPKQDSYAEGVTDRTSNTKLDCSSFRENWDSDYVFGRKLAVGQETQFRQEPITHNKTLSKERERTYNKSGRWFYLDDSEEKVHNRDSIKNFQKSSVVIKQTGIYAGKKLFKCNECKKTFTQSSSLTVHQRIHTGEKPYKCNECGKAFSDGSSFARHQRCHTGKKPYECIECGKAFIQNTSLIRHWRYYHTGEKPFDCIDCGKAFSDHIGLNQHRRIHTGEKPYKCDVCHKSFRYGSSLTVHQRIHTGEKPYECDVCRKAFSHHASLTQHQRVHSGEKPFKCKECGKAFRQNIHLASHLRIHTGEKPFECAECGKSFSISSQLATHQRIHTGEKPYECKVCSKAFTQKAHLAQHQKTHTGEKPYECKECGKAFSQTTHLIQHQRVHTGEKPYKCMECGKAFGDNSSCTQHQRLHTGQRPYECIECGKAFKTKSSLICHRRSHTGEKPYECSVCGKAFSHRQSLSVHQRIHSGKKPYECKECRK

SEQ ID NO: 42898 - protein, 57 aa, Homo sapiens
  MAP TO AL035682.16; EXPRESSED IN BRAIN, SIGNAL = 0.8; EXPRESSED IN BT474, SIGNAL = 0.83; EXPRESSED IN LUNG, SIGNAL = 0.59; EST_HUMAN HIT: BE795378.1, EVALUE 5.50e-01; SWISSPROT HIT: P09710, EVALUE 6.70e-01
TGLSYPVHPLLKANGECLGYWGTRVQVARGGHDWLWQPRIHRCPCRFQRSLCYRESS

SEQ ID NO: 42899 - protein, 34 aa, Homo sapiens
  MAP TO AC012444.1; EXPRESSED IN HELA, SIGNAL = 1.1; EXPRESSED IN ADULT LIVER, SIGNAL = 0.97; EXPRESSED IN BT474, SIGNAL = 0.97; EXPRESSED IN FETAL LIVER, SIGNAL =   1; EXPRESSED IN BRAIN, SIGNAL = 0.95; SWISSPROT HIT: P26514, EVALUE 8.20e+00
KNKLKVDVTTPQRGQQPHLESTAEVVLSNTLHQQ

SEQ ID NO: 42900 - protein, 53 aa, Homo sapiens
  MAP TO AL049550.5; EXPRESSED IN ADULT LIVER, SIGNAL = 0.79; EXPRESSED IN LUNG, SIGNAL = 0.86; EXPRESSED IN HELA, SIGNAL = 0.79; EXPRESSED IN BRAIN, SIGNAL = 0.9; EXPRESSED IN PLACENTA, SIGNAL = 0.61; EXPRESSED IN FETAL LIVER, SIGNAL = 0.58; EST_HUMAN HIT: BE145111.1, EVALUE 5.00e-09; SWISSPROT HIT: P15840, EVALUE 5.90e+00
FSAVSRKLEQQSASFKGSMDSLLSWYVPVVVLGTKVHDVNLHTLLCPSEWELQ

SEQ ID NO: 42901 - protein, 32 aa, Homo sapiens
  MAP TO AL049550.5; EXPRESSED IN ADULT LIVER, SIGNAL = 0.79; EXPRESSED IN LUNG, SIGNAL = 0.86; EXPRESSED IN HELA, SIGNAL = 0.79; EXPRESSED IN BRAIN, SIGNAL = 0.9; EXPRESSED IN PLACENTA, SIGNAL = 0.61; EXPRESSED IN FETAL LIVER, SIGNAL = 0.58; EST_HUMAN HIT: BF572535.1, EVALUE 8.00e-04
FFGCLQETGAAICFLQRVYGFSAFLVCSCGSS

SEQ ID NO: 42902 - protein, 32 aa, Homo sapiens
  MAP TO AC012553.2; EXPRESSED IN BONE MARROW, SIGNAL = 1.5; EXPRESSED IN HELA, SIGNAL = 1.2; EXPRESSED IN PLACENTA, SIGNAL = 2.9; EXPRESSED IN HBL100, SIGNAL = 1.2; EXPRESSED IN BT474, SIGNAL = 1.4; EXPRESSED IN BRAIN, SIGNAL = 1.7; EXPRESSED IN LUNG, SIGNAL = 1.6; EXPRESSED IN ADULT LIVER, SIGNAL = 1.5; EXPRESSED IN FETAL LIVER, SIGNAL = 1.4; EST_HUMAN HIT: R66743.1, EVALUE 4.00e-11
PKSDILKDPPSEANSIQSANATTKTSETNHTS

SEQ ID NO: 42903 - protein, 77 aa, Homo sapiens
  MAP TO AP000516.1; EXPRESSED IN BONE MARROW, SIGNAL = 1.2; EXPRESSED IN BRAIN, SIGNAL = 0.94; EXPRESSED IN ADULT LIVER, SIGNAL =   1; EXPRESSED IN BT474, SIGNAL =   1; EXPRESSED IN HBL100, SIGNAL = 0.98; EXPRESSED IN HELA, SIGNAL = 1.3; SWISSPROT HIT: Q62191, EVALUE 1.00e-04; EST_HUMAN HIT: BE018009.1, EVALUE 4.00e-37
RLVESRRQQILREFEELHRRLDEEQQVLLSRLEEEEQDILQRLRENAAHLGDKRRDLAHLAAEVEGKCLQSGFEMLK

SEQ ID NO: 42904 - protein, 51 aa, Homo sapiens; identical to SEQ ID NO: 36967
  MAP TO AP000106.1; EXPRESSED IN FETAL LIVER, SIGNAL = 0.62; EXPRESSED IN LUNG, SIGNAL = 0.84; EXPRESSED IN HELA, SIGNAL = 0.82; EXPRESSED IN BRAIN, SIGNAL = 0.79; EXPRESSED IN PLACENTA, SIGNAL = 0.8; EXPRESSED IN BONE MARROW, SIGNAL = 0.81; EXPRESSED IN HBL100, SIGNAL = 0.81; EST_HUMAN HIT: AL119970.1, EVALUE 4.00e-09; SWISSPROT HIT: O43426, EVALUE 6.00e-23

SEQ ID NO: 42905 - protein, 34 aa, Homo sapiens; identical to SEQ ID NO: 36570
  MAP TO AC008168.2; EXPRESSED IN ADULT LIVER, SIGNAL = 1.1; EXPRESSED IN BRAIN, SIGNAL = 0.9; EXPRESSED IN HBL100, SIGNAL = 1.3; EXPRESSED IN FETAL LIVER, SIGNAL = 0.72; EXPRESSED IN HELA, SIGNAL = 0.7; EXPRESSED IN BT474, SIGNAL = 0.7; SWISSPROT HIT: Q62786, EVALUE 6.30e+00; EST_HUMAN HIT: BF434006.1, EVALUE 2.00e-14

SEQ ID NO: 42906 - protein, 43 aa, Homo sapiens
  MAP TO AC004689.5; EXPRESSED IN HELA, SIGNAL = 0.83; EXPRESSED IN LUNG, SIGNAL = 0.78; EXPRESSED IN BT474, SIGNAL = 0.66; EXPRESSED IN FETAL LIVER, SIGNAL = 0.73; EXPRESSED IN BRAIN, SIGNAL = 0.71; EXPRESSED IN HBL100, SIGNAL = 0.73
TLDGKFSPFTVLRRRVAMALFILSHLMFTIIKLIVLAIIYFPP

SEQ ID NO: 42907 - protein, 55 aa, Homo sapiens; identical to SEQ ID NO: 34694
  MAP TO AC012513.2; EXPRESSED IN HBL100, SIGNAL = 2.2; EXPRESSED IN HELA, SIGNAL =   2; EXPRESSED IN PLACENTA, SIGNAL = 3.6; EXPRESSED IN ADULT LIVER, SIGNAL = 0.97; EXPRESSED IN BT474, SIGNAL = 1.4; EXPRESSED IN FETAL LIVER, SIGNAL = 1.2; EXPRESSED IN BRAIN, SIGNAL = 1.2; EXPRESSED IN BONE MARROW, SIGNAL = 1.2; EST_HUMAN HIT: AA306870.1, EVALUE 6.00e-26; SWISSPROT HIT: P13010, EVALUE 5.00e-27

SEQ ID NO: 42908 - protein, 55 aa, Homo sapiens [sequence omitted]

SEQ ID NO: 42909 - protein, 47 aa, Homo sapiens
  MAP TO AC008177.1; EXPRESSED IN BRAIN, SIGNAL = 1.1; EXPRESSED IN BT474, SIGNAL =   1; EXPRESSED IN HELA, SIGNAL = 1.5; EXPRESSED IN PLACENTA, SIGNAL = 0.93; EST_HUMAN HIT: AI436683.1, EVALUE 3.00e-08
LLRHHLHHLRSLLSLSLLREETQLQPILQQKTLLKTPQILLKKTLKY

SEQ ID NO: 42910 - protein, 44 aa, Homo sapiens
  MAP TO AP000244.1; EXPRESSED IN PLACENTA, SIGNAL = 0.62; EXPRESSED IN LUNG, SIGNAL = 0.65; EXPRESSED IN ADULT LIVER, SIGNAL = 0.68; EXPRESSED IN BRAIN, SIGNAL = 0.74; EST_HUMAN HIT: AI963213.1, EVALUE 4.10e-01; SWISSPROT HIT: P39282, EVALUE 1.60e+00
ARQPLPAARGIGSPKAIWERPTRPVGMGPPSRALGLQTLPGRAG

SEQ ID NO: 42911 - protein, 40 aa, Homo sapiens
  MAP TO AC004987.2; EXPRESSED IN PLACENTA, SIGNAL = 0.68; EXPRESSED IN BT474, SIGNAL = 0.65; EXPRESSED IN HBL100, SIGNAL = 2.1; EXPRESSED IN LUNG, SIGNAL = 0.65; EXPRESSED IN ADULT LIVER, SIGNAL = 0.99; EXPRESSED IN BRAIN, SIGNAL = 0.81; EXPRESSED IN HELA, SIGNAL = 0.83; SWISSPROT HIT: O16118, EVALUE 2.70e+00; EST_HUMAN HIT: BE767711.1, EVALUE 1.10e+00
KKQLNQQVQKDKMILMLLKVFHKSKPVTSNLRFVHKDGRS

SEQ ID NO: 42912 - protein, 19 aa, Homo sapiens
  MAP TO AC007367.3; EXPRESSED IN HELA, SIGNAL = 0.59; EXPRESSED IN BRAIN, SIGNAL =   1
QKVIKAMRLMKCLTILVFI

SEQ ID NO: 42913 - protein, 182 aa, Homo sapiens
  MAP TO AC003666.1; EXPRESSED IN BONE MARROW, SIGNAL = 0.73; EXPRESSED IN BRAIN, SIGNAL = 1.2; EST_HUMAN HIT: AU133286.1, EVALUE 3.00e-76; SWISSPROT HIT: P51793, EVALUE 4.00e-99
VSYYFPLKTLWRSFFAALVAAFTLRSINPFGNSRLVLFYVEYHTPWYMAELFPFILLGVFGGLWGTLFIRCNIAWCRRRKTTRLGKYPVLEVIVVTAITAIIAYPNPYTRQSTSELISELFNDCGALESSQLCDYINDPNMTRPVDDIPDRPAGVGVYTAMWQLALALIFKIVVTIFTFGMK

SEQ ID NO: 42914 - protein, 70 aa, Homo sapiens
  MAP TO AP000209.1; EXPRESSED IN PLACENTA, SIGNAL = 0.74; EXPRESSED IN LUNG, SIGNAL = 0.74; EXPRESSED IN HELA, SIGNAL = 0.65; EXPRESSED IN BT474, SIGNAL = 0.67; EXPRESSED IN BONE MARROW, SIGNAL = 1.6; EXPRESSED IN FETAL LIVER, SIGNAL = 0.59; EXPRESSED IN BRAIN, SIGNAL = 0.94; EST_HUMAN HIT: BE715692.1, EVALUE 4.00e-21; SWISSPROT HIT: Q13009, EVALUE 1.00e-29
CTLFFYESDGRSGIDHNSIPKHAVWVENSIVQAVPEHPKKDFVFCLSNSLGDAFLFQVCWALPLQGISNL

SEQ ID NO: 42915 - protein, 60 aa, Homo sapiens; identical to SEQ ID NO: 35657
  MAP TO AL079341.13; EXPRESSED IN ADULT LIVER, SIGNAL = 0.98; EXPRESSED IN BT474, SIGNAL = 0.98; EXPRESSED IN FETAL LIVER, SIGNAL = 0.96; EXPRESSED IN BRAIN, SIGNAL = 1.1; EXPRESSED IN HBL100, SIGNAL =   1; EXPRESSED IN PLACENTA, SIGNAL = 1.1; SWISSPROT HIT: Q60325, EVALUE 2.60e+00

SEQ ID NO: 42916 - protein, 40 aa, Homo sapiens
  MAP TO AC004890.2; EXPRESSED IN HBL100, SIGNAL = 1.2; EXPRESSED IN FETAL LIVER, SIGNAL = 1.1; EXPRESSED IN ADULT LIVER, SIGNAL = 0.93; EXPRESSED IN BRAIN, SIGNAL = 1.1; EXPRESSED IN PLACENTA, SIGNAL =   1; EXPRESSED IN BT474, SIGNAL = 1.1; EXPRESSED IN HELA, SIGNAL = 1.2; EXPRESSED IN LUNG, SIGNAL = 1.2; EXPRESSED IN BONE MARROW, SIGNAL = 1.3; SWISSPROT HIT: O43365, EVALUE 4.10e-01; EST_HUMAN HIT: BE869735.1, EVALUE 5.00e-11
MAPVAPQHPDPASEPPCCVPVRSAPQSLLEAAAAAAVLMP

SEQ ID NO: 42917 - protein, 41 aa, Homo sapiens
  MAP TO AC004890.2; EXPRESSED IN HBL100, SIGNAL = 1.2; EXPRESSED IN FETAL LIVER, SIGNAL = 1.1; EXPRESSED IN ADULT LIVER, SIGNAL = 0.93; EXPRESSED IN BRAIN, SIGNAL = 1.1; EXPRESSED IN PLACENTA, SIGNAL =   1; EXPRESSED IN BT474, SIGNAL = 1.1; EXPRESSED IN HELA, SIGNAL = 1.2; EXPRESSED IN LUNG, SIGNAL = 1.2; EXPRESSED IN BONE MARROW, SIGNAL = 1.3; EST_HUMAN HIT: BE869735.1, EVALUE 9.00e-07
GRCSQNAPGINTAAAAAASNRLWGAERTGTQHGGSEAGSGC

SEQ ID NO: 42918 - protein, 39 aa, Homo sapiens
  MAP TO AC010873.2; EXPRESSED IN PLACENTA, SIGNAL = 1.1; EXPRESSED IN HBL100, SIGNAL = 1.1; EXPRESSED IN BT474, SIGNAL = 1.2; EXPRESSED IN LUNG, SIGNAL = 1.1; EXPRESSED IN BRAIN, SIGNAL = 1.2; EXPRESSED IN HELA, SIGNAL = 0.99; EXPRESSED IN ADULT LIVER, SIGNAL = 1.4; EXPRESSED IN FETAL LIVER, SIGNAL = 1.1; EXPRESSED IN BONE MARROW, SIGNAL =   1
KEQQRTIATVAVSVFYGRKTVQEQPTVIFKTLHHQQDRC

SEQ ID NO: 42919 - protein, 28 aa, Homo sapiens
  MAP TO AC010873.2; EXPRESSED IN PLACENTA, SIGNAL = 1.1; EXPRESSED IN HBL100, SIGNAL = 1.1; EXPRESSED IN BT474, SIGNAL = 1.2; EXPRESSED IN LUNG, SIGNAL = 1.1; EXPRESSED IN BRAIN, SIGNAL = 1.2; EXPRESSED IN HELA, SIGNAL = 0.99; EXPRESSED IN ADULT LIVER, SIGNAL = 1.4; EXPRESSED IN FETAL LIVER, SIGNAL = 1.1; EXPRESSED IN BONE MARROW, SIGNAL =   1; EST_HUMAN HIT: BF132937.1, EVALUE 7.90e+00
RAAKDHSHCGCECVLWQKDCARTTNGDI

SEQ ID NO: 42920 - protein, 93 aa, Homo sapiens
  MAP TO AC007391.2; EXPRESSED IN LUNG, SIGNAL = 0.69; EXPRESSED IN PLACENTA, SIGNAL = 0.71; EXPRESSED IN FETAL LIVER, SIGNAL = 0.67; EXPRESSED IN BONE MARROW, SIGNAL = 1.5; EXPRESSED IN BRAIN, SIGNAL = 0.95; EST_HUMAN HIT: BF691241.1, EVALUE 4.00e-49; SWISSPROT HIT: Q16769, EVALUE 4.00e-50
HIMQRIQRLQADWVLEIDTFLSQTPYGYRSFSNIISTLNPTAKRHLVLACHYDSKYFSHWNNRVFVGATDSAVPCAMMLELARALDKKLLSLK

SEQ ID NO: 42921 - protein, 426 aa, Homo sapiens
  MAP TO AC004974.1; EXPRESSED IN HBL100, SIGNAL = 1.1; EXPRESSED IN BT474, SIGNAL = 1.2; EXPRESSED IN BRAIN, SIGNAL = 1.1; EXPRESSED IN LUNG, SIGNAL = 2.6; EXPRESSED IN HELA, SIGNAL = 1.3; EST_HUMAN HIT: U74309.1, EVALUE 2.00e-69; SWISSPROT HIT: Q15648, EVALUE 2.60e-01
MGVRARIADWPPRKENIKESSRSSQEIETSSCLDSLSSKSSPVSQGSSVSLNSNDSAMLKSIQNTLKNKTRPSENMDSRFLMPEAYPSSPRKALRRIRQRSNSDITISELDVDSFDECISPTYKTGPSLHREYGSTSSIDKQGTSGESFFDLLKGYKDDKSDRGPTPTKLSDFLITGGGKGSGFSLDVIDGPISQRENLRLFKEREKPLKRRSKSETGDSSIFRKLRNAKGEELGKSSDLEDNRSEDSVRPWTCPKCFAHYDVQSILFDLNEAIMNRHNVIKRRNTTTGASAAAVASLVSGPLSHSASFSSPMGSTEDLNSKGSLSMDQGDDKSNELVMSCPYFRNEIGGEGERKISLSKSNSGSFSGCESASFESTLSSHCTNAGVAVLEVPKENLVLHLDRVKRYIVEHVDLGAYYYRKFFYQK

SEQ ID NO: 42922 - protein, 19 aa, Homo sapiens
  MAP TO AC004974.1; EXPRESSED IN HBL100, SIGNAL = 1.1; EXPRESSED IN BT474, SIGNAL = 1.2; EXPRESSED IN BRAIN, SIGNAL = 1.1; EXPRESSED IN LUNG, SIGNAL = 2.6; EXPRESSED IN HELA, SIGNAL = 1.3; EST_HUMAN HIT: BF350126.1, EVALUE 2.00e-04
GGKGKDCRLAPKKGKHKRI

SEQ ID NO: 42923 - protein, 46 aa, Homo sapiens
  MAP TO AL034554.8; EXPRESSED IN PLACENTA, SIGNAL = 0.66; EXPRESSED IN LUNG, SIGNAL = 0.67; EXPRESSED IN BRAIN, SIGNAL = 0.68
GGGQVSTLWTFKKKRKKPPQQKAKDPKLIVLDSNLYNFKQEIKGAY

SEQ ID NO: 42924 - protein, 29 aa, Homo sapiens
  MAP TO AP000217.1; EXPRESSED IN LUNG, SIGNAL = 0.66; EXPRESSED IN BRAIN, SIGNAL = 0.92; EXPRESSED IN PLACENTA, SIGNAL = 0.59; EXPRESSED IN HELA, SIGNAL = 0.84
REEEEREGLRKAKVRKVSAAVEPGAARPA

SEQ ID NO: 42925 - protein, 49 aa, Homo sapiens
  MAP TO AP000094.1; EXPRESSED IN FETAL LIVER, SIGNAL = 0.77; EXPRESSED IN HELA, SIGNAL = 0.76; EXPRESSED IN ADULT LIVER, SIGNAL = 1.6; EXPRESSED IN BRAIN, SIGNAL = 0.79; EXPRESSED IN PLACENTA, SIGNAL = 0.97; EXPRESSED IN LUNG, SIGNAL = 0.81; EXPRESSED IN HBL100, SIGNAL = 0.94; EXPRESSED IN BONE MARROW, SIGNAL = 0.7; EXPRESSED IN BT474, SIGNAL = 0.76; SWISSPROT HIT: Q60934, EVALUE 9.00e-14; EST_HUMAN HIT: BF509857.1, EVALUE 3.00e-03
HRASQLTVSSLQCHRHKPWRLGPRFMNLIKEASDAPSQPRGPSEHCWAC

SEQ ID NO: 42926 - protein, 222 aa, Homo sapiens
  MAP TO AL096801.16; EXPRESSED IN PLACENTA, SIGNAL = 1.4; EXPRESSED IN HBL100, SIGNAL = 1.1; EXPRESSED IN HELA, SIGNAL = 1.3; EXPRESSED IN BRAIN, SIGNAL = 1.2; EXPRESSED IN LUNG, SIGNAL = 2.1; SWISSPROT HIT: P20333, EVALUE 5.00e-24; EST_HUMAN HIT: BF530378.1, EVALUE 3.00e-93
LGFLSTTTAQPEQKASNLIGTYRHVDRATGQVLTCDKCPAGTYVSEHCTNTSLRVCSSCPVGTFTRHENGIEKCHDCSQPCPWPMIEKLPCAALTDRECTCPPGMFQSNATCAPHTVCPVGWGVRKKGTETEDVRCKQCARGTFSDVPSSVMKCKAYTDCLSQNLVVIKPGTKETDNVCGTLPSFSSSTSPSPGTAIFPRPEHMETHEVPSSTYVPKGNLTS

SEQ ID NO: 42927 - protein, 220 aa, Homo sapiens
  MAP TO AL109928.12; EXPRESSED IN BRAIN, SIGNAL = 1.1; EST_HUMAN HIT: AA994842.1, EVALUE 2.00e-76; SWISSPROT HIT: Q29052, EVALUE 1.30e+00
SWDLRDMALLLNAENKTEAVPRVGGLLGKYIDRLIQLEWLQVQTVQCEKAKGGKARPPTAPGTSGALKSPGRSKLIASALSKPLPHQEGASKSGPSRKKAFHHEEIHPSHYAFETSPRPIDVLGGTRFCSQRQTLEMRTEEKKKKSSKSTKLQRWDLSGSGSSSKVETSGHIRVPKQAAVILDSADSCKASKTQAHAHPRKKGKAESCGHATVSSEKKLK

SEQ ID NO: 42928 - protein, 46 aa, Homo sapiens
  MAP TO AL035464.20; EXPRESSED IN LUNG, SIGNAL = 0.65; EXPRESSED IN BRAIN, SIGNAL = 0.7; EST_HUMAN HIT: AA350638.1, EVALUE 1.60e+00; SWISSPROT HIT: P76155, EVALUE 7.90e+00
MRDLGLPSSTQAPLCKAEVLFQVKQAKNTRSRLPLPAHKVMAPCQE

SEQ ID NO: 42929 - protein, 48 aa, Homo sapiens
  MAP TO AL050315.8; EXPRESSED IN LUNG, SIGNAL = 0.7; EXPRESSED IN BRAIN, SIGNAL = 1.2; EXPRESSED IN PLACENTA, SIGNAL = 0.6; EST_HUMAN HIT: N94059.1, EVALUE 1.00e-20; SWISSPROT HIT: P10894, EVALUE 1.00e-22
QISVDGFMRYLSGEENGVVSPEKLDLNEDMSQPLSHYFINSSHNTYLT

SEQ ID NO: 42930 - protein, 28 aa, Homo sapiens
  MAP TO AC007744.1; EXPRESSED IN PLACENTA, SIGNAL = 0.69; EXPRESSED IN LUNG, SIGNAL = 0.64; EXPRESSED IN BRAIN, SIGNAL = 1.4; EXPRESSED IN HELA, SIGNAL =  38; EST_HUMAN HIT: AA449549.1, EVALUE 1.00e-10
VVWRKLGDAAGSCPGIRQHLSGNQYKGP

SEQ ID NO: 42931 - protein, 36 aa, Homo sapiens
  MAP TO AC006499.11; EXPRESSED IN ADULT LIVER, SIGNAL =   1; EXPRESSED IN PLACENTA, SIGNAL = 0.82; EXPRESSED IN BT474, SIGNAL = 0.66; EXPRESSED IN FETAL LIVER, SIGNAL = 0.76; EXPRESSED IN LUNG, SIGNAL = 0.6; EXPRESSED IN HELA, SIGNAL = 0.74; EXPRESSED IN BRAIN, SIGNAL = 1.1; EXPRESSED IN HBL100, SIGNAL = 1.1
QQVMNSTILKHLRAVHVYLSNLVLFSRTRPSCTGTQ

SEQ ID NO: 42932 - protein, 57 aa, Homo sapiens
  MAP TO AC007219.1; EXPRESSED IN HBL100, SIGNAL = 1.1; EXPRESSED IN HELA, SIGNAL = 0.94; EXPRESSED IN PLACENTA, SIGNAL = 0.78; EXPRESSED IN BRAIN, SIGNAL = 0.9; EXPRESSED IN ADULT LIVER, SIGNAL = 0.94; EXPRESSED IN LUNG, SIGNAL = 0.92; EXPRESSED IN FETAL LIVER, SIGNAL = 0.84; EXPRESSED IN BONE MARROW, SIGNAL = 0.94; EXPRESSED IN BT474, SIGNAL = 0.7
MQVTVPTCCCLSLTFLLLSLSLSLPWRQIGLPSDLALNKTDRQRTKTSVNSVKLIFH

SEQ ID NO: 42933 - protein, 25 aa, Homo sapiens
  MAP TO AC007255.2; EXPRESSED IN PLACENTA, SIGNAL = 1.4; EXPRESSED IN HBL100, SIGNAL = 0.98; EXPRESSED IN ADULT LIVER, SIGNAL = 1.2; EXPRESSED IN FETAL LIVER, SIGNAL =   1; EXPRESSED IN BONE MARROW, SIGNAL = 1.2; EXPRESSED IN BRAIN, SIGNAL = 0.99; EXPRESSED IN HELA, SIGNAL = 0.99
SPPWFEGLPSHTTTTTSIMRRHTTL

SEQ ID NO: 42934 - protein, 139 aa, Homo sapiens
  MAP TO AL034420.16; EXPRESSED IN FETAL LIVER, SIGNAL = 1.1; EXPRESSED IN LUNG, SIGNAL = 0.65; EXPRESSED IN PLACENTA, SIGNAL = 0.67; EXPRESSED IN BT474, SIGNAL = 0.74; EXPRESSED IN BONE MARROW, SIGNAL = 0.79; EXPRESSED IN HBL100, SIGNAL = 0.86; EXPRESSED IN HELA, SIGNAL = 0.85; EXPRESSED IN ADULT LIVER, SIGNAL = 0.73; EXPRESSED IN BRAIN, SIGNAL = 0.72; EST_HUMAN HIT: AI638036.1, EVALUE 3.00e-62; SWISSPROT HIT: O04059, EVALUE 3.40e+00
VHYMTHGANNNSARRGRKLAIENTMALLGTDGKRVSEIFPKEILAPSVNVDPVVWNQYTSMLNGGLAVKTNEISVIQSGGVPTLPVSLGATSVVNNATVSKMDGSQSGISADVEKPSATDGVPKHQFPHFLEENKIAVS

SEQ ID NO: 42935 - protein, 67 aa, Homo sapiens
  MAP TO AL049767.9; EXPRESSED IN LUNG, SIGNAL = 0.75; EXPRESSED IN HELA, SIGNAL = 0.61; EXPRESSED IN BRAIN, SIGNAL = 0.7; EXPRESSED IN PLACENTA, SIGNAL = 0.61; EXPRESSED IN BONE MARROW, SIGNAL = 1.1; EXPRESSED IN ADULT LIVER, SIGNAL = 0.71; EST_HUMAN HIT: BF221822.1, EVALUE 2.00e-35; SWISSPROT HIT: P04279, EVALUE 2.00e-36
EPWHGENAKGESGQSTNREQDLLSHEQKGRHQHGSHGGLDIVIIEQEDDSDRHLAQHLNNDRNPLFT

SEQ ID NO: 42936 - protein, 44 aa, Homo sapiens
  MAP TO AC009227.1; EXPRESSED IN FETAL LIVER, SIGNAL = 0.65; EXPRESSED IN LUNG, SIGNAL = 0.71; EXPRESSED IN PLACENTA, SIGNAL = 0.67; EXPRESSED IN BONE MARROW, SIGNAL = 0.71; EXPRESSED IN HELA, SIGNAL = 0.66; EXPRESSED IN BRAIN, SIGNAL = 0.93; EST_HUMAN HIT: AW664181.1, EVALUE 6.00e-14; SWISSPROT HIT: Q10473, EVALUE 2.00e-15
VVKVDYGDVSVRKTLRENLKCKPFSWYLENIYPDSQIPRRYYSL

SEQ ID NO: 42937 - protein, 51 aa, Homo sapiens
  MAP TO AL049594.4; EXPRESSED IN PLACENTA, SIGNAL = 1.3; EXPRESSED IN BRAIN, SIGNAL = 0.9; EST_HUMAN HIT: BF338634.1, EVALUE 4.00e-21; SWISSPROT HIT: P42128, EVALUE 5.20e-01
QQSRGQGGLAPGQHQLPAGPIPGSAVHHHWDWRLCGRGRGPHRLPLQEQPP

SEQ ID NO: 42938 - protein, 27 aa, Homo sapiens
  MAP TO AL049594.4; EXPRESSED IN PLACENTA, SIGNAL = 1.3; EXPRESSED IN BRAIN, SIGNAL = 0.9
CCPSPLGLASMWAWPWPSSPTSPRTTT

SEQ ID NO: 42939 - protein, 58 aa, Homo sapiens
  MAP TO AC007511.1; EXPRESSED IN PLACENTA, SIGNAL = 2.1; EXPRESSED IN ADULT LIVER, SIGNAL = 1.2; EXPRESSED IN BT474, SIGNAL = 0.96; EXPRESSED IN LUNG, SIGNAL = 1.1; EXPRESSED IN BRAIN, SIGNAL = 0.99; EXPRESSED IN HBL100, SIGNAL = 0.98; EXPRESSED IN HELA, SIGNAL = 1.6; SWISSPROT HIT: P11364, EVALUE 1.20e+00; EST_HUMAN HIT: AA403053.1, EVALUE 2.00e-17
  unsure 8
RGSSNGFXFGLSHHNSPHPTSQGANVGVLPAAKYVYVKFAFWHRGNNHRMSPRTHWAH

SEQ ID NO: 42940 - protein, 54 aa, Homo sapiens; identical to SEQ ID NO: 35014
  MAP TO AC010092.2; EXPRESSED IN HBL100, SIGNAL = 0.99; EXPRESSED IN PLACENTA, SIGNAL = 2.9; EXPRESSED IN BRAIN, SIGNAL = 1.5; EST_HUMAN HIT: BE173552.1, EVALUE 3.00e-25; SWISSPROT HIT: P06915, EVALUE 4.00e-01

SEQ ID NO: 42941 - protein, 48 aa, Homo sapiens
  MAP TO AC011743.2; EXPRESSED IN BRAIN, SIGNAL = 0.97; EXPRESSED IN HBL100, SIGNAL =   1; EXPRESSED IN PLACENTA, SIGNAL = 0.93; EXPRESSED IN ADULT LIVER, SIGNAL =   1; SWISSPROT HIT: Q02201, EVALUE 5.30e-01; EST_HUMAN HIT: AI732456.1, EVALUE 2.00e-24
VNYWNSNMNEVQGVVIDQEGKAVYRLFGKWHEGLYCGVAPSAKCIWRP

SEQ ID NO: 42942 - protein, 60 aa, Homo sapiens
  MAP TO AL031284.9; EXPRESSED IN BT474, SIGNAL = 1.2; EXPRESSED IN ADULT LIVER, SIGNAL = 1.2; EXPRESSED IN HBL100, SIGNAL = 0.97; EXPRESSED IN HELA, SIGNAL =   1; EXPRESSED IN BRAIN, SIGNAL = 0.94; EXPRESSED IN BONE MARROW, SIGNAL = 0.93; SWISSPROT HIT: Q36423, EVALUE 7.90e+00; EST_HUMAN HIT: AU130984.1, EVALUE 3.00e-22
TFLYLKFLVVWALVLLADFVLEFRFEYLWPFWLFIRSVYDSFRYQGLVCLVIHVFHVWGP

SEQ ID NO: 42943 - protein, 95 aa, Homo sapiens
  MAP TO AF109907.1; EXPRESSED IN BONE MARROW, SIGNAL = 1.3; EXPRESSED IN LUNG, SIGNAL = 1.8; EXPRESSED IN PLACENTA, SIGNAL = 1.7; EXPRESSED IN ADULT LIVER, SIGNAL =   1; EXPRESSED IN BT474, SIGNAL = 1.2; EXPRESSED IN BRAIN, SIGNAL = 1.1; EXPRESSED IN HELA, SIGNAL =   1; EXPRESSED IN HBL100, SIGNAL = 1.9; EXPRESSED IN FETAL LIVER, SIGNAL = 1.1; EST_HUMAN HIT: BE888827.1, EVALUE 9.00e-19
NWKKRKAKRKKKDRKLRKNGEKERGSVKGNEKGENGNEKGKENVNEKRRKNGSGNENGIGTVTGQKRETEIGIEREIVTGIEKGAQIVIRIAVDQ

SEQ ID NO: 42944 - protein, 50 aa, Homo sapiens
  MAP TO AC007679.2; EXPRESSED IN PLACENTA, SIGNAL = 0.85; EXPRESSED IN BONE MARROW, SIGNAL = 0.79; EXPRESSED IN FETAL LIVER, SIGNAL = 0.97; EXPRESSED IN ADULT LIVER, SIGNAL = 0.71; EXPRESSED IN BRAIN, SIGNAL = 0.77; EXPRESSED IN BT474, SIGNAL = 1.2; EXPRESSED IN LUNG, SIGNAL = 0.82; EST_HUMAN HIT: BF327621.1, EVALUE 5.00e-22
APTVDPPRTDRILMKATAFSPHFSCISRLQRLVKLCTQKHQLDTDLFPHL

SEQ ID NO: 42945 - protein, 52 aa, Homo sapiens
  MAP TO AC008079.7; EXPRESSED IN FETAL LIVER, SIGNAL =   1; EXPRESSED IN LUNG, SIGNAL = 0.68; EXPRESSED IN PLACENTA, SIGNAL = 0.65; EXPRESSED IN BONE MARROW, SIGNAL = 0.64; EXPRESSED IN HBL100, SIGNAL = 1.8; EXPRESSED IN ADULT LIVER, SIGNAL = 1.1; EXPRESSED IN BRAIN, SIGNAL = 0.89; EXPRESSED IN BT474, SIGNAL = 1.2; EXPRESSED IN HELA, SIGNAL = 1.4; EST_HUMAN HIT: BE886622.1, EVALUE 5.00e-21; SWISSPROT HIT: Q9UMW8, EVALUE 4.00e-22
ITVPRGADEQRRSVPFQMLLLLEKMQDSRQKAVRPLELAYCLQKCNVPCKIP

SEQ ID NO: 42946 - protein, 35 aa, Homo sapiens
  MAP TO AC008277.1; EXPRESSED IN ADULT LIVER, SIGNAL = 0.85; EXPRESSED IN BRAIN, SIGNAL = 1.3; EXPRESSED IN PLACENTA, SIGNAL = 1.5; EXPRESSED IN BT474, SIGNAL = 1.3; EXPRESSED IN FETAL LIVER, SIGNAL =   1; EXPRESSED IN HELA, SIGNAL = 0.89; EXPRESSED IN LUNG, SIGNAL = 1.1; EXPRESSED IN HBL100, SIGNAL = 0.86; EXPRESSED IN BONE MARROW, SIGNAL = 1.4; SWISSPROT HIT: P41832, EVALUE 6.20e+00; EST_HUMAN HIT: AV701869.1, EVALUE 3.00e-14
QKGRTWYILNINHLLNCARSMMENLLAKTKAVHMH

SEQ ID NO: 42947 - protein, 68 aa, Homo sapiens
  MAP TO AC008176.1; EXPRESSED IN FETAL LIVER, SIGNAL = 0.67; EXPRESSED IN LUNG, SIGNAL = 0.87; EXPRESSED IN ADULT LIVER, SIGNAL = 0.88; EXPRESSED IN BRAIN, SIGNAL =   1; EXPRESSED IN BONE MARROW, SIGNAL = 0.65; EXPRESSED IN HELA, SIGNAL = 0.64; EST_HUMAN HIT: AA759149.1, EVALUE 4.00e-32; SWISSPROT HIT: Q55276, EVALUE 1.70e+00
SKCSGFHSCFTCACGQPAYAHDTVVETKQERLAQEKPVGQDIPYAAMGGLTGFSSLAEGYMRLDDSGI

SEQ ID NO: 42948 - protein, 24 aa, Homo sapiens
  MAP TO AC008176.1; EXPRESSED IN FETAL LIVER, SIGNAL = 0.67; EXPRESSED IN LUNG, SIGNAL = 0.87; EXPRESSED IN ADULT LIVER, SIGNAL = 0.88; EXPRESSED IN BRAIN, SIGNAL =   1; EXPRESSED IN BONE MARROW, SIGNAL = 0.65; EXPRESSED IN HELA, SIGNAL = 0.64; EST_HUMAN HIT: AW751066.1, EVALUE 2.00e-05
VPSVQDSIAASLVLVVSLHMPMTQ

SEQ ID NO: 42949 - protein, 64 aa, Homo sapiens
  MAP TO AL035420.14; EXPRESSED IN HELA, SIGNAL =   1; EXPRESSED IN PLACENTA, SIGNAL = 0.65; EXPRESSED IN BT474, SIGNAL = 0.73; EXPRESSED IN FETAL LIVER, SIGNAL = 0.58; EXPRESSED IN LUNG, SIGNAL = 0.69; EXPRESSED IN BRAIN, SIGNAL = 0.71; EXPRESSED IN BONE MARROW, SIGNAL = 0.67; SWISSPROT HIT: P27870, EVALUE 7.50e+00; EST_HUMAN HIT: AI698179.1, EVALUE 3.80e+00
QPVNTAGFISVFVGLGPNTKAFKNVELNCGVAIMVIIVDIYQMFLMHSHYAKHSKDVISFNYQN

SEQ ID NO: 42950 - protein, 65 aa, Homo sapiens
  MAP TO AL096773.6; EXPRESSED IN ADULT LIVER, SIGNAL = 1.2; EXPRESSED IN BT474, SIGNAL = 0.99; EXPRESSED IN BONE MARROW, SIGNAL = 0.92; EXPRESSED IN BRAIN, SIGNAL = 0.9; EXPRESSED IN LUNG, SIGNAL = 3.3; EST_HUMAN HIT: AW342074.1, EVALUE 6.00e-32; SWISSPROT HIT: P23109, EVALUE 8.00e-33
VDTHIHAAACMNQKHLLRFIKKSYQIDADRVVYSTKEKNLTLKELFAKLKMHPYDLTVDSLDVHA

SEQ ID NO: 42951 - protein, 25 aa, Homo sapiens
  MAP TO AL096773.6; EXPRESSED IN ADULT LIVER, SIGNAL = 1.2; EXPRESSED IN BT474, SIGNAL = 0.99; EXPRESSED IN BONE MARROW, SIGNAL = 0.92; EXPRESSED IN BRAIN, SIGNAL = 0.9; EXPRESSED IN LUNG, SIGNAL = 3.3; EST_HUMAN HIT: AW342074.1, EVALUE 1.00e-07
ICCVLLRNLTKLMLTEWSIAPKRRI

SEQ ID NO: 42952 - protein, 41 aa, Homo sapiens
  MAP TO AC007910.1; EXPRESSED IN LUNG, SIGNAL = 0.83; EXPRESSED IN ADULT LIVER, SIGNAL = 0.83; EXPRESSED IN BRAIN, SIGNAL = 0.73; EXPRESSED IN PLACENTA, SIGNAL = 0.73; EXPRESSED IN BT474, SIGNAL = 0.85; EXPRESSED IN FETAL LIVER, SIGNAL = 0.8; EXPRESSED IN HELA, SIGNAL = 0.92; EXPRESSED IN HBL100, SIGNAL = 0.79; EXPRESSED IN BONE MARROW, SIGNAL = 0.94; EST_HUMAN HIT: AW815200.1, EVALUE 6.00e-07; SWISSPROT HIT: P26444, EVALUE 7.10e-01
GSKHCSPDLSTFRSIFSCNDLSTRVAGLPQENFPGCKNASR

SEQ ID NO: 42953 - protein, 330 aa, Homo sapiens
  MAP TO AC007498.2; EXPRESSED IN BT474, SIGNAL = 1.1; EXPRESSED IN FETAL LIVER, SIGNAL = 1.2; EXPRESSED IN BONE MARROW, SIGNAL = 1.2; EXPRESSED IN LUNG, SIGNAL = 1.4; EXPRESSED IN BRAIN, SIGNAL = 1.4; EXPRESSED IN HELA, SIGNAL = 0.96; EXPRESSED IN HBL100, SIGNAL = 0.94; EXPRESSED IN PLACENTA, SIGNAL = 0.97; EXPRESSED IN ADULT LIVER, SIGNAL = 1.5; EST_HUMAN HIT: AU131453.1, EVALUE 1.00e-105; SWISSPROT HIT: P39806, EVALUE 4.00e-43
VLSSPAADCGPAGSATTFTNPLLPLMSEQFKAKFPFGGLLDSAQASETSKLQQLVENIDKKATDPNECIICHRVLSCQSALKMHYRTHTGERPFKCKICGRAFTTKGNLKTHYSVHRAMPPLRVQHSCPICQKKFTNAVVLQQHIRMHMGGQIPNTPVPDSYSESMESDTGSFDEKNFDDLDNFSDENMEDCPEGSIPDTPKSADASQDSLSSSPLPLEMSSIAALENQMKMINAGLAEQLQASLKSVENGSIEGDVLTNDSSSVGGDMESQSAGSPAISESTSSMQALSPSNSTQEFHKSPSIEEKPQRAVPSEFANGLSPTPVNGGAL

SEQ ID NO: 42954 - protein, 36 aa, Homo sapiens
  MAP TO AC007498.2; EXPRESSED IN BT474, SIGNAL = 1.1; EXPRESSED IN FETAL LIVER, SIGNAL = 1.2; EXPRESSED IN BONE MARROW, SIGNAL = 1.2; EXPRESSED IN LUNG, SIGNAL = 1.4; EXPRESSED IN BRAIN, SIGNAL = 1.4; EXPRESSED IN HELA, SIGNAL = 0.96; EXPRESSED IN HBL100, SIGNAL = 0.94; EXPRESSED IN PLACENTA, SIGNAL = 0.97; EXPRESSED IN ADULT LIVER, SIGNAL = 1.5; SWISSPROT HIT: Q03746, EVALUE 8.20e+00; EST_HUMAN HIT: AU131453.1, EVALUE 1.00e-14
SECIWEARSPTPQSPTATLSPWSLTQVPLMRKILMT

SEQ ID NO: 42955 - protein, 45 aa, Homo sapiens
  MAP TO AC006344.2; EXPRESSED IN HELA, SIGNAL = 0.7; EXPRESSED IN BRAIN, SIGNAL = 0.69; EXPRESSED IN BT474, SIGNAL = 0.68; EXPRESSED IN ADULT LIVER, SIGNAL = 0.67; EXPRESSED IN PLACENTA, SIGNAL = 0.78; EXPRESSED IN LUNG, SIGNAL = 0.89; EXPRESSED IN FETAL LIVER, SIGNAL = 0.72; EXPRESSED IN HBL100, SIGNAL = 0.82; EXPRESSED IN BONE MARROW, SIGNAL = 1.5; SWISSPROT HIT: P15056, EVALUE 6.00e-21; EST_HUMAN HIT: AA953593.1, EVALUE 8.00e-20
IIFMVGRGYLSPDLSKVRSNCPKAMKRLMAECLKKKRDERPLFPQ

SEQ ID NO: 42956 - protein, 84 aa, Homo sapiens
  MAP TO AC007683.2; EXPRESSED IN FETAL LIVER, SIGNAL = 0.9; EXPRESSED IN LUNG, SIGNAL = 0.85; EXPRESSED IN BRAIN, SIGNAL = 0.9; EXPRESSED IN BT474, SIGNAL =   1; EXPRESSED IN BONE MARROW, SIGNAL =   1; EXPRESSED IN HBL100, SIGNAL = 1.4; EXPRESSED IN HELA, SIGNAL = 0.72; EXPRESSED IN ADULT LIVER, SIGNAL = 1.4; SWISSPROT HIT: P52520, EVALUE 6.70e-01; EST_HUMAN HIT: AW105430.1, EVALUE 5.00e-42
VDSSFLSLYDSHVAKEILLRVLTLFQNIKNCLKIEGHLAVQPTFTEGSLFFLLHGEECAQKIRALVDHHDAEVKEKVVTIIPKI

SEQ ID NO: 42957 - protein, 33 aa, Homo sapiens
  MAP TO AC010906.2; EXPRESSED IN ADULT LIVER, SIGNAL = 1.4; EXPRESSED IN LUNG, SIGNAL = 1.1; EXPRESSED IN BRAIN, SIGNAL = 1.1; EXPRESSED IN PLACENTA, SIGNAL = 1.4; EXPRESSED IN HBL100, SIGNAL = 0.98; EXPRESSED IN HELA, SIGNAL = 1.1
RWHRFDARTPLTQGSRPMLQLSLEEAFPEHEED

SEQ ID NO: 42958 - protein, 278 aa, Homo sapiens
  MAP TO AC007842.1; EXPRESSED IN BONE MARROW, SIGNAL = 1.5; EXPRESSED IN HBL100, SIGNAL = 0.96; EXPRESSED IN ADULT LIVER, SIGNAL = 0.67; EXPRESSED IN PLACENTA, SIGNAL = 0.59; EXPRESSED IN BT474, SIGNAL = 1.2; EXPRESSED IN FETAL LIVER, SIGNAL = 0.8; EXPRESSED IN LUNG, SIGNAL = 0.61; EXPRESSED IN BRAIN, SIGNAL = 0.74; SWISSPROT HIT: Q14585, EVALUE 1.00e-115; EST_HUMAN HIT: AF150239.1, EVALUE 1.00e-100
LARHKNIHTGEKPFECKDCGKAFNRGSNLVQHQSIHTGEKPYECKECGKAFRLHLQLSQHEKTHTGEKPFECKECGKFFRRGSNLNQHRSIHTGKKPFECKECGKAFRLHMHLIRHQKFHTGEKPFECKECGKAFSLHTQLNHHKNIHTGEKPFKCKECGKSFNRVSNLVQHQSIHAGVKPYECKECGKGFSRVSNLIQHQKTHSSAKPFVCKECRKTFRYHYQLTEHYRIHTGEKPFECKECGKAFGLLTQLAQHQIIHTGEKPFKCKECGKAFNRG

SEQ ID NO: 42959 - protein, 49 aa, Homo sapiens
  MAP TO AC007842.1; EXPRESSED IN BONE MARROW, SIGNAL = 1.5; EXPRESSED IN HBL100, SIGNAL = 0.96; EXPRESSED IN ADULT LIVER, SIGNAL = 0.67; EXPRESSED IN PLACENTA, SIGNAL = 0.59; EXPRESSED IN BT474, SIGNAL = 1.2; EXPRESSED IN FETAL LIVER, SIGNAL = 0.8; EXPRESSED IN LUNG, SIGNAL = 0.61; EXPRESSED IN BRAIN, SIGNAL = 0.74; SWISSPROT HIT: P45608, EVALUE 3.50e+00; EST_HUMAN HIT: AV695071.1, EVALUE 7.00e-10
KKFIPMRNPLYVGNVRWPFDIITNLFNIAKFILVGNPLNVKNVERPLVF

SEQ ID NO: 42960 - protein, 19 aa, Homo sapiens
  MAP TO AC005973.2; EXPRESSED IN BRAIN, SIGNAL = 0.68; EXPRESSED IN BT474, SIGNAL = 0.75; EXPRESSED IN BONE MARROW, SIGNAL = 0.78; EXPRESSED IN ADULT LIVER, SIGNAL = 0.68; EXPRESSED IN FETAL LIVER, SIGNAL = 0.8; EXPRESSED IN LUNG, SIGNAL = 0.63; EXPRESSED IN PLACENTA, SIGNAL = 0.77; EST_HUMAN HIT: BF431017.1, EVALUE 4.80e+00
MGDPAPARSLDDIDLSALR

SEQ ID NO: 42961 - protein, 18 aa, Homo sapiens
  MAP TO AC005973.2; EXPRESSED IN BRAIN, SIGNAL = 0.68; EXPRESSED IN BT474, SIGNAL = 0.75; EXPRESSED IN BONE MARROW, SIGNAL = 0.78; EXPRESSED IN ADULT LIVER, SIGNAL = 0.68; EXPRESSED IN FETAL LIVER, SIGNAL = 0.8; EXPRESSED IN LUNG, SIGNAL = 0.63; EXPRESSED IN PLACENTA, SIGNAL = 0.77; EST_HUMAN HIT: AA992179.1, EVALUE 6.30e+00
RERPRCPVPHGGHGRPSP

SEQ ID NO: 42962 - protein, 56 aa, Homo sapiens
  MAP TO Z98884.11; EXPRESSED IN BONE MARROW, SIGNAL = 1.1; EXPRESSED IN FETAL LIVER, SIGNAL = 2.2; EXPRESSED IN LUNG, SIGNAL = 0.68; EXPRESSED IN HELA, SIGNAL = 0.6; EXPRESSED IN BRAIN, SIGNAL = 0.78; EST_HUMAN HIT: H37988.1, EVALUE 6.00e-10; SWISSPROT HIT: O70361, EVALUE 1.00e-11
MTLQQVYASVNKIKNLGQQLYIESMTKSSFKPVTGTRTEPNGGGESANGGGESAGS

SEQ ID NO: 42963 - protein, 62 aa, Homo sapiens
  MAP TO AC007405.2; EXPRESSED IN LUNG, SIGNAL = 0.72; EXPRESSED IN ADULT LIVER, SIGNAL = 1.5; EXPRESSED IN HBL100, SIGNAL = 0.94; EXPRESSED IN HELA, SIGNAL = 0.65; EXPRESSED IN BRAIN, SIGNAL = 0.69; EST_HUMAN HIT: AA643697.1, EVALUE 2.00e-01
EVSKDAVIVKQEKNNEYCLQDIDDKLSESAEDDGEDDTNDEDDDEDSNPKKNTQAPLELMAE

SEQ ID NO: 42964 - protein, 88 aa, Homo sapiens; identical to SEQ ID NO: 42769
  MAP TO AL121760.4; EXPRESSED IN BONE MARROW, SIGNAL = 2.2; EXPRESSED IN BRAIN, SIGNAL = 2.4; EXPRESSED IN HELA, SIGNAL = 1.6; EXPRESSED IN PLACENTA, SIGNAL = 1.7; EXPRESSED IN LUNG, SIGNAL = 1.7; EXPRESSED IN HBL100, SIGNAL = 1.5; EXPRESSED IN ADULT LIVER, SIGNAL = 1.5; EXPRESSED IN FETAL LIVER, SIGNAL = 1.4; EXPRESSED IN BT474, SIGNAL = 2.7; SWISSPROT HIT: Q60843, EVALUE 1.20e+00; EST_HUMAN HIT: BE734972.1, EVALUE 1.00e+00

SEQ ID NO: 42965 - protein, 57 aa, Homo sapiens
  MAP TO AC011330.4; EXPRESSED IN HBL100, SIGNAL =   1; EXPRESSED IN HELA, SIGNAL =   1; EXPRESSED IN PLACENTA, SIGNAL = 1.1; EXPRESSED IN ADULT LIVER, SIGNAL = 1.1; EXPRESSED IN BT474, SIGNAL =   1; EXPRESSED IN LUNG, SIGNAL = 0.98; EXPRESSED IN BRAIN, SIGNAL = 1.4; EST_HUMAN HIT: AI492117.1, EVALUE 2.00e-19; SWISSPROT HIT: Q24270, EVALUE 7.70e+00
LLESTNTKLWPLKLTLEVAAWFILLIFILEILLKWLSNFSVFWKSAWNVFDFVVTML

SEQ ID NO: 42966 - protein, 44 aa, Homo sapiens
  MAP TO AC011330.4; EXPRESSED IN HBL100, SIGNAL =   1; EXPRESSED IN HELA, SIGNAL =   1; EXPRESSED IN PLACENTA, SIGNAL = 1.1; EXPRESSED IN ADULT LIVER, SIGNAL = 1.1; EXPRESSED IN BT474, SIGNAL =   1; EXPRESSED IN LUNG, SIGNAL = 0.98; EXPRESSED IN BRAIN, SIGNAL = 1.4; EST_HUMAN HIT: AV723803.1, EVALUE 2.00e-14
TFIPPLLYLHRIAGIHKYQTMAIEADLGGGSLVYLAYFHPGDPS

SEQ ID NO: 42967 - protein, 695 aa, Homo sapiens
  MAP TO AC002382.1; EXPRESSED IN HELA, SIGNAL = 1.5; EXPRESSED IN FETAL LIVER, SIGNAL = 1.8; EXPRESSED IN BT474, SIGNAL = 1.3; EXPRESSED IN BRAIN, SIGNAL = 1.2; EXPRESSED IN LUNG, SIGNAL = 1.4; EXPRESSED IN BONE MARROW, SIGNAL = 1.2; EXPRESSED IN PLACENTA, SIGNAL = 1.8; EXPRESSED IN HBL100, SIGNAL = 1.2; EXPRESSED IN ADULT LIVER, SIGNAL = 1.7; EST_HUMAN HIT: BE091605.1, EVALUE 8.00e-04; SWISSPROT HIT: P08640, EVALUE 5.90e-01; EST_HUMAN HIT: BE091605.1, EVALUE 8.00e-04
LSRNTKEDHNLEDLKTELGKKPLELKTKRESQVSGLTEDQQKLIQEDYQYPKPKTMIANPDWEKFQRKYNLDYSDSEPNKSEYTFSANDLEMKNPKVPLYLNTSLKDCAGKNNSSENKLKEASRAHWQGCRKAVLNDIDEDLSFPSYISRFKKHKLIPCSPHLEFEDERQFNCKSSPCTVGGHSDHGKDFSVILKSNHISMTSKVSGCGNQRYKRYSPQSCLSRYSSSLDTSPSSMSSLRSTCSSHRFNGNSRGNLLCFHKREHHSVERHKRKCLKHNCFYLSDDITKSSQMQSEPQKERNCKLWESFKNEKYSKRRYCHCRERQKLGKNQQQFSGLKSTRIIYCDSNSQISCTGSSKKPPNCQGTQHDRLDSYSIEKMYYLNKSKRNQESLGSPHICDLGKVRPMKCNSGNISCLLKNCSSGPSETTESNTAEGERTPLTAKILLERVQAKKCQEQSSNVEISSNSCKSELEAPSQVPCTIQLAPSGCNRQALPLSEKIQYASESRNDQDSAIPRTTEKDKSKSSHTNNFTILADTDCDNHLSKGIIHLVTESQSLNIKRDATTKEQSKPLISEIQPFIQSCDPVPNEFPGAFPSNKYTGVTDSTETQEDQINLDLQDVSMHINHVEGNINSYYDRTMQKPDKVEDGLEMCHKSISPPLIQQPITFSPDEIDKYKILQLQAQQHMQKQLLSKHL

SEQ ID NO: 42968 - protein, 110 aa, Homo sapiens
  MAP TO AC002382.1; EXPRESSED IN HELA, SIGNAL = 1.5; EXPRESSED IN FETAL LIVER, SIGNAL = 1.8; EXPRESSED IN BT474, SIGNAL = 1.3; EXPRESSED IN BRAIN, SIGNAL = 1.2; EXPRESSED IN LUNG, SIGNAL = 1.4; EXPRESSED IN BONE MARROW, SIGNAL = 1.2; EXPRESSED IN PLACENTA, SIGNAL = 1.8; EXPRESSED IN HBL100, SIGNAL = 1.2; EXPRESSED IN ADULT LIVER, SIGNAL = 1.7; EST_HUMAN HIT: AV657592.1, EVALUE 4.20e-02; SWISSPROT HIT: Q90839, EVALUE 1.80e+00
KNLPRIISDKQRSTMPNRHQLQSDRRCLFGNQVLQTSSDLSNANHRTGVSFTFSKKVHLKLESSASVFSENTEETHDCNKSPIYKTKQTADKCKCCRFANKDTHLTKEKE

SEQ ID NO: 42969 - protein, 888 aa, Homo sapiens
  MAP TO AC005004.1; EXPRESSED IN PLACENTA, SIGNAL = 2.4; EXPRESSED IN BT474, SIGNAL = 1.2; EXPRESSED IN FETAL LIVER, SIGNAL = 1.1; EXPRESSED IN BONE MARROW, SIGNAL = 1.3; EXPRESSED IN BRAIN, SIGNAL = 1.6; EXPRESSED IN HELA, SIGNAL = 1.6; EXPRESSED IN HBL100, SIGNAL = 1.4; EXPRESSED IN LUNG, SIGNAL =   1; SWISSPROT HIT: Q95120, EVALUE 4.40e-01; EST_HUMAN HIT: AW851714.1, EVALUE 1.00e-96
KCNLKGAFVKMSGCDESTEGMVDIVYTDCSNKLAEGVLDVKASNLLDCGARQEKLAFQEDSRSTLSRRELDAAHTGTTGQDSDFPVTAASTVDFLKIKKSCEENVCRSLKDCEMEKCPDSCAHEMESVADHEPNKRILGRVNLSLNDSHYGQQDKGTSLRETQEMTEGSRLEPNSEFGKESTFGISSKESMSCHDESSVSLRSLKSIEIMPSQENSETNVNSEETDLKNLCKPKDGEMLCENVKDCTVLPEMKEIVSRDWSNSSDRDSVCTCVEKNACKACHPHENSSDRHLPLTVKTDIKVKGEETEEHQRGRLGYLTVGEQSEELVTRETGDGDPVSNISQTHFKCRGILNHAEKQQSPEVLDYMLQKEEKYIRQQKAHTISQQCISSSLLLDDAQNQNQPKADKDESTMINEITLAKLAKDSIVAQTQKLEDQKEERLHHPLRKDTESCTSPCLLGAPRKAQDPSSAGCDQIHGAFAKKGVLPLKKQPHRTCKKVSYQEQIIVGRKIGKIRSSAFLKSSSNPIPTKAHRLLSLCTLSAPTRLEPETAPTKSLVSHIPKQMSTPCHPLRSLNFRKTTKESALLNKLSILASKLAPAMKTQKLRYRRCSSELLPMAKSYKRLRYKRLLDGFSSSTEQLNPYLAASGWDKRPNSKPMALYSLESIKMTFIDLSNKMPSLLFGSEIFPVSFHVKSSSSDCTTESSRTFPEHCAPARLALGEALQCPSQPPKWTFSFFLSHGCPGMATFREDTGVHSQTHTQAPPQPPAPLQDYGGTAIVQTRADCSVLGLHTLLALCSPGCYRIWTKKRSFSSHMPTMQRLFMTQFTQGLKGLRSPASIADKVFCSLPYSVGRVLSIWSQHGPSVCSFEISSLHSPHCKRQPSLGTTSR

SEQ ID NO: 42970 - protein, 193 aa, Homo sapiens; identical to SEQ ID NO: 34148
  MAP TO AP000037.1; EXPRESSED IN ADULT LIVER, SIGNAL = 0.7; EXPRESSED IN PLACENTA, SIGNAL =   1; EXPRESSED IN BONE MARROW, SIGNAL = 1.4; EXPRESSED IN FETAL LIVER, SIGNAL = 0.83; EXPRESSED IN LUNG, SIGNAL = 0.64; EXPRESSED IN BRAIN, SIGNAL = 1.1; EXPRESSED IN HBL100, SIGNAL = 0.83; EST_HUMAN HIT: AU131904.1, EVALUE 1.00e-73; SWISSPROT HIT: O43426, EVALUE 1.00e-108

SEQ ID NO: 42971 - protein, 46 aa, Homo sapiens
  MAP TO AP000037.1; EXPRESSED IN ADULT LIVER, SIGNAL = 0.7; EXPRESSED IN PLACENTA, SIGNAL =   1; EXPRESSED IN BONE MARROW, SIGNAL = 1.4; EXPRESSED IN FETAL LIVER, SIGNAL = 0.83; EXPRESSED IN LUNG, SIGNAL = 0.64; EXPRESSED IN BRAIN, SIGNAL = 1.1; EXPRESSED IN HBL100, SIGNAL = 0.83
PGIDSELELEALLACNLQNSKHYFALQKATESTSLGLGWEQVTFEQ

SEQ ID NO: 42972 - protein, 169 aa, Homo sapiens
  MAP TO AL132780.1; EXPRESSED IN BT474, SIGNAL = 1.2; EXPRESSED IN BONE MARROW, SIGNAL =   1; EXPRESSED IN BRAIN, SIGNAL =  22; EST_HUMAN HIT: BE074132.1, EVALUE 1.00e-36; SWISSPROT HIT: P11137, EVALUE 2.20e-01
TKAESPAEKVPEESVLPLVQKSTLADYSAQKDLEPESDRSAQPLPLKIEELALAKGITEECLKQPSLEQKEGRRASHTLLPSHRLKQSADSSSSRSSSSSSSSSRSRSRSPDSSGSRSHSPLRSKQRDVAQARTHANPRGRPKMGSRSTSESRSRSRSRSRSASSNSRK

SEQ ID NO: 42973 - protein, 39 aa, Homo sapiens
  MAP TO AL132780.1; EXPRESSED IN BT474, SIGNAL = 1.2; EXPRESSED IN BONE MARROW, SIGNAL =   1; EXPRESSED IN BRAIN, SIGNAL =  22; EST_HUMAN HIT: BE835669.1, EVALUE 1.00e-17; SWISSPROT HIT: P52697, EVALUE 2.70e+00
PRHVLMPTLVVDPRWAPDQHQSPDQGHVHVLVQHQATAE

SEQ ID NO: 42974 - protein, 55 aa, Homo sapiens
  MAP TO AL121760.4; EXPRESSED IN BT474, SIGNAL = 0.92; EXPRESSED IN FETAL LIVER, SIGNAL = 1.5; EXPRESSED IN BONE MARROW, SIGNAL = 1.2; EXPRESSED IN BRAIN, SIGNAL = 1.1; EXPRESSED IN HBL100, SIGNAL = 1.3; EST_HUMAN HIT: AI207618.1, EVALUE 1.90e+00; SWISSPROT HIT: P25655, EVALUE 2.00e+00
KKKQVMARQPGKIHTFTQALILLYIFMFCMHHHPQTLWSLIQDKEGVKSKAQQTS

SEQ ID NO: 42975 - protein, 60 aa, Homo sapiens
  MAP TO AP000031.1; EXPRESSED IN FETAL LIVER, SIGNAL = 0.59; EXPRESSED IN ADULT LIVER, SIGNAL = 0.68; EXPRESSED IN PLACENTA, SIGNAL = 1.4; EXPRESSED IN BT474, SIGNAL = 0.6; EXPRESSED IN BONE MARROW, SIGNAL = 0.63; EXPRESSED IN LUNG, SIGNAL = 0.71; EXPRESSED IN BRAIN, SIGNAL = 0.69; SWISSPROT HIT: Q53046, EVALUE 6.70e+00; EST_HUMAN HIT: AV730946.1, EVALUE 1.00e-09
RMVIPSVEGGPGGRRWDLGGGFLISGLAPSPWCCSPDGECVLARPGRLKVCGASSFAFCL

SEQ ID NO: 42976 - protein, 21 aa, Homo sapiens
  MAP TO AL049837.3; EXPRESSED IN PLACENTA, SIGNAL = 0.94; EXPRESSED IN HELA, SIGNAL = 0.86; EXPRESSED IN BRAIN, SIGNAL = 0.85; EXPRESSED IN LUNG, SIGNAL = 0.71; EST_HUMAN HIT: BE716099.1, EVALUE 1.00e-04
TSFHEPAASLPQTGGRVLLSG

SEQ ID NO: 42977 - protein, 57 aa, Homo sapiens
  MAP TO AC011409.1; EXPRESSED IN PLACENTA, SIGNAL = 0.94; EXPRESSED IN LUNG, SIGNAL = 5.2; EXPRESSED IN BRAIN, SIGNAL = 2.3; EXPRESSED IN BONE MARROW, SIGNAL = 0.95; EXPRESSED IN FETAL LIVER, SIGNAL =   1; EXPRESSED IN ADULT LIVER, SIGNAL = 0.92; SWISSPROT HIT: Q9UKP4, EVALUE 5.00e-04; EST_HUMAN HIT: BF033017.1, EVALUE 8.30e-02
LDSEARDCNGPRKQYRICENPPCPAGLPGFRDWQCQAYSVRTSSPKHILQWQAVLDE

SEQ ID NO: 42978 - protein, 175 aa, Homo sapiens
  MAP TO AC007629.3; EXPRESSED IN HELA, SIGNAL = 0.9; EXPRESSED IN FETAL LIVER, SIGNAL =   1; EXPRESSED IN LUNG, SIGNAL = 0.79; EXPRESSED IN BT474, SIGNAL = 1.5; EXPRESSED IN ADULT LIVER, SIGNAL = 0.98; EXPRESSED IN BRAIN, SIGNAL = 1.1; EXPRESSED IN BONE MARROW, SIGNAL = 0.76; EXPRESSED IN HBL100, SIGNAL = 1.1; EST_HUMAN HIT: BF307519.1, EVALUE 2.00e-41; SWISSPROT HIT: P32583, EVALUE 8.10e-02
AYDGFASIGISRLLEPSDMVLLAIPDKLTVMTYLYQIRAHFSGQELNVVQIEENSSKSTYKVGNYETDTNSSVDQEKFYAELSDLKREPELQQPISGAVDFLSQDDSVFVNDSGVGESESEHQTPDDHLSPSTASPYCRRTKSDTEPQKSQQSSGRTSGSDDPGICSNTDSTQAQ

SEQ ID NO: 42979 - protein, 62 aa, Homo sapiens
  MAP TO AC010873.2; EXPRESSED IN PLACENTA, SIGNAL = 1.1; EXPRESSED IN HBL100, SIGNAL = 0.93; EXPRESSED IN FETAL LIVER, SIGNAL = 0.94; EXPRESSED IN ADULT LIVER, SIGNAL = 1.4; EXPRESSED IN BT474, SIGNAL = 0.96; EXPRESSED IN BRAIN, SIGNAL = 1.2; EXPRESSED IN BONE MARROW, SIGNAL = 0.99; EXPRESSED IN HELA, SIGNAL = 1.1; EST_HUMAN HIT: AW894432.1, EVALUE 7.80e+00; SWISSPROT HIT: Q20405, EVALUE 8.70e-01
NGTIIPSVIQIRNPGTIIDNCLFPTPISVTSANLVILTLSLPTATILVKHVIISYLVCEVVS

SEQ ID NO: 42980 - protein, 41 aa, Homo sapiens
  MAP TO AL031390.4; EXPRESSED IN BT474, SIGNAL = 0.82; EXPRESSED IN HELA, SIGNAL = 0.69; EXPRESSED IN LUNG, SIGNAL = 0.81; EXPRESSED IN PLACENTA, SIGNAL = 0.97; EXPRESSED IN BONE MARROW, SIGNAL = 0.95; EXPRESSED IN HBL100, SIGNAL = 0.71; EXPRESSED IN FETAL LIVER, SIGNAL = 0.83; EXPRESSED IN ADULT LIVER, SIGNAL = 0.87; EXPRESSED IN BRAIN, SIGNAL = 0.73; EST_HUMAN HIT: BE259129.1, EVALUE 6.30e+00; SWISSPROT HIT: P56391, EVALUE 8.00e+00
SAMHLSSKVSLWEGRCRKETCAKPWMWAWDYSYLEFLFPNL

SEQ ID NO: 42981 - protein, 42 aa, Homo sapiens
  MAP TO AL031297.4; EXPRESSED IN ADULT LIVER, SIGNAL = 0.75; EXPRESSED IN BONE MARROW, SIGNAL = 0.9; EXPRESSED IN HBL100, SIGNAL = 0.82; EXPRESSED IN BRAIN, SIGNAL = 0.68; EXPRESSED IN PLACENTA, SIGNAL = 0.78; EXPRESSED IN BT474, SIGNAL =   1; EXPRESSED IN FETAL LIVER, SIGNAL = 0.72; EXPRESSED IN LUNG, SIGNAL = 0.79; EXPRESSED IN HELA, SIGNAL = 0.75; EST_HUMAN HIT: AA744236.1, EVALUE 1.00e-16; SWISSPROT HIT: O13733, EVALUE 1.60e+00
DGIHLVTERVQPLEVALETLSSAEVCAGIYDILLALIFLHDR

SEQ ID NO: 42982 - protein, 75 aa, Homo sapiens
  MAP TO AC005674.9; EXPRESSED IN PLACENTA, SIGNAL = 0.8; EXPRESSED IN BT474, SIGNAL = 0.6; EXPRESSED IN LUNG, SIGNAL = 0.98; EXPRESSED IN BRAIN, SIGNAL = 0.81; EXPRESSED IN FETAL LIVER, SIGNAL = 0.72; EXPRESSED IN HELA, SIGNAL = 0.91; EXPRESSED IN ADULT LIVER, SIGNAL = 0.73; EST_HUMAN HIT: T73025.1, EVALUE 1.10e-02; SWISSPROT HIT: P93647, EVALUE 1.40e+00
CHHHQHHHHLHHHQPHWLYLRRVIPSLDRVNCASVLSIALKLFFLHISLDLVLPSGAKQKKHIRNYRKTHMGFEI

SEQ ID NO: 42983 - protein, 19 aa, Homo sapiens
  MAP TO AC005674.9; EXPRESSED IN PLACENTA, SIGNAL = 0.8; EXPRESSED IN BT474, SIGNAL = 0.6; EXPRESSED IN LUNG, SIGNAL = 0.98; EXPRESSED IN BRAIN, SIGNAL = 0.81; EXPRESSED IN FETAL LIVER, SIGNAL = 0.72; EXPRESSED IN HELA, SIGNAL = 0.91; EXPRESSED IN ADULT LIVER, SIGNAL = 0.73
PSLCSLVSSSSTSSSSSPS

SEQ ID NO: 42984 - protein, 17 aa, Homo sapiens
  MAP TO AC007344.2; EXPRESSED IN HELA, SIGNAL = 0.62; EXPRESSED IN BT474, SIGNAL = 0.63; EXPRESSED IN FETAL LIVER, SIGNAL = 0.63; EXPRESSED IN LUNG, SIGNAL = 0.6; EXPRESSED IN PLACENTA, SIGNAL = 0.68; EXPRESSED IN BONE MARROW, SIGNAL = 0.67; EXPRESSED IN ADULT LIVER, SIGNAL = 0.88; EXPRESSED IN BRAIN, SIGNAL = 0.82
SSHFNNLEKELQSISKV

SEQ ID NO: 42985 - protein, 56 aa, Homo sapiens
  MAP TO AC007736.3; EXPRESSED IN ADULT LIVER, SIGNAL = 1.7; EXPRESSED IN FETAL LIVER, SIGNAL = 0.58; EXPRESSED IN LUNG, SIGNAL = 0.65; EXPRESSED IN HELA, SIGNAL = 0.74; EXPRESSED IN BRAIN, SIGNAL = 0.68; EXPRESSED IN PLACENTA, SIGNAL = 0.73; EST_HUMAN HIT: AL120487.1, EVALUE 4.80e-01
CPFSFTTVSLLEGTLACGEKNAQCTAVGHRREMRKRCGAVEDPDRKVVVVRMAKSF

SEQ ID NO: 42986 - protein, 51 aa, Homo sapiens
  MAP TO AC007736.3; EXPRESSED IN ADULT LIVER, SIGNAL = 1.7; EXPRESSED IN FETAL LIVER, SIGNAL = 0.58; EXPRESSED IN LUNG, SIGNAL = 0.65; EXPRESSED IN HELA, SIGNAL = 0.74; EXPRESSED IN BRAIN, SIGNAL = 0.68; EXPRESSED IN PLACENTA, SIGNAL = 0.73; SWISSPROT HIT: P34393, EVALUE 9.00e-01; EST_HUMAN HIT: BE702285.1, EVALUE 1.10e-01
RTTLPSSQPPPFCQGLPLPHTSSASLSYAPLQYTVHSSLHKPKCLPKEILL

SEQ ID NO: 42987 - protein, 27 aa, Homo sapiens
  MAP TO L29074.1; EXPRESSED IN PLACENTA, SIGNAL = 1.2; EXPRESSED IN LUNG, SIGNAL = 0.71; EXPRESSED IN HELA, SIGNAL = 0.8; EXPRESSED IN BT474, SIGNAL = 0.79; EXPRESSED IN BONE MARROW, SIGNAL = 0.88; EXPRESSED IN HBL100, SIGNAL = 1.2; EXPRESSED IN FETAL LIVER, SIGNAL = 0.68; EXPRESSED IN BRAIN, SIGNAL = 0.97; EXPRESSED IN ADULT LIVER, SIGNAL = 0.78; EST_HUMAN HIT: AA463536.1, EVALUE 3.00e-09; SWISSPROT HIT: Q06787, EVALUE 2.00e-10
NDDHSRTDNRPRNPREAKGRTTDGSLQ

SEQ ID NO: 42988 - protein, 30 aa, Homo sapiens
  MAP TO AC006317.3; EXPRESSED IN LUNG, SIGNAL = 0.63; EXPRESSED IN HELA, SIGNAL = 0.61; EXPRESSED IN BRAIN, SIGNAL = 0.68; EXPRESSED IN PLACENTA, SIGNAL = 0.61; EXPRESSED IN BONE MARROW, SIGNAL = 0.76; EST_HUMAN HIT: AI223808.1, EVALUE 5.00e-06
IEVYLADGSGDWEVQDQGAISGEDLLAVSQ

SEQ ID NO: 42989 - protein, 53 aa, Homo sapiens
  MAP TO AC007778.1; EXPRESSED IN LUNG, SIGNAL = 4.2; EXPRESSED IN BRAIN, SIGNAL = 0.97; EXPRESSED IN FETAL LIVER, SIGNAL = 0.92; SWISSPROT HIT: Q47866, EVALUE 3.00e-01
  unsure 5
KNIKXNSFVMSKDTMSMILFFVTLVCLSRFMRNIFQKRNMILICVGLWKLISE

SEQ ID NO: 42990 - protein, 99 aa, Homo sapiens
  MAP TO AC012079.2; EXPRESSED IN PLACENTA, SIGNAL = 1.1; EXPRESSED IN ADULT LIVER, SIGNAL = 1.4; EXPRESSED IN BT474, SIGNAL = 1.1; EXPRESSED IN FETAL LIVER, SIGNAL = 0.98; EXPRESSED IN BRAIN, SIGNAL = 1.3; EXPRESSED IN LUNG, SIGNAL = 0.99; EXPRESSED IN HELA, SIGNAL = 0.97; EST_HUMAN HIT: AA705615.1, EVALUE 1.70e-01
QVGVVHPFHFGYIDFEVFREYPRGNVKFAVEYLCLELRKNNVWAICISVMNEATEAEAINAARVNKVKRREEEEKEEKKPMFKGMIVYSKLAKETEKAW

SEQ ID NO: 42991 - protein, 71 aa, Homo sapiens
  MAP TO AC007898.1; EXPRESSED IN FETAL LIVER, SIGNAL = 0.95; EXPRESSED IN BRAIN, SIGNAL = 0.92; EXPRESSED IN LUNG, SIGNAL = 2.2; SWISSPROT HIT: O67551, EVALUE 6.50e-01
  unsure 7
VSLISLXQIQERTQAGAELPILRIISSLTRENLKLCSEVGDHLAIFSVNTAKGEKKEQYLMDPTPASKQTV

SEQ ID NO: 42992 - protein, 76 aa, Homo sapiens
  MAP TO AC011493.2; EXPRESSED IN FETAL LIVER, SIGNAL = 0.98; EXPRESSED IN BONE MARROW, SIGNAL = 1.2; EXPRESSED IN ADULT LIVER, SIGNAL = 1.7; EXPRESSED IN BT474, SIGNAL = 1.2; EXPRESSED IN BRAIN, SIGNAL = 1.2; EXPRESSED IN LUNG, SIGNAL = 1.1; EXPRESSED IN PLACENTA, SIGNAL = 1.1; EXPRESSED IN HELA, SIGNAL = 1.5; EXPRESSED IN HBL100, SIGNAL =   2; EST_HUMAN HIT: AI500342.1, EVALUE 3.00e-30; SWISSPROT HIT: P10266, EVALUE 7.40e-01
QPIWIPSKHLKPYHEPDAEEEILGGSQGPPGCSHVKTDAEEDPNYHEQHPSNTATYLGTDQEAVTDGGRKPEESRH

SEQ ID NO: 42993 - protein, 49 aa, Homo sapiens
  MAP TO AC011493.2; EXPRESSED IN FETAL LIVER, SIGNAL = 0.98; EXPRESSED IN BONE MARROW, SIGNAL = 1.2; EXPRESSED IN ADULT LIVER, SIGNAL = 1.7; EXPRESSED IN BT474, SIGNAL = 1.2; EXPRESSED IN BRAIN, SIGNAL = 1.2; EXPRESSED IN LUNG, SIGNAL = 1.1; EXPRESSED IN PLACENTA, SIGNAL = 1.1; EXPRESSED IN HELA, SIGNAL = 1.5; EXPRESSED IN HBL100, SIGNAL =   2; EST_HUMAN HIT: BE064386.1, EVALUE 2.00e-17; SWISSPROT HIT: P47358, EVALUE 7.80e+00
DPLVAVMSRLMLRRTPTIMSNTHQIQPPTWGQIKKLSQMVEENLRKAGT

SEQ ID NO: 42994 - protein, 66 aa, Homo sapiens
  MAP TO AL023513.1; EXPRESSED IN HBL100, SIGNAL =   1; EXPRESSED IN PLACENTA, SIGNAL = 0.82; EXPRESSED IN BRAIN, SIGNAL = 0.97; EXPRESSED IN ADULT LIVER, SIGNAL =   1; EXPRESSED IN HELA, SIGNAL =   1; EXPRESSED IN LUNG, SIGNAL = 0.8; EXPRESSED IN FETAL LIVER, SIGNAL = 0.85; EXPRESSED IN BONE MARROW, SIGNAL = 0.8; EXPRESSED IN BT474, SIGNAL = 1.1; SWISSPROT HIT: P22485, EVALUE 5.00e-01
QPLNPGLAVSRVSTTYYKQISRGSAPAKRSPVTPQGRSPGDEGGHFVAPKVADSQMLQLRTRLQKK

SEQ ID NO: 42995 - protein, 47 aa, Homo sapiens
  MAP TO AC005075.2; EXPRESSED IN BRAIN, SIGNAL =   1
ADAGAHSAADGLLPGNHLSHPSIPSHPSEPAPQQCVLLRLSKCTKDT

SEQ ID NO: 42996 - protein, 209 aa, Homo sapiens
  MAP TO AC003037.1; EXPRESSED IN BRAIN, SIGNAL = 1.2; EXPRESSED IN LUNG, SIGNAL = 1.3; EXPRESSED IN HBL100, SIGNAL = 1.2; EXPRESSED IN HELA, SIGNAL = 2.1; EXPRESSED IN BT474, SIGNAL = 1.2; EST_HUMAN HIT: BE735344.1, EVALUE 4.00e-82; SWISSPROT HIT: P51151, EVALUE 1.00e-108
FLKLLRLTMAGKSSLFKVILLGDGGVGKSSLMNRYVTNKFDTQLFHTIGVEFLNKDLEVDGHFVTMQIWDTAGQERFRSLRTPFYRGSDCCLLTFSVDDSQSFQNLSNWKKEFIYYADVKEPESFPFVILGNKIDISERQVSTEEAQAWCRDNGDYPYFETSAKDATNVAAAFEEAVRRVLATEDRSDHLIQTDTVNLHRKPKPSSSCC

SEQ ID NO: 42997 - protein, 25 aa, Homo sapiens
  MAP TO AC012111.1; EXPRESSED IN ADULT LIVER, SIGNAL = 1.1; EXPRESSED IN BT474, SIGNAL = 1.1; EXPRESSED IN BONE MARROW, SIGNAL =   1; EXPRESSED IN BRAIN, SIGNAL = 1.1; EXPRESSED IN PLACENTA, SIGNAL = 0.93; EXPRESSED IN HBL100, SIGNAL = 1.1
IGARELMMAPNMPPVTPPITTVRAT

SEQ ID NO: 42998 - protein, 57 aa, Homo sapiens
  MAP TO AP000009.2; EXPRESSED IN BT474, SIGNAL = 0.98; EXPRESSED IN BONE MARROW, SIGNAL = 2.5; EXPRESSED IN BRAIN, SIGNAL = 0.96; EXPRESSED IN FETAL LIVER, SIGNAL = 1.4; SWISSPROT HIT: P29366, EVALUE 3.50e-02
IDNKKPALEAWHESLGGFISSGIILQGVHKQQWQSCKEEDNGSVRILDEVMLGKRSL

SEQ ID NO: 42999 - protein, 23 aa, Homo sapiens
  MAP TO AP000009.2; EXPRESSED IN BT474, SIGNAL = 0.98; EXPRESSED IN BONE MARROW, SIGNAL = 2.5; EXPRESSED IN BRAIN, SIGNAL = 0.96; EXPRESSED IN FETAL LIVER, SIGNAL = 1.4; SWISSPROT HIT: P22130, EVALUE 8.50e+00
LLITKSQHWKHGMSLLGASLAVE

SEQ ID NO: 43000 - protein, 35 aa, Homo sapiens
  MAP TO AL121789.3; EXPRESSED IN BONE MARROW, SIGNAL = 1.1; EXPRESSED IN BRAIN, SIGNAL = 1.1
PLKQHGNHTQTVICGRLLSACGFKCFGACNATTVF

SEQ ID NO: 43001 - protein, 171 aa, Homo sapiens
  MAP TO AB001523.1; EXPRESSED IN BT474, SIGNAL = 0.93; EXPRESSED IN BONE MARROW, SIGNAL = 1.2; EXPRESSED IN BRAIN, SIGNAL = 0.97; EXPRESSED IN PLACENTA, SIGNAL =   1; EST_HUMAN HIT: AW377134.1, EVALUE 6.00e-72; SWISSPROT HIT: P48553, EVALUE 2.00e-95
HKIVLPMHSFAQLRDLHFDPSNAVVHVGGVLCVEITMYSQMPVPVHVEQIVVNVHFSIEKNSYRKTAEWLTKHKTSNGIINFPPETAPFPVSQNSLPALELYEMFERSPSDNSLNTTGIICRNVHMLLRRQESSSSLEMPSGVALEEGAHVLRCSHVTLEPGANQITFRTQ

SEQ ID NO: 43002 - protein, 23 aa, Homo sapiens
  MAP TO AB001523.1; EXPRESSED IN BT474, SIGNAL = 0.93; EXPRESSED IN BONE MARROW, SIGNAL = 1.2; EXPRESSED IN BRAIN, SIGNAL = 0.97; EXPRESSED IN PLACENTA, SIGNAL =   1; EST_HUMAN HIT: AW361527.1, EVALUE 1.00e-07
NCEISILIPPMPWSTWAAFCALR

SEQ ID NO: 43003 - protein, 43 aa, Homo sapiens
  MAP TO AC008165.2; EXPRESSED IN HELA, SIGNAL = 1.2; EXPRESSED IN BT474, SIGNAL = 0.91; EXPRESSED IN FETAL LIVER, SIGNAL = 0.62; EXPRESSED IN LUNG, SIGNAL =   1; EXPRESSED IN BRAIN, SIGNAL = 1.3; EXPRESSED IN HBL100, SIGNAL = 1.1; EST_HUMAN HIT: BE974294.1, EVALUE 9.20e+00
RCYMTWAGLALPYKGVHADQPDSQCLSQPWCTRNSCIQPMLCR

SEQ ID NO: 43004 - protein, 90 aa, Homo sapiens; identical to SEQ ID NO: 33620
  MAP TO AP000311.1; EXPRESSED IN BT474, SIGNAL = 0.87; EXPRESSED IN BONE MARROW, SIGNAL = 1.1; EXPRESSED IN HBL100, SIGNAL = 1.3; EXPRESSED IN FETAL LIVER, SIGNAL =  32; EXPRESSED IN LUNG, SIGNAL = 0.66; EXPRESSED IN BRAIN, SIGNAL = 0.69; EXPRESSED IN PLACENTA, SIGNAL = 1.1; EXPRESSED IN HELA, SIGNAL = 0.92; EXPRESSED IN ADULT LIVER, SIGNAL = 0.98; EST_HUMAN HIT: AA773823.1, EVALUE 2.00e-37; SWISSPROT HIT: Q15811, EVALUE 2.00e-45

SEQ ID NO: 43005 - protein, 95 aa, Homo sapiens
  MAP TO AP000037.1; EXPRESSED IN LUNG, SIGNAL =   1; EXPRESSED IN ADULT LIVER, SIGNAL = 1.3; EXPRESSED IN BRAIN, SIGNAL = 0.92; EXPRESSED IN PLACENTA, SIGNAL = 1.3; EXPRESSED IN BONE MARROW, SIGNAL = 1.1; EXPRESSED IN HELA, SIGNAL = 1.2; EXPRESSED IN BT474, SIGNAL = 1.4; EXPRESSED IN HBL100, SIGNAL = 2.2; EXPRESSED IN FETAL LIVER, SIGNAL = 1.6; EST_HUMAN HIT: AA042813.1, EVALUE 8.00e-41; SWISSPROT HIT: Q95157, EVALUE 9.00e-21
GRHWAVPVCLVTVLWNLLSILAVSPDSHLHTPMHFFLCNLSLPDIGFTSTTVPKMIVDIQSHSRVISYAGCLTQMSLSAIFGGMEERHAPECDGL

SEQ ID NO: 43006 - protein, 38 aa, Homo sapiens
  MAP TO AC011019.1; EXPRESSED IN FETAL LIVER, SIGNAL = 0.94; EXPRESSED IN BONE MARROW, SIGNAL = 1.1; EXPRESSED IN BRAIN, SIGNAL =   1; EST_HUMAN HIT: AI828922.1, EVALUE 3.00e-07; SWISSPROT HIT: P08548, EVALUE 1.00e-05
LLEANDKENKTYKSLWDIVKAVLRGTFIALSFYIEKVE

SEQ ID NO: 43007 - protein, 150 aa, Homo sapiens
  MAP TO AL132708.1; EXPRESSED IN BONE MARROW, SIGNAL = 1.7; EXPRESSED IN ADULT LIVER, SIGNAL = 2.5; EXPRESSED IN FETAL LIVER, SIGNAL = 2.9; EXPRESSED IN BT474, SIGNAL = 1.3; EXPRESSED IN BRAIN, SIGNAL = 1.4; EST_HUMAN HIT: AW373930.1, EVALUE 1.00e-37; SWISSPROT HIT: O54759, EVALUE 1.00e-38
LAADAPGNIFFSPVSISTTLALLSLGAQANTSALILEGLGFNLTETPEADIHQGFRSLLHTLALPSPKLELKVGNSLFLDKRLKPRQHYLDSIKELYGAFAFSANFTDSVTTGRQINDYLRRQTYGQVVDCLPEFSQDTFMVLANYIFFK

SEQ ID NO: 43008 - protein, 28 aa, Homo sapiens
  MAP TO AL050327.6; EXPRESSED IN LUNG, SIGNAL = 0.67; EXPRESSED IN BRAIN, SIGNAL = 0.7; EXPRESSED IN PLACENTA, SIGNAL = 0.59; EXPRESSED IN BONE MARROW, SIGNAL = 1.1; EXPRESSED IN HELA, SIGNAL = 0.6; EST_HUMAN HIT: C16665.1, EVALUE 1.40e+00
LGESWEGQVLPHRLQREYGLDGIFILDF

SEQ ID NO: 43009 - protein, 41 aa, Homo sapiens
  MAP TO AL031770.12; EXPRESSED IN LUNG, SIGNAL = 0.85; EXPRESSED IN HELA, SIGNAL = 0.78; EXPRESSED IN FETAL LIVER, SIGNAL = 0.67; EXPRESSED IN ADULT LIVER, SIGNAL = 0.67; EXPRESSED IN BRAIN, SIGNAL = 0.79; EXPRESSED IN PLACENTA, SIGNAL = 0.98; EXPRESSED IN BT474, SIGNAL = 0.86; EXPRESSED IN BONE MARROW, SIGNAL =   2; EXPRESSED IN HBL100, SIGNAL = 0.87; EST_HUMAN HIT: AA161356.1, EVALUE 9.00e-16; SWISSPROT HIT: P55121, EVALUE 3.60e+00
FEQLKMAVTNLKRQANKKSEGSLAYVKGGLSTFFEAQDALS

SEQ ID NO: 43010 - protein, 51 aa, Homo sapiens
  MAP TO AC006111.2; EXPRESSED IN HELA, SIGNAL = 0.67; EXPRESSED IN ADULT LIVER, SIGNAL = 0.79; EXPRESSED IN BRAIN, SIGNAL = 0.77; EXPRESSED IN BT474, SIGNAL = 1.8; EXPRESSED IN BONE MARROW, SIGNAL =   1; EXPRESSED IN FETAL LIVER, SIGNAL = 0.84; EXPRESSED IN PLACENTA, SIGNAL = 0.73; EXPRESSED IN HBL100, SIGNAL = 0.99; EXPRESSED IN LUNG, SIGNAL = 0.62; SWISSPROT HIT: P24855, EVALUE 4.00e-27; EST_HUMAN HIT: AW500877.1, EVALUE 5.00e-26
DVMLMGDFNAGCSYVRPSQWSSIRLWTSPTFQWLIPDSADTTATPTHCAYD

SEQ ID NO: 43011 - protein, 50 aa, Homo sapiens
  MAP TO AC007510.4; EXPRESSED IN BRAIN, SIGNAL = 0.76; EXPRESSED IN PLACENTA, SIGNAL = 0.61; EXPRESSED IN BONE MARROW, SIGNAL = 0.7; EXPRESSED IN LUNG, SIGNAL = 0.76; EXPRESSED IN HELA, SIGNAL = 0.72; EXPRESSED IN FETAL LIVER, SIGNAL = 0.58; EST_HUMAN HIT: BF667240.1, EVALUE 1.30e+00; SWISSPROT HIT: P87145, EVALUE 6.00e+00
KPRMNNILTSATEPYDLSFSRSFQNLAHLPPSYESAVKTNPSKYSSLKRL

SEQ ID NO: 43012 - protein, 98 aa, Homo sapiens
  MAP TO AC005632.2; EXPRESSED IN LUNG, SIGNAL = 2.6; EXPRESSED IN PLACENTA, SIGNAL = 0.65; EXPRESSED IN BONE MARROW, SIGNAL = 0.76; EXPRESSED IN FETAL LIVER, SIGNAL = 0.67; EXPRESSED IN HELA, SIGNAL = 0.72; EXPRESSED IN ADULT LIVER, SIGNAL = 0.72; EXPRESSED IN BRAIN, SIGNAL =   1; SWISSPROT HIT: Q92793, EVALUE 5.50e-01; EST_HUMAN HIT: W29002.1, EVALUE 3.60e-01
SRRPEANIKVVAGPDSLGGSRTPPASSSFWGLQVSLDSEPPTPIPASIFTLQPLRPCPTQQVWAAATAVPPCSLCTHWKESLRVEARHSASPGSTVRQ

SEQ ID NO: 43013 - protein, 47 aa, Homo sapiens
  MAP TO AP000238.1; EXPRESSED IN FETAL LIVER, SIGNAL = 0.63; EXPRESSED IN LUNG, SIGNAL = 0.65; EXPRESSED IN PLACENTA, SIGNAL = 0.84; EXPRESSED IN BONE MARROW, SIGNAL = 0.79; EXPRESSED IN HBL100, SIGNAL = 0.67; EXPRESSED IN BRAIN, SIGNAL = 0.86; EXPRESSED IN BT474, SIGNAL = 0.87; SWISSPROT HIT: Q60934, EVALUE 9.00e-22; EST_HUMAN HIT: BF509857.1, EVALUE 1.00e-08
YNIKIKIRQLPSGNKDAKPLLKEMKKGKEFYVIFDCSHETAAEILKQ

SEQ ID NO: 43014 - protein, 23 aa, Homo sapiens
  MAP TO AP000238.1; EXPRESSED IN FETAL LIVER, SIGNAL = 0.63; EXPRESSED IN LUNG, SIGNAL = 0.65; EXPRESSED IN PLACENTA, SIGNAL = 0.84; EXPRESSED IN BONE MARROW, SIGNAL = 0.79; EXPRESSED IN HBL100, SIGNAL = 0.67; EXPRESSED IN BRAIN, SIGNAL = 0.86; EXPRESSED IN BT474, SIGNAL = 0.87
IILKSKSASCPLGIKMPSLYSRR

SEQ ID NO: 43015 - protein, 119 aa, Homo sapiens
  MAP TO AC011750.2; EXPRESSED IN ADULT LIVER, SIGNAL = 1.1; EXPRESSED IN BRAIN, SIGNAL =   1; EST_HUMAN HIT: AW451306.1, EVALUE 1.00e-43; SWISSPROT HIT: O14924, EVALUE 3.40e+00
AQDVFRQAMKSPSVLLHVLPPQNREQYEKSVIGSLNIFGNNDGVLKTKVPPPVHGKSGLKTANLTGTDSPETDASASLQQNKSPRVPRLGGKPSSPSLSPLMGFGSNKNAKKIKIDLKK

SEQ ID NO: 43016 - protein, 37 aa, Homo sapiens
  MAP TO AP000138.1; EXPRESSED IN HELA, SIGNAL = 0.65; EXPRESSED IN BT474, SIGNAL = 1.1; EXPRESSED IN BONE MARROW, SIGNAL = 0.86; EXPRESSED IN FETAL LIVER, SIGNAL = 0.62; EXPRESSED IN LUNG, SIGNAL = 1.1; EXPRESSED IN ADULT LIVER, SIGNAL = 0.95; EXPRESSED IN HBL100, SIGNAL = 0.83; EXPRESSED IN BRAIN, SIGNAL = 0.79; EST_HUMAN HIT: BE073264.1, EVALUE 4.00e-14
ENLRSFTKDAHALIYKDLPFETLEVEAKVALEIFQHS

SEQ ID NO: 43017 - protein, 48 aa, Homo sapiens
  MAP TO AP000198.1; EXPRESSED IN PLACENTA, SIGNAL = 0.66; EXPRESSED IN FETAL LIVER, SIGNAL = 0.6; EXPRESSED IN LUNG, SIGNAL = 0.6; EXPRESSED IN BRAIN, SIGNAL = 0.79; SWISSPROT HIT: Q60934, EVALUE 9.00e-14; EST_HUMAN HIT: BF509857.1, EVALUE 4.00e-03
HRASQLTVSSLQCHRHKPWRLGPRFMNLIKEASDAPSQPRGPSEHCWA

SEQ ID NO: 43018 - protein, 31 aa, Homo sapiens
  MAP TO AC005902.7; EXPRESSED IN FETAL LIVER, SIGNAL = 0.61; EXPRESSED IN HELA, SIGNAL = 0.78; EXPRESSED IN ADULT LIVER, SIGNAL = 0.74; EXPRESSED IN BRAIN, SIGNAL =  20; EXPRESSED IN BT474, SIGNAL = 0.68; EXPRESSED IN BONE MARROW, SIGNAL = 0.96; EXPRESSED IN HBL100, SIGNAL = 0.78; EXPRESSED IN LUNG, SIGNAL = 0.71; EST_HUMAN HIT: T08169.1, EVALUE 2.00e-05
GVTGPLKLIIHSTVWKGLPMLWKRTLVERTS

SEQ ID NO: 43019 - protein, 76 aa, Homo sapiens
  MAP TO AC009758.1; EXPRESSED IN ADULT LIVER, SIGNAL = 1.1; EXPRESSED IN BRAIN, SIGNAL = 0.92; SWISSPROT HIT: Q95156, EVALUE 6.00e-05; EST_HUMAN HIT: AI138213.1, EVALUE 4.00e-25; EST_HUMAN HIT: AI138213.1, EVALUE 4.00e-25
  unsure 13
QFSSLPLRRPATXAFGTCVSHIGAILSTYTPVVISSVMHRVARHAAPRVHILLAIFYLLFPPMVNPIIYGVKTKQI

SEQ ID NO: 43020 - protein, 33 aa, Homo sapiens
  MAP TO AC009758.1; EXPRESSED IN ADULT LIVER, SIGNAL = 1.1; EXPRESSED IN BRAIN, SIGNAL = 0.92; EST_HUMAN HIT: AI138213.1, EVALUE 4.00e-04
IYDRIDHGWEKEIENSKEYVDTRGSMAGYTVHD

SEQ ID NO: 43021 - protein, 36 aa, Homo sapiens
  MAP TO AL080239.11; EXPRESSED IN ADULT LIVER, SIGNAL = 0.69; EXPRESSED IN BRAIN, SIGNAL = 1.2; EXPRESSED IN PLACENTA, SIGNAL = 0.8; EXPRESSED IN BONE MARROW, SIGNAL = 0.73; EXPRESSED IN HELA, SIGNAL = 0.7; EXPRESSED IN BT474, SIGNAL = 0.7; EXPRESSED IN FETAL LIVER, SIGNAL = 0.7; EXPRESSED IN LUNG, SIGNAL = 0.8; EST_HUMAN HIT: N50435.1, EVALUE 2.30e-02
RMASLSAQVLMAQNSGFSLIPLSPSTFISSILASAM

SEQ ID NO: 43022 - protein, 156 aa, Homo sapiens
  MAP TO AF011889.1; EXPRESSED IN LUNG, SIGNAL = 1.1; EXPRESSED IN PLACENTA, SIGNAL =   1; EXPRESSED IN BRAIN, SIGNAL = 2.5; EST_HUMAN HIT: AV722265.1, EVALUE 2.00e-89; SWISSPROT HIT: P22304, EVALUE 7.00e-92
RQSMDLVELVSLFPTLAGLAGLQVPPRCPVPSFHVELCREGKNLLKHFRFRDLEEDPYLPGNPRELIAYSQYPRPSDIPQWNSDKPSLKDIKIMGYSIRTIDYRYTVWVGFNPDEFLANFSDIHAGELYFVDSDPLQDHNMYNDSQGGDLFQLLMP

SEQ ID NO: 43023 - protein, 156 aa, Homo sapiens
  MAP TO AC012460.2; EXPRESSED IN BRAIN, SIGNAL = 0.98; EXPRESSED IN HBL100, SIGNAL =   1; EXPRESSED IN HELA, SIGNAL =   1; EST_HUMAN HIT: BE264998.1, EVALUE 2.00e-85; SWISSPROT HIT: P34384, EVALUE 1.40e-02
SEKPNWDYHAEIQAFGHRLQENFSLDLLKTAFVNSCYIKSEEAKRQQLGIEKEAVLLNLKSNQELSEQGTSFSQTCLTQFLEDEYPDMPTEGIKNLVDFLTGEEVVCHVARNLAVEQLTLSEEFPVPPAVLQQTFFAVIGALLQSSGPERTALFIR

SEQ ID NO: 43024 - protein, 24 aa, Homo sapiens
  MAP TO AC012460.2; EXPRESSED IN BRAIN, SIGNAL = 0.98; EXPRESSED IN HBL100, SIGNAL =   1; EXPRESSED IN HELA, SIGNAL =   1; EST_HUMAN HIT: N46128.1, EVALUE 1.00e-06
QRSRTGITMQKYKLLDIGYRKTFP

SEQ ID NO: 43025 - protein, 41 aa, Homo sapiens
  MAP TO AC012306.2; EXPRESSED IN HELA, SIGNAL = 0.96; EXPRESSED IN HBL100, SIGNAL = 1.1; EXPRESSED IN ADULT LIVER, SIGNAL = 1.1; EXPRESSED IN BT474, SIGNAL = 0.98; EXPRESSED IN BRAIN, SIGNAL = 1.1; EXPRESSED IN BONE MARROW, SIGNAL = 0.97; EXPRESSED IN LUNG, SIGNAL = 0.93; EST_HUMAN HIT: AW993185.1, EVALUE 2.00e-10; SWISSPROT HIT: Q07698, EVALUE 8.00e+00
EEGVRYVPVRPRPPITLLRHYRNPWKAAYHHFQRYSDVRVK

SEQ ID NO: 43026 - protein, 64 aa, Homo sapiens
  MAP TO AC010908.1; EXPRESSED IN BRAIN, SIGNAL =   1; EST_HUMAN HIT: AW836985.1, EVALUE 2.90e+00; SWISSPROT HIT: P75385, EVALUE 8.60e-01
QGLEEPRSRTKMKCRIVICLNFYPGGISQLLNYGQEVKKVNKTFSRRMDLKRKYDVIVSGRSNH

SEQ ID NO: 43027 - protein, 55 aa, Homo sapiens
  MAP TO AL049548.6; EXPRESSED IN FETAL LIVER, SIGNAL = 0.64; EXPRESSED IN LUNG, SIGNAL = 0.66; EXPRESSED IN ADULT LIVER, SIGNAL = 0.9; EXPRESSED IN HELA, SIGNAL = 0.79; EXPRESSED IN BRAIN, SIGNAL = 0.75; EXPRESSED IN BONE MARROW, SIGNAL = 0.67; EST_HUMAN HIT: AA248793.1, EVALUE 4.20e+00; SWISSPROT HIT: P25464, EVALUE 3.00e-01
STQENLNSLCRKYHSAELESLGRAMTGLIKKHEAVSQLCSKTQASLQESLEKHFS

SEQ ID NO: 43028 - protein, 36 aa, Homo sapiens
  MAP TO AC008039.1; EXPRESSED IN FETAL LIVER, SIGNAL = 0.78; EXPRESSED IN HELA, SIGNAL = 0.71; EXPRESSED IN BT474, SIGNAL = 0.83; EXPRESSED IN BONE MARROW, SIGNAL = 0.7; EXPRESSED IN ADULT LIVER, SIGNAL = 0.98; EXPRESSED IN BRAIN, SIGNAL = 0.76; EST_HUMAN HIT: W39176.1, EVALUE 1.30e+00
GTNHFAISVNGAPWSCKSWWPCRRSAIALGREPRDY

SEQ ID NO: 43029 - protein, 25 aa, Homo sapiens
  MAP TO AC007744.1; EXPRESSED IN HBL100, SIGNAL = 0.88; EXPRESSED IN BT474, SIGNAL = 0.66; EXPRESSED IN HELA, SIGNAL = 0.66; EXPRESSED IN BRAIN, SIGNAL = 1.6; EXPRESSED IN LUNG, SIGNAL = 0.64; EST_HUMAN HIT: BE261671.1, EVALUE 4.30e-02
DRQQGKEYEHDLSETEKAIVREMCN

SEQ ID NO: 43030 - protein, 18 aa, Homo sapiens
  MAP TO AC007744.1; EXPRESSED IN HBL100, SIGNAL = 0.88; EXPRESSED IN BT474, SIGNAL = 0.66; EXPRESSED IN HELA, SIGNAL = 0.66; EXPRESSED IN BRAIN, SIGNAL = 1.6; EXPRESSED IN LUNG, SIGNAL = 0.64
IVNRVKSMNMTLVRQKKL

SEQ ID NO: 43031 - protein, 193 aa, Homo sapiens
  MAP TO AL049575.7; EXPRESSED IN PLACENTA, SIGNAL = 0.8; EXPRESSED IN ADULT LIVER, SIGNAL = 0.72; EXPRESSED IN BRAIN, SIGNAL = 1.4; EST_HUMAN HIT: AW904936.1, EVALUE 1.00e-70; SWISSPROT HIT: P28968, EVALUE 8.00e-07
DTVSSKVQPTAAAAVTLFLRKSSPPALSAALVAKGTSSSPLAVASGPAKSSSMTTLAKNVTNKAASGPKRTPGAVHTAFPFTPTYMYARTGHTTSTHTAMQGNMDTASGLLSTTYLPRKPQAMHTGLPNPTNLEMPRASTPRPLTVTAALTSITASVKATRLPPLRAENTDAVLPAASAAVVTTGKMASNLEC

SEQ ID NO: 43032 - protein, 57 aa, Homo sapiens
  MAP TO AL049575.7; EXPRESSED IN PLACENTA, SIGNAL = 0.8; EXPRESSED IN ADULT LIVER, SIGNAL = 0.72; EXPRESSED IN BRAIN, SIGNAL = 1.4; EST_HUMAN HIT: AW904936.1, EVALUE 1.00e-07; SWISSPROT HIT: P12267, EVALUE 8.80e-01
AAGRTASVFSARNGGNRVAFTEAVMDVSAAVTVSGRGVDALGISRLVGFGRPVCMAC

SEQ ID NO: 43033 - protein, 91 aa, Homo sapiens
  MAP TO AL049575.7; EXPRESSED IN PLACENTA, SIGNAL = 0.8; EXPRESSED IN ADULT LIVER, SIGNAL = 0.72; EXPRESSED IN BRAIN, SIGNAL = 1.4; SWISSPROT HIT: P45190, EVALUE 3.10e+00; EST_HUMAN HIT: AW904936.1, EVALUE 2.00e-31
VLFGPDAALFVTFLARVVIELLLAGPEATAKGLLLVPLATRAADSAGGLDFLRNNVTAAAAVGCTLDDTVSAVKREKTKFVIGLECTCHLF

SEQ ID NO: 43034 - protein, 26 aa, Homo sapiens
  MAP TO AC007876.1; EXPRESSED IN PLACENTA, SIGNAL = 1.1; EXPRESSED IN HELA, SIGNAL = 0.95; EXPRESSED IN ADULT LIVER, SIGNAL = 0.91; EXPRESSED IN BRAIN, SIGNAL = 0.95; EXPRESSED IN BT474, SIGNAL = 1.4; EXPRESSED IN LUNG, SIGNAL = 0.88; EXPRESSED IN FETAL LIVER, SIGNAL =  91; EXPRESSED IN HBL100, SIGNAL = 1.1; EXPRESSED IN BONE MARROW, SIGNAL = 1.4; EST_HUMAN HIT: AW503208.1, EVALUE 4.20e+00
WLTVFSQRMGSWSSMAVNRLKSRFLP

SEQ ID NO: 43035 - protein, 48 aa, Homo sapiens
  MAP TO AC007736.3; EXPRESSED IN PLACENTA, SIGNAL = 0.68; EXPRESSED IN BT474, SIGNAL = 0.68; EXPRESSED IN HELA, SIGNAL = 0.77; EXPRESSED IN BRAIN, SIGNAL = 0.69; EXPRESSED IN BONE MARROW, SIGNAL = 0.76; EXPRESSED IN FETAL LIVER, SIGNAL = 0.79; EXPRESSED IN LUNG, SIGNAL = 0.75; EXPRESSED IN ADULT LIVER, SIGNAL = 0.78
MSGPEVEFDSTFPEDWTSKLTLKVSEDMFFSYVISLICNPFHSKYISE

SEQ ID NO: 43036 - protein, 19 aa, Homo sapiens
  MAP TO AC007736.3; EXPRESSED IN PLACENTA, SIGNAL = 0.68; EXPRESSED IN BT474, SIGNAL = 0.68; EXPRESSED IN HELA, SIGNAL = 0.77; EXPRESSED IN BRAIN, SIGNAL = 0.69; EXPRESSED IN BONE MARROW, SIGNAL = 0.76; EXPRESSED IN FETAL LIVER, SIGNAL = 0.79; EXPRESSED IN LUNG, SIGNAL = 0.75; EXPRESSED IN ADULT LIVER, SIGNAL = 0.78
CQAQKLNLTQRFLKIGLLN

SEQ ID NO: 43037 - protein, 220 aa, Homo sapiens
  MAP TO AL121716.2; EXPRESSED IN BRAIN, SIGNAL = 0.95; EST_HUMAN HIT: AW339490.1, EVALUE 6.00e-72; SWISSPROT HIT: Q9Y3R5, EVALUE 6.00e-03
VSSVSHENPTEVFEDGENPPSSRSSESGFTEFIQYQADRTDDIDRELSEGQGAAAIPIGSTSSETETASTVGSEETIIQTPSVVTQGTATRSRKTAQKTAMQCCLEYVQQFLTRLINLYIIQNNSFSQSLATEHQGDLGREQGETSKWDRNSQGDVKEKNISKQKTSKEYLSAFLAACQLFLECSSFPVYIAEGNHTSELRSEKLETGKVISVLLIFQYC

SEQ ID NO: 43038 - protein, 25 aa, Homo sapiens
  MAP TO AC007446.8; EXPRESSED IN BRAIN, SIGNAL = 0.84; EXPRESSED IN BT474, SIGNAL = 0.66; EXPRESSED IN FETAL LIVER, SIGNAL = 0.67; EXPRESSED IN LUNG, SIGNAL = 0.93; EXPRESSED IN HELA, SIGNAL = 0.69; EXPRESSED IN ADULT LIVER, SIGNAL = 0.73; EXPRESSED IN PLACENTA, SIGNAL = 0.8; EXPRESSED IN BONE MARROW, SIGNAL = 0.76; EST_HUMAN HIT: AW297191.1, EVALUE 6.00e-06
KSFKVLMEKRKTKKRSILMSSATKT

SEQ ID NO: 43039 - protein, 60 aa, Homo sapiens
  MAP TO AC011998.2; EXPRESSED IN HBL100, SIGNAL = 1.7; EXPRESSED IN HELA, SIGNAL = 1.3; EXPRESSED IN ADULT LIVER, SIGNAL = 0.96; EXPRESSED IN BT474, SIGNAL = 1.3; EXPRESSED IN LUNG, SIGNAL = 1.1; EXPRESSED IN BRAIN, SIGNAL = 1.1; EST_HUMAN HIT: AU116831.1, EVALUE 4.00e-21; SWISSPROT HIT: O51195, EVALUE 5.80e+00
EAENGGNAGDEEPKLQFSYVECLLYSFHQLGQKLPDFLTAKLNAEKLKDFKIRLQYFARG

SEQ ID NO: 43040 - protein, 19 aa, Homo sapiens
  MAP TO AF170801.1; EXPRESSED IN BRAIN, SIGNAL = 0.98; EXPRESSED IN LUNG, SIGNAL = 3.1; EXPRESSED IN ADULT LIVER, SIGNAL =   1; EXPRESSED IN BT474, SIGNAL =   1
APPFSPPFIYLVPRAMSQS

SEQ ID NO: 43041 - protein, 62 aa, Homo sapiens
  MAP TO AC006111.2; EXPRESSED IN FETAL LIVER, SIGNAL = 0.69; EXPRESSED IN BRAIN, SIGNAL = 0.74; EXPRESSED IN BT474, SIGNAL = 0.75; EST_HUMAN HIT: BF243019.1, EVALUE 4.50e+00; SWISSPROT HIT: Q9X0H5, EVALUE 2.60e+00
YGLGPPAPESDAAVALTLQQEFARVGASAHDDSLEEKGLFFCQICQKNLSAMNVTRREQHVN

SEQ ID NO: 43042 - protein, 460 aa, Homo sapiens [sequence omitted]

SEQ ID NO: 43043 - protein, 304 aa, Homo sapiens
  MAP TO AL049911.2; EXPRESSED IN BT474, SIGNAL = 2.4; EXPRESSED IN ADULT LIVER, SIGNAL = 1.4; EXPRESSED IN BRAIN, SIGNAL =   1; EXPRESSED IN BONE MARROW, SIGNAL = 1.1; EXPRESSED IN LUNG, SIGNAL = 2.2; EXPRESSED IN PLACENTA, SIGNAL = 1.6; EXPRESSED IN HELA, SIGNAL = 1.7; EXPRESSED IN HBL100, SIGNAL = 1.8; EXPRESSED IN FETAL LIVER, SIGNAL = 1.6; EST_HUMAN HIT: AW373574.1, EVALUE 1.00e-73; SWISSPROT HIT: P31111, EVALUE 5.00e-05
VSHTHESENDLFHENCMLKKEIAMLKLEVATLKRQHQVKENKYFEDIKILQEKNAELQMTLKLKQKTLTKRASQYREQLKVLTAENTMLTSKLKEKQDKEILETEIESHHPRLASALQDHDQSVTSRKNQELAFHSAGDAHLQGIMDVDVSNTIYNNEVLHQPLYEAQRKSKSPKINLNYAGDDLRENALVSEHAQRDRCETQCQMKKAEHMYQNEQDNVDKHTEQQESLEQKLFKLESKNRWLRQQLVYAHKKVNKSKVTINIQFPETKMQRHLKEKNEEVFNYGNHLKECIDQYEKEKAERE

SEQ ID NO: 43044 - protein, 214 aa, Homo sapiens
  MAP TO AC011301.3; EXPRESSED IN BRAIN, SIGNAL = 1.2; EST_HUMAN HIT: BF530661.1, EVALUE 5.00e-16; SWISSPROT HIT: Q9QYC0, EVALUE 1.30e+00
ENMNDRNYADSMSQQDSRNMNYVMLGKPMNNGLMEKMVEESDEEVCLSSLECLRNQCFDLARKLSETNPQERNPQQNMNIRQHVRPEEDFPGRTPDRNYSDMLNLMRLEEQLSPRSRVFASCAKEDGCHERDDDTTSVNSDRSEEVFDMTKGNLTLLEKAIALETERAKAMREKMAMEAGRRDNMRSYEDQSPRQLPGEDRKPKSSDSHVKKPY

SEQ ID NO: 43045 - protein, 31 aa, Homo sapiens
  MAP TO AL109982.1; EXPRESSED IN HBL100, SIGNAL =   1; EXPRESSED IN BONE MARROW, SIGNAL = 1.2; EXPRESSED IN BRAIN, SIGNAL = 1.1; EXPRESSED IN ADULT LIVER, SIGNAL = 0.94; EXPRESSED IN FETAL LIVER, SIGNAL = 0.95; EST_HUMAN HIT: AW238499.1, EVALUE 8.00e-05; SWISSPROT HIT: P13539, EVALUE 4.80e+00
THGQQVYEKMFNITVHQINANQIDNEISRPS

SEQ ID NO: 43046 - protein, 26 aa, Homo sapiens
  MAP TO AC007402.3; EXPRESSED IN HELA, SIGNAL = 0.66; EXPRESSED IN BRAIN, SIGNAL = 0.73; EXPRESSED IN PLACENTA, SIGNAL = 0.61; EXPRESSED IN BT474, SIGNAL = 0.64; EXPRESSED IN HBL100, SIGNAL =  12
LTALLSQFFPLSLLALKWLKSFWRSN

SEQ ID NO: 43047 - protein, 91 aa, Homo sapiens
  MAP TO AE000659.1; EXPRESSED IN FETAL LIVER, SIGNAL = 1.2; EXPRESSED IN BT474, SIGNAL =   1; EXPRESSED IN BRAIN, SIGNAL = 1.5; EXPRESSED IN BONE MARROW, SIGNAL =   1; EXPRESSED IN LUNG, SIGNAL = 0.99; EXPRESSED IN HBL100, SIGNAL = 1.3; EXPRESSED IN PLACENTA, SIGNAL = 0.91; EXPRESSED IN HELA, SIGNAL = 0.97; EST_HUMAN HIT: AW873544.1, EVALUE 1.00e-14; SWISSPROT HIT: P01737, EVALUE 3.00e-18
AFLTINCTYTATGYPSLFWYVQYPGEGLQLLLKATKADDKGSNKGFEATYRKETTSFHLEKGSVQVSDSAVYFCALSDTVTGTAGGAEHKL

SEQ ID NO: 43048 - protein, 54 aa, Homo sapiens
  MAP TO AC007375.4; EXPRESSED IN BT474, SIGNAL = 1.3; EXPRESSED IN ADULT LIVER, SIGNAL = 1.1; EXPRESSED IN LUNG, SIGNAL = 4.8; EXPRESSED IN BRAIN, SIGNAL = 1.1; EXPRESSED IN BONE MARROW, SIGNAL =  15; EST_HUMAN HIT: BE348693.1, EVALUE 1.00e-21
CVFLPDNGAFFVNYVITAALLGTGMELLRLGSLFCYSTRLFFSRSEPERVNIRK

SEQ ID NO: 43049 - protein, 41 aa, Homo sapiens
  MAP TO AC007629.3; EXPRESSED IN HBL100, SIGNAL =   1; EXPRESSED IN HELA, SIGNAL = 0.66; EXPRESSED IN BONE MARROW, SIGNAL = 0.93; EXPRESSED IN FETAL LIVER, SIGNAL = 0.68; EXPRESSED IN LUNG, SIGNAL = 0.66; EXPRESSED IN ADULT LIVER, SIGNAL = 1.1; EXPRESSED IN BRAIN, SIGNAL = 1.1; EST_HUMAN HIT: AW835411.1, EVALUE 8.00e-16
KGFKDTSQYVVGELAALENEQKQIDTRAALVEKRLRYLMDT

SEQ ID NO: 43050 - protein, 44 aa, Homo sapiens
  MAP TO AC008088.1; EXPRESSED IN HELA, SIGNAL = 0.65; EXPRESSED IN PLACENTA, SIGNAL = 0.64; EXPRESSED IN BONE MARROW, SIGNAL = 1.1; EXPRESSED IN HBL100, SIGNAL = 0.98; EXPRESSED IN FETAL LIVER, SIGNAL = 0.59; EXPRESSED IN LUNG, SIGNAL = 0.67; EXPRESSED IN BRAIN, SIGNAL = 1.3; EST_HUMAN HIT: AL162091.1, EVALUE 1.00e-11; SWISSPROT HIT: P30622, EVALUE 1.20e+00
LQQDMQKFKNEVNTLEEEFLALKKENVQLHKEVGFYLLPLFVFS

SEQ ID NO: 43051 - protein, 27 aa, Homo sapiens
  MAP TO AC008067.1; EXPRESSED IN ADULT LIVER, SIGNAL = 1.1; EXPRESSED IN BRAIN, SIGNAL = 0.7; SWISSPROT HIT: P30997, EVALUE 8.00e-09; EST_HUMAN HIT: AV723447.1, EVALUE 1.00e-07
EQEDYDVRSRTSVQTEDDQLIAGQSAR

SEQ ID NO: 43052 - protein, 27 aa, Homo sapiens
  MAP TO AC008067.1; EXPRESSED IN ADULT LIVER, SIGNAL = 1.1; EXPRESSED IN BRAIN, SIGNAL = 0.7; EST_HUMAN HIT: AV723447.1, EVALUE 8.00e-08
LSRKIMMCVAGQVFRLRMTSSLQGRAH

SEQ ID NO: 43053 - protein, 36 aa, Homo sapiens
  MAP TO AC007639.5; EXPRESSED IN HELA, SIGNAL =   1; EXPRESSED IN ADULT LIVER, SIGNAL = 0.79; EXPRESSED IN BRAIN, SIGNAL = 0.7; EST_HUMAN HIT: AI568431.1, EVALUE 2.00e-01; SWISSPROT HIT: P55345, EVALUE 6.20e+00
VDGWWDGAEASCCGHRPGAAGLELCHSGLPRCWSRR

SEQ ID NO: 43054 - protein, 229 aa, Homo sapiens
  MAP TO AC008266.1; EXPRESSED IN BRAIN, SIGNAL = 0.89; EXPRESSED IN BT474, SIGNAL = 0.9; EXPRESSED IN BONE MARROW, SIGNAL = 0.66; EXPRESSED IN HBL100, SIGNAL =   1; EXPRESSED IN FETAL LIVER, SIGNAL = 0.59; EXPRESSED IN HELA, SIGNAL = 0.81; EXPRESSED IN ADULT LIVER, SIGNAL = 0.77; EXPRESSED IN PLACENTA, SIGNAL = 0.85; EXPRESSED IN LUNG, SIGNAL = 0.77; EST_HUMAN HIT: AL135448.1, EVALUE 5.00e-94; SWISSPROT HIT: P50898, EVALUE 6.20e-01
KLHWPEQELAKKSILNAEDSLIIDNKRSISHLSSGVLKDIFTTGTSSYNVLLQSKEEKKYHSQKQSSSTYSKRCRKPSKSPNTSRSKDPRRMKALVPVTSSGTWYCLERRPAVFVTSSVSSPVKFTHDISVTGNGIVLPPKPKSKVKWCHFSTLPKPKPQLSRSFEKGDDFSGKKFCILTAIKPTNLEKEKLRFFKSDYTYNPQFEYANPALPSVLAKHSHASDRFLKQ

SEQ ID NO: 43055 - protein, 35 aa, Homo sapiens; identical to SEQ ID NO: 38276
  MAP TO AL050342.29; EXPRESSED IN BRAIN, SIGNAL = 0.93; EXPRESSED IN BT474, SIGNAL = 1.1; SWISSPROT HIT: P35258, EVALUE 2.10e+00; EST_HUMAN HIT: BF204009.1, EVALUE 9.80e+00

SEQ ID NO: 43056 - protein, 72 aa, Homo sapiens; identical to SEQ ID NO: 38277
  MAP TO AL050342.29; EXPRESSED IN BRAIN, SIGNAL = 0.93; EXPRESSED IN BT474, SIGNAL = 1.1; SWISSPROT HIT: P53235, EVALUE 1.10e+00; EST_HUMAN HIT: BF344409.1, EVALUE 1.60e-01

SEQ ID NO: 43057 - protein, 49 aa, Homo sapiens
  MAP TO AL023913.5; EXPRESSED IN BRAIN, SIGNAL = 3.1; EST_HUMAN HIT: AA663884.1, EVALUE 9.00e-21; SWISSPROT HIT: P13795, EVALUE 7.00e-22
VTNDARENEMDENLEQVSGIIGNLRHMALDMGNEIDTQNRQIDRIMEKV

SEQ ID NO: 43058 - protein, 25 aa, Homo sapiens
  MAP TO AL023913.5; EXPRESSED IN BRAIN, SIGNAL = 3.1; EST_HUMAN HIT: BF345147.1, EVALUE 8.00e+00
LCFGSLVFNMFSTLCLLKLALWIPG

SEQ ID NO: 43059 - protein, 107 aa, Homo sapiens
  MAP TO AL031666.3; EXPRESSED IN HELA, SIGNAL = 0.96; EXPRESSED IN FETAL LIVER, SIGNAL = 1.1; EXPRESSED IN BT474, SIGNAL = 4.4; EXPRESSED IN BONE MARROW, SIGNAL = 0.93; EXPRESSED IN BRAIN, SIGNAL = 0.99; EXPRESSED IN LUNG, SIGNAL =   1; SWISSPROT HIT: P39712, EVALUE 3.30e-02; EST_HUMAN HIT: BF371021.1, EVALUE 7.00e-41
TPYTPNSQYQMLLDPTNPSAGTAKIDKQEKVKLNFDMTASPKILMSKPVLSGGTGRRISLSDMPRSPMSTNSSVHTGSDVEQDAEKKATSSHFSASEESMDFLDKST

SEQ ID NO: 43060 - protein, 44 aa, Homo sapiens
  MAP TO AL031666.3; EXPRESSED IN HELA, SIGNAL = 0.96; EXPRESSED IN FETAL LIVER, SIGNAL = 1.1; EXPRESSED IN BT474, SIGNAL = 4.4; EXPRESSED IN BONE MARROW, SIGNAL = 0.93; EXPRESSED IN BRAIN, SIGNAL = 0.99; EXPRESSED IN LUNG, SIGNAL =   1; EST_HUMAN HIT: R10454.1, EVALUE 6.00e-19; SWISSPROT HIT: P20758, EVALUE 7.00e-01
RFTWRTSAGSLGFLITLHLGHPTHPTASIKCCSIPPTPAPALPR

SEQ ID NO: 43061 - protein, 1202 aa, Homo sapiens
  MAP TO AC007282.2; EXPRESSED IN HELA, SIGNAL = 0.81; EXPRESSED IN BRAIN, SIGNAL =   1; EXPRESSED IN BT474, SIGNAL = 0.72; EXPRESSED IN FETAL LIVER, SIGNAL = 0.73; EST_HUMAN HIT: AI023682.1, EVALUE 1.00e-71; EST_HUMAN HIT: AI023682.1, EVALUE 1.00e-71; SWISSPROT HIT: P30622, EVALUE 2.00e-06
FQKFNKNGFDPFLRNINKMSVRKRKDQDIYKYRNILGAEVIEHEDQDPPYPAQSKTAGPANTTWAHDPNIFTTKMLETENKLAPDPTINTIKGLDTKNSLKENLPNVSLPSIKGESSRAGNVQANTCHLSKSLNFTPHIEYLKQSMILKSILSENLQDLSDKLFSKPEVSMNSEAREKSSSPLLSIHDKSSSSMEDNVLEKKQDLNNWLSEKDILNSKTTLSQIIKNIPADSFSEGSQIIENIPADSLLEGGQVIKNIPEYSLSEGGQIIKNIPADSFLESGPGQSPEVEEHVSKKHFEADERDFPIKKNSSTKKKHLISEVPNSKSGSSGTVHDYIMRQIFTAPIFSELEIEVKEPSETPMNLENQLPTPWKRSLSSHILFHEENADEIELPQPRSATSQIIQAFPIDTLLESGIIKVIELDKEHHKSSLLGTGITSPKGNLKDSQEYYSEIRSETEPLSEQSIPIIPKDTTSVSRAEFIQEDQNMFPQDSSYYSIANKELYLPRNGQRLCKDKNDLSSTLESLTNSLMDKLSESDEIMLKSFLKNIFNVFFKYNHSERRGQPEKELERLIQPSFTSDTEHLEELQEDFDKADKLDRKPILSPKLRVFLEELSESEVKHLKSELSKQIQHYLVERLSESGHITKEDLPKIYQNLYLMNEKAEQKGPNSFQGKYSETVKEIMSFVNNFNHHFIDKHLEIKLRSFLKEILQNYFLKNISESSLFNETASETIYPNISSLRTKSVSISFHELEQDISKGSFGRRFEINMKYPLSKSLQNYLIALSENELLHLKADLSKHLQSLFIEKLSKSGLMTKKQLEGINQHINLLNSSSIPLKYIKTHLPFRDDCHFVEKHSEKQNKYSRIVQQTTLQTVSEDKLREAELIREKEKKYFPLQNLKGNSSLIKEQKSYYTKEEAKTPSLIKVQPSSNENIQASPLSKSSEILTDILLKKLRKEHVFTQLPQAENSVHKTEIQDPYSWGGKSKITQSKAWCEKTLKMKSLDRKEHVNIYKWTVQEKPEAVLTSYPRIPNARMPREDEYLNRITFPSWQSSTLTHFNTETGEKSKLEDQYCQTLKGNNNNNKKHLVTFAQYKKEIQTLYIKPDEICSEKCAKFPEIQSFQYKVVEDEKNLKPHLFPELFKIEDLKPKVRKERDRVAQPKKSFNKIVRILPTTLPTTRIHLKKSVPRTLLHWTARRTIHVIMFF

SEQ ID NO: 43062 - protein, 31 aa, Homo sapiens
  MAP TO AC007496.2; EXPRESSED IN BONE MARROW, SIGNAL = 1.1; EXPRESSED IN PLACENTA, SIGNAL = 0.98; EXPRESSED IN ADULT LIVER, SIGNAL = 1.5; EXPRESSED IN BRAIN, SIGNAL =   1; EXPRESSED IN HELA, SIGNAL = 1.1; EXPRESSED IN HBL100, SIGNAL =   1; EXPRESSED IN FETAL LIVER, SIGNAL = 1.1; EXPRESSED IN BT474, SIGNAL =   1; SWISSPROT HIT: P56164, EVALUE 4.80e+00; EST_HUMAN HIT: BE884862.1, EVALUE 5.90e+00
LLVIFLFSVTPAIPSPPTPRMDPLWTSLLRL

SEQ ID NO: 43063 - protein, 34 aa, Homo sapiens
  MAP TO AC008110.1; EXPRESSED IN HELA, SIGNAL = 0.7; EXPRESSED IN BRAIN, SIGNAL = 0.73; EXPRESSED IN BT474, SIGNAL = 0.82; EXPRESSED IN FETAL LIVER, SIGNAL = 0.63; EXPRESSED IN LUNG, SIGNAL = 0.71; EST_HUMAN HIT: H19092.1, EVALUE 1.00e-12
GEPITFCEESFVKHRSSVMKQFLETAINLQLFKQ

SEQ ID NO: 43064 - protein, 29 aa, Homo sapiens
  MAP TO AC010092.2; EXPRESSED IN PLACENTA, SIGNAL = 1.1; EXPRESSED IN BRAIN, SIGNAL = 1.1; EXPRESSED IN HBL100, SIGNAL = 0.92; EXPRESSED IN ADULT LIVER, SIGNAL = 1.1; EXPRESSED IN BT474, SIGNAL = 0.97; EXPRESSED IN BONE MARROW, SIGNAL = 1.1; SWISSPROT HIT: Q00839, EVALUE 3.70e+00; EST_HUMAN HIT: AU131677.1, EVALUE 8.00e-08
IDEQQKLLEKYKERLNKCISMSKKLLIEK

SEQ ID NO: 43065 - protein, 38 aa, Homo sapiens
  MAP TO AC009228.2; EXPRESSED IN ADULT LIVER, SIGNAL = 0.74; EXPRESSED IN BRAIN, SIGNAL = 0.92; EXPRESSED IN BONE MARROW, SIGNAL = 0.95; EXPRESSED IN HBL100, SIGNAL = 0.98; EXPRESSED IN FETAL LIVER, SIGNAL = 0.78; EXPRESSED IN PLACENTA, SIGNAL = 0.93; EXPRESSED IN BT474, SIGNAL = 0.67; EXPRESSED IN LUNG, SIGNAL = 0.97; EXPRESSED IN HELA, SIGNAL = 0.92; EST_HUMAN HIT: AI376612.1, EVALUE 6.00e-16; SWISSPROT HIT: P07274, EVALUE 5.40e-01
LVNGFAKNPLQARREGLYFKGKDYRCVRADEYSLYAKN

SEQ ID NO: 43066 - protein, 96 aa, Homo sapiens
  MAP TO AC007944.1; EXPRESSED IN BT474, SIGNAL = 0.83; EXPRESSED IN BONE MARROW, SIGNAL = 0.69; EXPRESSED IN LUNG, SIGNAL = 1.4; EXPRESSED IN HELA, SIGNAL = 0.6; EXPRESSED IN HBL100, SIGNAL = 1.1; EXPRESSED IN FETAL LIVER, SIGNAL = 0.9; EXPRESSED IN PLACENTA, SIGNAL = 0.85; EXPRESSED IN BRAIN, SIGNAL = 0.99; EST_HUMAN HIT: BE160797.1, EVALUE 3.00e-19; SWISSPROT HIT: O43900, EVALUE 2.00e-19
  unsure 85
IDQGQMTYDGQHWHATETCFCCAHCKKSLLGRPFLPKQGQIFCSRACSAGEDPNGSDSSDSAFQNARAKESRRSAKIGKNKGKTXGAHAEPAQPAA

SEQ ID NO: 43067 - protein, 28 aa, Homo sapiens
  MAP TO AC007944.1; EXPRESSED IN BT474, SIGNAL = 0.83; EXPRESSED IN BONE MARROW, SIGNAL = 0.69; EXPRESSED IN LUNG, SIGNAL = 1.4; EXPRESSED IN HELA, SIGNAL = 0.6; EXPRESSED IN HBL100, SIGNAL = 1.1; EXPRESSED IN FETAL LIVER, SIGNAL = 0.9; EXPRESSED IN PLACENTA, SIGNAL = 0.85; EXPRESSED IN BRAIN, SIGNAL = 0.99; EST_HUMAN HIT: BF690158.1, EVALUE 3.50e+00
  unsure 24
RLPERQGQGVPAQCQNWQEQGQDXRSPC

SEQ ID NO: 43068 - protein, 34 aa, Homo sapiens
  MAP TO AC006317.3; EXPRESSED IN PLACENTA, SIGNAL = 0.89; EXPRESSED IN FETAL LIVER, SIGNAL = 0.83; EXPRESSED IN ADULT LIVER, SIGNAL = 0.97; EXPRESSED IN BRAIN, SIGNAL = 0.81; EXPRESSED IN BT474, SIGNAL = 0.7; EXPRESSED IN BONE MARROW, SIGNAL = 1.4; EXPRESSED IN HBL100, SIGNAL = 0.8; EXPRESSED IN LUNG, SIGNAL = 0.72; EXPRESSED IN HELA, SIGNAL = 0.77; EST_HUMAN HIT: BE732232.1, EVALUE 2.00e+00
ALVDFAQLVTRPKCPSLLQQPAQPLRSRWVPPSR

SEQ ID NO: 43069 - protein, 17 aa, Homo sapiens
  MAP TO AL034345.3; EXPRESSED IN FETAL LIVER, SIGNAL =   1; EXPRESSED IN BRAIN, SIGNAL = 1.8
ERFLLAFMCFLNLTGIS

SEQ ID NO: 43070 - protein, 91 aa, Homo sapiens
  MAP TO AL034345.3; EXPRESSED IN FETAL LIVER, SIGNAL =   1; EXPRESSED IN BRAIN, SIGNAL = 1.8; SWISSPROT HIT: P30622, EVALUE 5.00e+00
VLAEVTVSAQASAKIKNEVQEVKDKAQKIVDEIDSEKVKAESKLEAAKPALEEAEAALNVSSALLPLPTQVLEGFMFHYMKLTHQKTELNS

SEQ ID NO: 43071 - protein, 37 aa, Homo sapiens
  MAP TO AL031650.21; EXPRESSED IN BONE MARROW, SIGNAL = 0.93; EXPRESSED IN BRAIN, SIGNAL = 0.91; EXPRESSED IN BT474, SIGNAL = 1.2
AEHLPIHSEMLVLERGDPGQGHPHDRHGDCKEKKHKP

SEQ ID NO: 43072 - protein, 60 aa, Homo sapiens
  MAP TO AL078475.2; EXPRESSED IN PLACENTA, SIGNAL = 1.1; EXPRESSED IN LUNG, SIGNAL = 0.75; EXPRESSED IN BRAIN, SIGNAL = 0.75; EXPRESSED IN BT474, SIGNAL = 1.1; EXPRESSED IN ADULT LIVER, SIGNAL = 0.78; EXPRESSED IN HELA, SIGNAL = 1.7; EXPRESSED IN FETAL LIVER, SIGNAL = 0.7; EXPRESSED IN HBL100, SIGNAL = 1.1; EXPRESSED IN BONE MARROW, SIGNAL = 0.83; SWISSPROT HIT: P40890, EVALUE 4.40e+00; EST_HUMAN HIT: AA279718.1, EVALUE 1.00e-23
KALQKPTEVPVPYEKMLQDQSALIVQGLPEGVAFKHPENYDLATLKWILENTAGISFIIN

SEQ ID NO: 43073 - protein, 43 aa, Homo sapiens
  MAP TO AL109941.9; EXPRESSED IN BT474, SIGNAL = 0.95; EXPRESSED IN BONE MARROW, SIGNAL =   1; EXPRESSED IN BRAIN, SIGNAL = 1.1; EXPRESSED IN HBL100, SIGNAL = 0.99; EXPRESSED IN HELA, SIGNAL =   1; EST_HUMAN HIT: BE550539.1, EVALUE 7.00e+00; SWISSPROT HIT: P54726, EVALUE 2.10e+00
SVLQMHDDDYKRNEEKVEGEYGTNKFPLMGKKLQGHAFLGVDK

SEQ ID NO: 43074 - protein, 18 aa, Homo sapiens
  MAP TO AL109941.9; EXPRESSED IN BT474, SIGNAL = 0.95; EXPRESSED IN BONE MARROW, SIGNAL =   1; EXPRESSED IN BRAIN, SIGNAL = 1.1; EXPRESSED IN HBL100, SIGNAL = 0.99; EXPRESSED IN HELA, SIGNAL =   1
CSIIKNCTHILIVCVANA

SEQ ID NO: 43075 - protein, 86 aa, Homo sapiens
  MAP TO AL109984.5; EXPRESSED IN LUNG, SIGNAL = 2.9; EXPRESSED IN BRAIN, SIGNAL = 0.94; EXPRESSED IN ADULT LIVER, SIGNAL = 0.95; EXPRESSED IN BT474, SIGNAL = 1.2; EXPRESSED IN HELA, SIGNAL = 1.2; EXPRESSED IN HBL100, SIGNAL = 1.5; EST_HUMAN HIT: AW166933.1, EVALUE 5.00e-49; SWISSPROT HIT: P49711, EVALUE 8.00e-22
DKPHKCEFCDKCFSRKDNLTMHMRCHTSVKPHKCHLCDYAAVDSSSLKKHLRIHSDERPYKCQLCPYASRNSSQLTVHLRSHTGES

SEQ ID NO: 43076 - protein, 58 aa, Homo sapiens; identical to SEQ ID NO: 35379
  MAP TO AP000054.1; EXPRESSED IN HELA, SIGNAL = 0.6; EXPRESSED IN LUNG, SIGNAL = 0.96; EXPRESSED IN BRAIN, SIGNAL = 1.4; EXPRESSED IN PLACENTA, SIGNAL = 0.67; EXPRESSED IN HBL100, SIGNAL =   1; EXPRESSED IN FETAL LIVER, SIGNAL = 0.62; EXPRESSED IN ADULT LIVER, SIGNAL = 0.67; EST_HUMAN HIT: BE895008.1, EVALUE 3.00e-27; SWISSPROT HIT: P53805, EVALUE 2.00e-28

SEQ ID NO: 43077 - protein, 68 aa, Homo sapiens
  MAP TO AP000044.1; EXPRESSED IN LUNG, SIGNAL = 0.86; EXPRESSED IN HELA, SIGNAL = 0.77; EXPRESSED IN ADULT LIVER, SIGNAL = 1.4; EXPRESSED IN PLACENTA, SIGNAL = 0.7; EXPRESSED IN BRAIN, SIGNAL = 0.72; EXPRESSED IN BT474, SIGNAL = 0.78; EXPRESSED IN BONE MARROW, SIGNAL = 0.78; EXPRESSED IN HBL100, SIGNAL = 1.1; EXPRESSED IN FETAL LIVER, SIGNAL = 0.92; EST_HUMAN HIT: AV735185.1, EVALUE 4.00e-32; SWISSPROT HIT: P17181, EVALUE 4.00e-33
LLLSTSEEQIEKCFIIENISTIATVEETNQTDEDHKKYSSQTSQDSGNYSNEDESESKTSEELQQDFV

SEQ ID NO: 43078 - protein, 20 aa, Homo sapiens
  MAP TO AC011739.2; EXPRESSED IN LUNG, SIGNAL = 1.2; EXPRESSED IN BRAIN, SIGNAL = 1.3; EXPRESSED IN BONE MARROW, SIGNAL = 1.1; EXPRESSED IN HBL100, SIGNAL = 0.99; EXPRESSED IN FETAL LIVER, SIGNAL = 1.1; EST_HUMAN HIT: AA309974.1, EVALUE 6.00e-03
MEEVDMIRLQLKLQGSVSVK

SEQ ID NO: 43079 - protein, 59 aa, Homo sapiens
  MAP TO AL049735.4; EXPRESSED IN LUNG, SIGNAL = 0.68; EXPRESSED IN HELA, SIGNAL = 0.79; EXPRESSED IN ADULT LIVER, SIGNAL = 0.65; EXPRESSED IN PLACENTA, SIGNAL = 0.61; EXPRESSED IN BRAIN, SIGNAL = 0.76; EXPRESSED IN BONE MARROW, SIGNAL = 0.63
IKRRRRKKKREKKKEEQEGEEQRGGGGERRRKKKRRKKKERRRKKKEGGGEEGEEEKKE

SEQ ID NO: 43080 - protein, 23 aa, Homo sapiens
  MAP TO AP000105.1; EXPRESSED IN LUNG, SIGNAL = 1.1; EXPRESSED IN HELA, SIGNAL = 1.8; EXPRESSED IN ADULT LIVER, SIGNAL = 0.93; EXPRESSED IN PLACENTA, SIGNAL = 1.2; EXPRESSED IN BT474, SIGNAL = 1.5; EXPRESSED IN FETAL LIVER, SIGNAL = 1.7; EXPRESSED IN BRAIN, SIGNAL = 1.1; EXPRESSED IN BONE MARROW, SIGNAL = 1.2; EXPRESSED IN HBL100, SIGNAL = 1.1; EST_HUMAN HIT: W78802.1, EVALUE 1.00e-03
EYKGLPYCGNFDEYQRTSLANKC

SEQ ID NO: 43081 - protein, 64 aa, Homo sapiens
  MAP TO AC008833.2; EXPRESSED IN BRAIN, SIGNAL = 0.97; EXPRESSED IN BONE MARROW, SIGNAL = 1.1; EXPRESSED IN HBL100, SIGNAL = 0.92; EXPRESSED IN PLACENTA, SIGNAL = 1.1; EXPRESSED IN ADULT LIVER, SIGNAL =   1; EXPRESSED IN FETAL LIVER, SIGNAL = 0.96; EST_HUMAN HIT: T51067.1, EVALUE 6.50e+00
SLSIKEERKCQSLPPGILVRLNEISHANDLTQSTAHSKYSINVNSLSLLLSLVFILISLFLHWK

SEQ ID NO: 43082 - protein, 33 aa, Homo sapiens
  MAP TO AC009886.2; EXPRESSED IN PLACENTA, SIGNAL = 1.1; EXPRESSED IN ADULT LIVER, SIGNAL = 2.5; EXPRESSED IN FETAL LIVER, SIGNAL = 2.8; EXPRESSED IN BRAIN, SIGNAL = 1.4; EST_HUMAN HIT: R61228.1, EVALUE 2.00e-13; SWISSPROT HIT: P50442, EVALUE 2.00e-14
DYPIHSVEDRHKLAAQGKFVTTEFEPCFDAADF

SEQ ID NO: 43083 - protein, 34 aa, Homo sapiens
  MAP TO AC009886.2; EXPRESSED IN PLACENTA, SIGNAL = 1.1; EXPRESSED IN ADULT LIVER, SIGNAL = 2.5; EXPRESSED IN FETAL LIVER, SIGNAL = 2.8; EXPRESSED IN BRAIN, SIGNAL = 1.4; EST_HUMAN HIT: AV658691.1, EVALUE 7.00e-07
PVHCVCSFLFQLGLSHPLCRRQTQIGCSGKICDN

SEQ ID NO: 43084 - protein, 73 aa, Homo sapiens
  MAP TO AC011301.3; EXPRESSED IN BRAIN, SIGNAL =   1; EST_HUMAN HIT: BE222152.1, EVALUE 7.00e-22; SWISSPROT HIT: Q01538, EVALUE 2.00e-15
ESKLLFVFLFTSRPMCFVKQLEIPQYGYRNNVPTTTPRSNLAKELEKYSKTSFEYNSYDNHTYGKRAIAPKVQ

SEQ ID NO: 43085 - protein, 39 aa, Homo sapiens
  MAP TO AP000197.1; EXPRESSED IN BT474, SIGNAL = 0.62; EXPRESSED IN BONE MARROW, SIGNAL = 0.7; EXPRESSED IN HBL100, SIGNAL = 1.3; EXPRESSED IN LUNG, SIGNAL = 1.2; EXPRESSED IN ADULT LIVER, SIGNAL =   1; EXPRESSED IN BRAIN, SIGNAL = 1.5; EXPRESSED IN PLACENTA, SIGNAL = 0.74; EXPRESSED IN FETAL LIVER, SIGNAL = 0.61; EXPRESSED IN HELA, SIGNAL = 0.65; SWISSPROT HIT: Q9ZD03, EVALUE 4.70e+00
MLIISTVFKTTTKEFPEYSLSMLLDTSYTEITFDDSVNR

SEQ ID NO: 43086 - protein, 82 aa, Homo sapiens; identical to SEQ ID NO: 36650
  MAP TO AL031676.2; EXPRESSED IN PLACENTA, SIGNAL = 0.61; EXPRESSED IN BT474, SIGNAL = 0.69; EXPRESSED IN BONE MARROW, SIGNAL = 0.8; EXPRESSED IN FETAL LIVER, SIGNAL = 0.62; EXPRESSED IN LUNG, SIGNAL = 0.62; EXPRESSED IN HELA, SIGNAL = 0.68; EXPRESSED IN ADULT LIVER, SIGNAL = 0.88; EXPRESSED IN BRAIN, SIGNAL = 0.77; EST_HUMAN HIT: AA574332.1, EVALUE 4.40e+00; SWISSPROT HIT: P45442, EVALUE 1.00e+00

SEQ ID NO: 43087 - protein, 27 aa, Homo sapiens
  MAP TO AC010983.3; EXPRESSED IN PLACENTA, SIGNAL = 1.3; EXPRESSED IN ADULT LIVER, SIGNAL = 1.3; EXPRESSED IN BRAIN, SIGNAL = 0.96; EST_HUMAN HIT: AA580490.1, EVALUE 1.00e-05
HKAKVITVFHFHIFSHWKVFRGNSMHG

SEQ ID NO: 43088 - protein, 46 aa, Homo sapiens
  MAP TO AC007880.1; EXPRESSED IN HBL100, SIGNAL = 0.67; EXPRESSED IN BRAIN, SIGNAL = 0.87; EXPRESSED IN PLACENTA, SIGNAL = 0.78; EXPRESSED IN BT474, SIGNAL = 0.71; EXPRESSED IN BONE MARROW, SIGNAL = 0.87; EXPRESSED IN FETAL LIVER, SIGNAL = 1.9; EXPRESSED IN LUNG, SIGNAL = 0.83; EXPRESSED IN HELA, SIGNAL = 0.69; EXPRESSED IN ADULT LIVER, SIGNAL = 0.69; SWISSPROT HIT: P34696, EVALUE 7.90e+00; EST_HUMAN HIT: AW976692.1, EVALUE 1.60e+00
PATPCDVTTGTSAAILDHEVTLRIEAAYPDSDQGATVPVLDCSPLI

SEQ ID NO: 43089 - protein, 63 aa, Homo sapiens
  MAP TO AC004832.2; EXPRESSED IN HBL100, SIGNAL = 0.92; EXPRESSED IN FETAL LIVER, SIGNAL = 1.4; EXPRESSED IN HELA, SIGNAL = 0.73; EXPRESSED IN BRAIN, SIGNAL = 0.73; EXPRESSED IN PLACENTA, SIGNAL = 0.76; EXPRESSED IN ADULT LIVER, SIGNAL = 1.2; EXPRESSED IN LUNG, SIGNAL = 0.8; EXPRESSED IN BONE MARROW, SIGNAL = 1.7; EXPRESSED IN BT474, SIGNAL = 0.63; SWISSPROT HIT: P49193, EVALUE 4.00e-05; EST_HUMAN HIT: AV646993.1, EVALUE 1.00e-12
VIQLYDSGGLCGYDYEGCPVYFNIIGSLDPKGLLLSASKQDMIRKRIKVCELLLHECELQTQK

SEQ ID NO: 43090 - protein, 42 aa, Homo sapiens
  MAP TO AC004832.2; EXPRESSED IN HBL100, SIGNAL = 0.92; EXPRESSED IN FETAL LIVER, SIGNAL = 1.4; EXPRESSED IN HELA, SIGNAL = 0.73; EXPRESSED IN BRAIN, SIGNAL = 0.73; EXPRESSED IN PLACENTA, SIGNAL = 0.76; EXPRESSED IN ADULT LIVER, SIGNAL = 1.2; EXPRESSED IN LUNG, SIGNAL = 0.8; EXPRESSED IN BONE MARROW, SIGNAL = 1.7; EXPRESSED IN BT474, SIGNAL = 0.63; EST_HUMAN HIT: T66393.1, EVALUE 1.60e+00; SWISSPROT HIT: P38681, EVALUE 8.00e+00
RSSSCMTRVVFVATTTKAALCTSTSLGPSTPRVSCCQPPSRI

SEQ ID NO: 43091 - protein, 240 aa, Homo sapiens
  MAP TO AL023656.8; EXPRESSED IN PLACENTA, SIGNAL = 0.65; EXPRESSED IN BONE MARROW, SIGNAL = 0.63; EXPRESSED IN FETAL LIVER, SIGNAL = 0.59; EXPRESSED IN LUNG, SIGNAL = 0.7; EXPRESSED IN ADULT LIVER, SIGNAL = 0.74; EXPRESSED IN BRAIN, SIGNAL = 1.4; EST_HUMAN HIT: T10233.1, EVALUE 4.00e-64; SWISSPROT HIT: Q04652, EVALUE 3.00e-12
VRWLEHNCHYQYMDELLQYIRFGLMDVDTLHTVALSHPLVQASETATALVNEALEYHQSIYAQPVWQTRRTKPRFQSDTLYIIGGKKREVCKVKELRYFNPVDQENALIAAIANWSELAPMPVGRSHHCVAVMGDFLFVAGGEVEHASGRTCAVRTACRYDPRSNSWAEIAPMKNCREHFVLGAMEEYLYAVGGRNELRQVLPTVERYCPKKNKWTFVQSFDRSLSCHAGYVADGLLWIS

SEQ ID NO: 43092 - protein, 31 aa, Homo sapiens
  MAP TO AL023656.8; EXPRESSED IN PLACENTA, SIGNAL = 0.65; EXPRESSED IN BONE MARROW, SIGNAL = 0.63; EXPRESSED IN FETAL LIVER, SIGNAL = 0.59; EXPRESSED IN LUNG, SIGNAL = 0.7; EXPRESSED IN ADULT LIVER, SIGNAL = 0.74; EXPRESSED IN BRAIN, SIGNAL = 1.4; EST_HUMAN HIT: T10233.1, EVALUE 3.00e-04
HGRAPAIHPLWPNGCGYSPYSCPVPPPCPSK

SEQ ID NO: 43093 - protein, 61 aa, Homo sapiens
  MAP TO AC005193.2; EXPRESSED IN BONE MARROW, SIGNAL = 0.75; EXPRESSED IN HBL100, SIGNAL = 0.66; EXPRESSED IN FETAL LIVER, SIGNAL = 1.2; EXPRESSED IN HELA, SIGNAL = 0.75; EXPRESSED IN BRAIN, SIGNAL = 0.73; EST_HUMAN HIT: AL157645.1, EVALUE 2.00e-04; SWISSPROT HIT: Q11203, EVALUE 8.00e-04
EIVNHVKMGLLVFVRNLLLALCLFLVLGFLYYSAWKLHLLQWEEDSSKYSHSSSPQEKPVA

SEQ ID NO: 43094 - protein, 84 aa, Homo sapiens
  MAP TO AL096816.12; EXPRESSED IN BONE MARROW, SIGNAL = 1.1; EXPRESSED IN LUNG, SIGNAL = 2.4; EXPRESSED IN BRAIN, SIGNAL = 0.93; EXPRESSED IN FETAL LIVER, SIGNAL = 0.92; EST_HUMAN HIT: AI696698.1, EVALUE 7.00e-28
KTVTTEEYLVNPVGMNRYSVDTSASTFNHRGSLHPSSSLYCKRQNSGDSHLGGGPAATAGGPRTSPMSSGGPSAPGLRPPASSP

SEQ ID NO: 43095 - protein, 53 aa, Homo sapiens
  MAP TO AC005064.2; EXPRESSED IN FETAL LIVER, SIGNAL = 8.2; EXPRESSED IN ADULT LIVER, SIGNAL = 0.82; EXPRESSED IN BRAIN, SIGNAL = 1.2; EXPRESSED IN PLACENTA, SIGNAL = 0.74; SWISSPROT HIT: P24821, EVALUE 3.00e-03; EST_HUMAN HIT: AV648584.1, EVALUE 3.00e-25
ATQFRWIQKGEETEKQSWAIDHVYIGEACPKLCSGHGYCTTGAICICDESFQG

SEQ ID NO: 43096 - protein, 149 aa, Homo sapiens
  MAP TO AC007537.3; EXPRESSED IN LUNG, SIGNAL = 0.77; EXPRESSED IN PLACENTA, SIGNAL = 0.73; EXPRESSED IN HBL100, SIGNAL =   1; EXPRESSED IN FETAL LIVER, SIGNAL = 0.79; EXPRESSED IN ADULT LIVER, SIGNAL = 0.8; EXPRESSED IN BRAIN, SIGNAL = 0.79; EXPRESSED IN BT474, SIGNAL = 0.87; EXPRESSED IN HELA, SIGNAL =  17; EST_HUMAN HIT: BE814458.1, EVALUE 2.00e-33; SWISSPROT HIT: Q07954, EVALUE 4.00e-22
KFYLWVSKYSSFHFVVLGATELLLLARRTDLRRISLDTPDFTDIVLQLEDIRHAIAIDYDPVEGYIYWTDDEVRAIRRSFIDGSGSQFVVTAQIAHPDGIAVDWVARNLYWTDTGTDRIEVTRLNGTMRKILISEDLEEPRAIVLDPMV

SEQ ID NO: 43097 - protein, 45 aa, Homo sapiens
  MAP TO AC005883.6; EXPRESSED IN LUNG, SIGNAL = 0.69; EXPRESSED IN HELA, SIGNAL = 0.93; EXPRESSED IN BRAIN, SIGNAL = 0.98; EXPRESSED IN BONE MARROW, SIGNAL = 0.68; EXPRESSED IN HBL100, SIGNAL = 1.2; EXPRESSED IN FETAL LIVER, SIGNAL = 0.61; SWISSPROT HIT: O75493, EVALUE 1.80e-01; EST_HUMAN HIT: H23161.1, EVALUE 2.00e-20
QIFLSMSDNFRPVQPLNNRCIRTNINFSLQGKDCPNNRAQKLQYR

SEQ ID NO: 43098 - protein, 93 aa, Homo sapiens
  MAP TO AP000095.1; EXPRESSED IN BONE MARROW, SIGNAL = 0.79; EXPRESSED IN LUNG, SIGNAL = 0.63; EXPRESSED IN ADULT LIVER, SIGNAL =   1; EXPRESSED IN BRAIN, SIGNAL = 1.4; EXPRESSED IN PLACENTA, SIGNAL = 0.68; EXPRESSED IN BT474, SIGNAL = 0.9; EXPRESSED IN FETAL LIVER, SIGNAL = 0.65; EXPRESSED IN HELA, SIGNAL = 0.62; EST_HUMAN HIT: AW949408.1, EVALUE 2.00e-20; SWISSPROT HIT: P39086, EVALUE 7.00e-34
KMWAFMSSRQQTALVRNSDEGIQRVLTTDYALLMESTSIEYVTQRNCNLTQIGGLIDSKGYGVGTPIGKTGRHEPRLRYRMSVTSIEGNGLRV

SEQ ID NO: 43099 - protein, 46 aa, Homo sapiens
  MAP TO AL049814.6; EXPRESSED IN HELA, SIGNAL = 0.7; EXPRESSED IN BRAIN, SIGNAL = 0.82; EXPRESSED IN LUNG, SIGNAL = 0.59; EXPRESSED IN ADULT LIVER, SIGNAL = 0.69; EXPRESSED IN PLACENTA, SIGNAL = 0.61
WSLIPWKGKDLPINSLVKEAQVIAGVRYISISASQISLFSLVEMRE

SEQ ID NO: 43100 - protein, 62 aa, Homo sapiens
  MAP TO AP000037.1; EXPRESSED IN PLACENTA, SIGNAL = 0.94; EXPRESSED IN BRAIN, SIGNAL = 1.2; EXPRESSED IN BONE MARROW, SIGNAL = 1.1; EXPRESSED IN HELA, SIGNAL = 0.62; EXPRESSED IN ADULT LIVER, SIGNAL = 0.7; SWISSPROT HIT: O43426, EVALUE 1.00e-30; EST_HUMAN HIT: AV732718.1, EVALUE 6.00e-26
AVDTVKTGMGGATGNKGAVAIRMLFHTTSLCFVCSHFAAGQSQVKERNEDFIEIARKLSFPM

SEQ ID NO: 43101 - protein, 41 aa, Homo sapiens
  MAP TO AC005880.2; EXPRESSED IN LUNG, SIGNAL = 1.4; EXPRESSED IN BONE MARROW, SIGNAL = 0.95; EXPRESSED IN BRAIN, SIGNAL =   1; EXPRESSED IN HELA, SIGNAL = 1.2; EST_HUMAN HIT: BE788055.1, EVALUE 4.20e+00; SWISSPROT HIT: P16899, EVALUE 4.70e+00
RFIYKRRWHHLLWLFNENIWFCLIWSIGGRQRNFRLWSWWH

SEQ ID NO: 43102 - protein, 712 aa, Homo sapiens
  MAP TO AC005880.2; EXPRESSED IN LUNG, SIGNAL = 1.4; EXPRESSED IN BONE MARROW, SIGNAL = 0.95; EXPRESSED IN BRAIN, SIGNAL =   1; EXPRESSED IN HELA, SIGNAL = 1.2; EST_HUMAN HIT: AW389729.1, EVALUE 1.00e-112; SWISSPROT HIT: P05130, EVALUE 9.00e-06
QAGDRVLVYYERPVGQSNQGAVLQDNFGQLEENFLSSSCQSGYEEEAAGLTVDTESRELDSEFEDLASDVRAQNEFKDEAQSLSHSPKRVPTTLSIKPLGAISPVLNRKLAVGSHPLPPKIQSKDGNKPPPLKTSEITDPAQVSKPTQGSAFKPPVPPRPQAKVPLPSADAPNQAEPDVLVEKPEKVVPPPLVDKSAEKQAKNVDAIDDAAAPKQFLAKQEVAKDVTSETSCPTKDSSDDRQTWESSEILYRNKLGKWTRTRASCLFDIEACHRYLNIALWCRDPFKLGGLICLGHVSLKLEDVALGCLATSNTEYLSKLRLEAPSPKAIVTRTALRNLSMQKGFNDKFCYGDITIHFKYLKEGESDHHVVTNVEKEKEPHLVEEVSVLPKEEQFVGQMGLTENKHSFQDTQFQNPTWCDYCKKKVWTKAASQCMFCAYVCHKKCQEKCLAETSVCGATDRQIDRTLKNLRLEGQETLLGLPPRVDAEASKSVNKTTGLTRHIINTSSRLLNLRQVSKTRLSEPGTDLVEPSPKHTPNTSDNEGSDTEVCGPNSPSKRGNSTGIKLVRKEGGLDDSVFIAVKEIGRDLYRGLPTEERIQKLEFMLDKLQNEIDQELEHNNSLVREEKETTDTRKKSLLSAALAKSGERLQALTLLMIHYRAGIEDIETLESLSLDQHSKKISKYTDDTEEDLDNEISQLIDSQPFSSISDDL

SEQ ID NO: 43103 - protein, 51 aa, Homo sapiens
  MAP TO AC002553.1; EXPRESSED IN BRAIN, SIGNAL = 1.2; EXPRESSED IN HBL100, SIGNAL = 1.6; EXPRESSED IN HELA, SIGNAL = 1.7; EXPRESSED IN PLACENTA, SIGNAL = 0.96; EXPRESSED IN ADULT LIVER, SIGNAL = 0.99; EXPRESSED IN BONE MARROW, SIGNAL =   2; EXPRESSED IN FETAL LIVER, SIGNAL = 1.1; EXPRESSED IN BT474, SIGNAL = 1.2; EST_HUMAN HIT: BE514943.1, EVALUE 3.00e-10; SWISSPROT HIT: P36213, EVALUE 6.00e+00
IWFYLQATACWGPFNKPRPASLPLQHCCGCPGCSCGCCSFCTPDGCVQNKR

SEQ ID NO: 43104 - protein, 168 aa, Homo sapiens
  MAP TO AC002553.1; EXPRESSED IN BRAIN, SIGNAL = 1.2; EXPRESSED IN HBL100, SIGNAL = 1.6; EXPRESSED IN HELA, SIGNAL = 1.7; EXPRESSED IN PLACENTA, SIGNAL = 0.96; EXPRESSED IN ADULT LIVER, SIGNAL = 0.99; EXPRESSED IN BONE MARROW, SIGNAL =   2; EXPRESSED IN FETAL LIVER, SIGNAL = 1.1; EXPRESSED IN BT474, SIGNAL = 1.2; EST_HUMAN HIT: BE514943.1, EVALUE 1.00e-48; SWISSPROT HIT: P42568, EVALUE 1.10e+00
PSISQGLPASRYNTAADALAALVDAAASAPQMDVSKTKESKHEAARLEENLRSRSAAVSEQQQLEQKTLEVEKRSVQCLYTSSAFPSGKPQPHSSVVYSEAGKDKGPPPKSRYEEELRTRGKTTITAANFIDVIITRQIASDKDARERGSQSSDSSSSCMYLNPSFTM

SEQ ID NO: 43105 - protein, 36 aa, Homo sapiens
  MAP TO AC009477.2; EXPRESSED IN BT474, SIGNAL = 1.2; EXPRESSED IN HELA, SIGNAL = 1.1; EXPRESSED IN BRAIN, SIGNAL = 0.92
QAYGYGPYGGAYPPGTQVVYAANGQAYAVPYQYPYA

SEQ ID NO: 43106 - protein, 28 aa, Homo sapiens
  MAP TO AC009477.2; EXPRESSED IN BT474, SIGNAL = 1.2; EXPRESSED IN HELA, SIGNAL = 1.1; EXPRESSED IN BRAIN, SIGNAL = 0.92; EST_HUMAN HIT: BF312506.1, EVALUE 2.00e-08
RLMAMGHTVVRTRQELKLSTLRMGRRMP

SEQ ID NO: 43107 - protein, 614 aa, Homo sapiens
  MAP TO AC003002.1; EXPRESSED IN HBL100, SIGNAL =   1; EXPRESSED IN HELA, SIGNAL = 1.2; EXPRESSED IN PLACENTA, SIGNAL = 1.4; EXPRESSED IN FETAL LIVER, SIGNAL =   1; EXPRESSED IN BT474, SIGNAL = 1.4; EXPRESSED IN BRAIN, SIGNAL = 1.1; SWISSPROT HIT: P51523, EVALUE 0.00e+00; EST_HUMAN HIT: AF150239.1, EVALUE 1.00e-111; EST_HUMAN HIT: AF150239.1, EVALUE 1.00e-111
CWHGAKDEEAPSKQCVSVGVSQVTTLKPALSTQKAQPCETCSSLLKDILHLAEHDGTHPKRTAKLYLHQKEHLREKLTRSDEGRPSFVNDSVHLAKRNLTCMQGGKDFTGDSDLQQQALHSGWKPHRDTHGVEAFQSGQNNYSCTQCGKDFCHQHTLFEHQKIHTEERPYECSECGKLFRYNSDLIKHQRNHTGERPYKCSECGKAFSLKYNVVQHQKIHTGERPYECSECGKAFLRKSHLLQHQRIHTRPRPYVCSECGKAFLTQAHLVGHQKIHTGERPYGCNECGKYFMYSSALIRHQKVHTGERPFYCCECGKFFMDSCTLIIHQRVHTGEKPYECNECGKFFRYRSTLIRHQKVHTGEKPYECSECGKFFMDTSTLIIHQRVHTGEKPYECNKCGKFFRYCFTLNRHQRVHSGERPYECSECGKFFVDSCTLKSHQRVHTGERPFECSICGKSFRCRSTLDTHQRIHTGERPYECSECGKFFRHNSNHIRHRRNHFGERSFECTECGRVFSQNSHLIRHQKVHTRERTYKCSKCGKFFMDSSTLISHERVHTGEKPYECSECGKVFRYNSSLIKHRRIHTGERPYQCSECGRVFNQNSHLIQHQKVHTR

SEQ ID NO: 43108 - protein, 58 aa, Homo sapiens
  MAP TO AL035416.7; EXPRESSED IN LUNG, SIGNAL = 2.1; EXPRESSED IN BRAIN, SIGNAL =   1; SWISSPROT HIT: P32892, EVALUE 2.00e+00
GGKKASQEAVRCGKNLDSKSGRGEGVWEDATLDLDAGWKDLAEYICRIYDLMTSILQS

SEQ ID NO: 43109 - protein, 71 aa, Homo sapiens
  MAP TO AF017257.1; EXPRESSED IN FETAL LIVER, SIGNAL = 1.1; EXPRESSED IN LUNG, SIGNAL = 1.9; EXPRESSED IN BRAIN, SIGNAL = 1.1; EXPRESSED IN HELA, SIGNAL =   1; EXPRESSED IN PLACENTA, SIGNAL = 1.3; EST_HUMAN HIT: BE719553.1, EVALUE 2.00e-37; SWISSPROT HIT: P15037, EVALUE 2.00e-38
VARRWGKRKNKPKMNYEKLSRGLRYYYDKNIIHKTSGKRYVYRFVCDLQNLLGFTPEELHAILGVQPDTED

SEQ ID NO: 43110 - protein, 58 aa, Homo sapiens
  MAP TO AF017257.1; EXPRESSED IN FETAL LIVER, SIGNAL = 1.1; EXPRESSED IN LUNG, SIGNAL = 1.9; EXPRESSED IN BRAIN, SIGNAL = 1.1; EXPRESSED IN HELA, SIGNAL =   1; EXPRESSED IN PLACENTA, SIGNAL = 1.3; EST_HUMAN HIT: AV685234.1, EVALUE 2.00e-29; SWISSPROT HIT: O33367, EVALUE 2.00e+00
ASCATSRTCWGSRPRNCTPSWASSPTRRTEVAGTTLSRPQARGLSGKPILTSCSEDPG

SEQ ID NO: 43111 - protein, 38 aa, Homo sapiens
  MAP TO AJ011929.1; EXPRESSED IN FETAL LIVER, SIGNAL = 0.98; EXPRESSED IN BRAIN, SIGNAL = 0.98; EXPRESSED IN HELA, SIGNAL = 2.2; EXPRESSED IN HBL100, SIGNAL = 1.1; EXPRESSED IN PLACENTA, SIGNAL = 2.7; EXPRESSED IN ADULT LIVER, SIGNAL = 2.2; EXPRESSED IN BT474, SIGNAL = 1.3; EXPRESSED IN LUNG, SIGNAL = 1.6; EXPRESSED IN BONE MARROW, SIGNAL = 1.4; EST_HUMAN HIT: R24918.1, EVALUE 5.00e-12
MATLFMDPLGDDGGGWGKRLSGVHRKGHPIHLIIKILL

SEQ ID NO: 43112 - protein, 72 aa, Homo sapiens
  MAP TO AL035703.17; EXPRESSED IN BT474, SIGNAL = 1.2; EXPRESSED IN FETAL LIVER, SIGNAL = 1.5; EXPRESSED IN HBL100, SIGNAL = 1.4; EXPRESSED IN HELA, SIGNAL = 1.6; EXPRESSED IN BRAIN, SIGNAL = 0.9; EXPRESSED IN LUNG, SIGNAL =  12; SWISSPROT HIT: P15621, EVALUE 1.00e-11; EST_HUMAN HIT: BF663791.1, EVALUE 1.00e-18
DIEDPYDCKKCRMSFPTLQDHRKHIHEVHSKEYHPCPTCGKIFSAPSMLERHVVTHVGGKPFSCGICNKAYQ

SEQ ID NO: 43113 - protein, 235 aa, Homo sapiens
  MAP TO AC004613.1; EXPRESSED IN FETAL LIVER, SIGNAL =   1; EXPRESSED IN LUNG, SIGNAL = 1.1; EXPRESSED IN BRAIN, SIGNAL = 1.3; EXPRESSED IN ADULT LIVER, SIGNAL = 1.1; EST_HUMAN HIT: AI984820.1, EVALUE 1.00e-58; SWISSPROT HIT: Q61200, EVALUE 1.00e-129
TNGGKSELLKSGSSKSTLKHIWTESSKDLSISRLLSQTFRGKENDTDLDLRYDTPEPYSEQDLWDWLRNSTDLQEPRPRAKRRPIVKTGKFKKMFGWGDFHSNIKTVKLNLLITGKIVDHGNGTFSVYFRHNSTGQGNVSVSLVPPTKIVEFDLAQQTVIDAKDSKSFNCRIEYEKVDKATKNTLCNYDPSKTCYQEQTQSHVSWLCSKPFKVICIYISFYSTDYKLVQKVCPDY

SEQ ID NO: 43114 - protein, 31 aa, Homo sapiens
  MAP TO AC012123.1; EXPRESSED IN ADULT LIVER, SIGNAL = 1.1; EXPRESSED IN FETAL LIVER, SIGNAL = 0.98; EXPRESSED IN LUNG, SIGNAL = 0.98; EXPRESSED IN BRAIN, SIGNAL = 1.1; EXPRESSED IN BONE MARROW, SIGNAL = 0.98; EST_HUMAN HIT: R10052.1, EVALUE 5.20e+00
EVFWPSENKWRLSEGLTSKGESLPVDLQEVH

SEQ ID NO: 43115 - protein, 25 aa, Homo sapiens
  MAP TO AF166112.1; EXPRESSED IN LUNG, SIGNAL =   4; EXPRESSED IN BRAIN, SIGNAL = 0.91; SWISSPROT HIT: P38898, EVALUE 4.90e+00
NRTTCRERPCLPSKSSHPHPVTPQP

SEQ ID NO: 43116 - protein, 37 aa, Homo sapiens
  MAP TO AL008631.1; EXPRESSED IN BONE MARROW, SIGNAL = 1.3; EXPRESSED IN HBL100, SIGNAL = 1.4; EXPRESSED IN HELA, SIGNAL = 1.1; EXPRESSED IN PLACENTA, SIGNAL = 0.95; EXPRESSED IN ADULT LIVER, SIGNAL = 1.5; EXPRESSED IN BT474, SIGNAL = 1.6; EXPRESSED IN FETAL LIVER, SIGNAL = 1.2; EXPRESSED IN BRAIN, SIGNAL = 1.1
HFDDDDDDDDDDDDDDDVKITMPATDIMGCYNVQGTL

SEQ ID NO: 43117 - protein, 98 aa, Homo sapiens
  MAP TO AH005332.1; EXPRESSED IN PLACENTA, SIGNAL = 1.1; EXPRESSED IN HELA, SIGNAL = 1.1; EXPRESSED IN HBL100, SIGNAL = 1.1; EXPRESSED IN BT474, SIGNAL = 1.7; EXPRESSED IN BRAIN, SIGNAL = 0.95; EST_HUMAN HIT: AL135617.1, EVALUE 2.00e-54; SWISSPROT HIT: P00520, EVALUE 3.00e-55
EKLRVLGYNHNGEWCEAQTKNGQGWVPSNYITPVNSLEKHSWYHGPVSRNAAEYLLSSGINGSFLVRESESSPGQRSISLRYEGRVYHYRINTASDGK

SEQ ID NO: 43118 - protein, 37 aa, Homo sapiens
  MAP TO AC010127.3; EXPRESSED IN BRAIN, SIGNAL = 0.97; EXPRESSED IN BONE MARROW, SIGNAL = 0.96; SWISSPROT HIT: O29353, EVALUE 8.10e+00; EST_HUMAN HIT: BF347024.1, EVALUE 9.00e-05
AISMIIHVFDVKPVTSCGVNTVVEFASKQIYAHDAEN

SEQ ID NO: 43119 - protein, 29 aa, Homo sapiens
  MAP TO AC010127.3; EXPRESSED IN BRAIN, SIGNAL = 0.97; EXPRESSED IN BONE MARROW, SIGNAL = 0.96; EST_HUMAN HIT: BF347024.1, EVALUE 9.00e-05
ECASGLSYILANFQHHGRKFVCWQILPLY

SEQ ID NO: 43120 - protein, 77 aa, Homo sapiens
  MAP TO AC011402.1; EXPRESSED IN BRAIN, SIGNAL =   1; EXPRESSED IN BT474, SIGNAL =   1; EXPRESSED IN ADULT LIVER, SIGNAL = 0.95; SWISSPROT HIT: P79235, EVALUE 3.00e-05; EST_HUMAN HIT: AA203362.1, EVALUE 4.00e-05
LPLQVSLWLDFTSFREDREGLNQVALLLRPLALSMAFINSCLNPVLYVFIGHDFWEHLLHSLLAALERALSEEPDSA

SEQ ID NO: 43121 - protein, 67 aa, Homo sapiens
  MAP TO AJ239320.2; EXPRESSED IN HELA, SIGNAL =   1; EXPRESSED IN BRAIN, SIGNAL = 8.4; SWISSPROT HIT: P18826, EVALUE 1.00e-31; EST_HUMAN HIT: AI311090.1, EVALUE 3.00e-21
MTPGEIKFSVHVESVLNRVPQPEYRQLLVEAILVLTMLADIEIHSIGSIIAVEKIVHIANDLFLQEQ

SEQ ID NO: 43122 - protein, 48 aa, Homo sapiens
  MAP TO AC008088.1; EXPRESSED IN BRAIN, SIGNAL = 2.3; EXPRESSED IN PLACENTA, SIGNAL = 0.59; EXPRESSED IN BONE MARROW, SIGNAL = 0.73; EXPRESSED IN HBL100, SIGNAL = 3.4; EXPRESSED IN FETAL LIVER, SIGNAL = 0.69; EXPRESSED IN HELA, SIGNAL = 0.67
GHGYEGNDDGGGDDGHGYEGTDDGGGDDGHGYEGTDDGGGGSDSSLTK

SEQ ID NO: 43123 - protein, 38 aa, Homo sapiens
  MAP TO AL049546.3; EXPRESSED IN BONE MARROW, SIGNAL = 0.85; EXPRESSED IN BRAIN, SIGNAL = 0.73; EXPRESSED IN PLACENTA, SIGNAL = 0.68; EXPRESSED IN LUNG, SIGNAL = 0.6; EXPRESSED IN FETAL LIVER, SIGNAL = 0.62
MDFRTSALNPKDDLSGLRIPITLEIHTMLMETFWYVSY

SEQ ID NO: 43124 - protein, 54 aa, Homo sapiens
  MAP TO AL132780.1; EXPRESSED IN HBL100, SIGNAL = 1.1; EXPRESSED IN PLACENTA, SIGNAL = 1.3; EXPRESSED IN BT474, SIGNAL = 1.3; EXPRESSED IN BRAIN, SIGNAL = 1.1; EXPRESSED IN BONE MARROW, SIGNAL = 1.3; SWISSPROT HIT: P78963, EVALUE 4.60e-02; EST_HUMAN HIT: BE798530.1, EVALUE 2.00e-26
LEVQFIITGTNHHSEKEFCSYLQYLEYLSQNRPPPNAYELFAKGYEDYLQSPLQ

SEQ ID NO: 43125 - protein, 34 aa, Homo sapiens
  MAP TO AL132780.1; EXPRESSED IN HBL100, SIGNAL = 1.1; EXPRESSED IN PLACENTA, SIGNAL = 1.3; EXPRESSED IN BT474, SIGNAL = 1.3; EXPRESSED IN BRAIN, SIGNAL = 1.1; EXPRESSED IN BONE MARROW, SIGNAL = 1.3; EST_HUMAN HIT: BE063195.1, EVALUE 4.50e-02
GGAVHHHRHQPPLREGVLLLPPIPGILKPEPSST

SEQ ID NO: 43126 - protein, 36 aa, Homo sapiens
  MAP TO AL035586.3; EXPRESSED IN HBL100, SIGNAL = 1.3; EXPRESSED IN HELA, SIGNAL = 1.5; EXPRESSED IN ADULT LIVER, SIGNAL = 0.95; EXPRESSED IN BT474, SIGNAL = 1.6; EXPRESSED IN LUNG, SIGNAL = 1.1; EXPRESSED IN BRAIN, SIGNAL = 1.8; EXPRESSED IN PLACENTA, SIGNAL = 1.5; EST_HUMAN HIT: AA453731.1, EVALUE 2.00e-13
NKAIIARVTTLSDVVVGLESFIGSERETNPLYKDYH

SEQ ID NO: 43127 - protein, 45 aa, Homo sapiens
  MAP TO AL132633.1; EXPRESSED IN FETAL LIVER, SIGNAL = 2.3; EXPRESSED IN BT474, SIGNAL = 1.2; EXPRESSED IN BONE MARROW, SIGNAL = 1.7; EXPRESSED IN BRAIN, SIGNAL = 1.4; EXPRESSED IN HBL100, SIGNAL = 1.3
LSSFSFVPPNSSGQKNQIRWEHLGFQRALMWERKGIVISQKPSSV

SEQ ID NO: 43128 - protein, 52 aa, Homo sapiens
  MAP TO AC012111.1; EXPRESSED IN BRAIN, SIGNAL = 0.95; EXPRESSED IN BONE MARROW, SIGNAL =   1
FIAANDKLWFWLEVNSVVDFFTVPPVFVSVYLNRSWLGKSASLSFSFLVPES

SEQ ID NO: 43129 - protein, 54 aa, Homo sapiens [sequence omitted]

SEQ ID NO: 43130 - protein, 47 aa, Homo sapiens; identical to SEQ ID NO: 42745
  MAP TO AL109756.9; EXPRESSED IN BRAIN, SIGNAL = 1.2; EXPRESSED IN HELA, SIGNAL = 0.95; EXPRESSED IN PLACENTA, SIGNAL = 0.92; EXPRESSED IN BT474, SIGNAL = 0.9; EXPRESSED IN ADULT LIVER, SIGNAL = 1.1; EXPRESSED IN FETAL LIVER, SIGNAL = 1.2

SEQ ID NO: 43131 - protein, 41 aa, Homo sapiens
  MAP TO AL121588.14; EXPRESSED IN BT474, SIGNAL = 1.1; EXPRESSED IN ADULT LIVER, SIGNAL = 1.1; EXPRESSED IN BRAIN, SIGNAL = 1.2; EXPRESSED IN BONE MARROW, SIGNAL = 1.3; EXPRESSED IN LUNG, SIGNAL = 1.2; EXPRESSED IN PLACENTA, SIGNAL = 1.1; EXPRESSED IN HBL100, SIGNAL = 1.4; EXPRESSED IN HELA, SIGNAL = 1.4; EXPRESSED IN FETAL LIVER, SIGNAL = 1.4
TLILHQGRLGLPDLPPWPVEEMNQKANQAQGKQAIFLQGWN

SEQ ID NO: 43132 - protein, 140 aa, Homo sapiens
  MAP TO AL121822.6; EXPRESSED IN HBL100, SIGNAL = 0.93; EXPRESSED IN BT474, SIGNAL = 0.98; EXPRESSED IN BRAIN, SIGNAL = 0.97; SWISSPROT HIT: P02686, EVALUE 3.20e-01; EST_HUMAN HIT: BE612446.1, EVALUE 1.60e-01
MSVSGKKEFDVKQILRLRWRWFSHPFQGSTNTGSCLQQEGYEHRGTPVQGRLKSHSRDRNGLKKSNSPVHHNILAPVPGPAPAHQRAVQNLQQHNLIVHFQANEDTPKSVPEKNLFKEACEKRAQDLEMMADDNIEDSTA

SEQ ID NO: 43133 - protein, 35 aa, Homo sapiens
  MAP TO AP000556.2; EXPRESSED IN FETAL LIVER, SIGNAL = 1.1; EXPRESSED IN BT474, SIGNAL = 2.1; EXPRESSED IN BRAIN, SIGNAL = 1.8; EXPRESSED IN LUNG, SIGNAL = 1.1; EXPRESSED IN BONE MARROW, SIGNAL = 1.9; EXPRESSED IN PLACENTA, SIGNAL = 2.2; EXPRESSED IN HBL100, SIGNAL = 1.2; SWISSPROT HIT: P42356, EVALUE 1.00e-13; EST_HUMAN HIT: W04181.1, EVALUE 2.00e-12
LLTLGLSLLHADVVPNATIRNVLREKIYSTAFDYF

SEQ ID NO: 43134 - protein, 23 aa, Homo sapiens
  MAP TO AC006029.2; EXPRESSED IN BRAIN, SIGNAL = 1.2; EXPRESSED IN HELA, SIGNAL = 0.69; EXPRESSED IN BONE MARROW, SIGNAL = 0.69; EXPRESSED IN FETAL LIVER, SIGNAL = 0.63; EXPRESSED IN LUNG, SIGNAL = 0.88
DSRWRKWQEERCRRRKTKGMYKW

SEQ ID NO: 43135 - protein, 50 aa, Homo sapiens
  MAP TO Z92540.1; EXPRESSED IN BT474, SIGNAL = 1.8; EXPRESSED IN HELA, SIGNAL = 1.1; EXPRESSED IN LUNG, SIGNAL = 1.2; EXPRESSED IN BRAIN, SIGNAL =   1; SWISSPROT HIT: Q9ZMR8, EVALUE 6.20e+00
AVRFEVMLDTTVQNLLESLPKFFEVTVIPFIFKVKKWIGMAMKYEHELKR

SEQ ID NO: 43136 - protein, 43 aa, Homo sapiens
  MAP TO AC010826.2; EXPRESSED IN ADULT LIVER, SIGNAL =   1; EXPRESSED IN LUNG, SIGNAL = 1.1; EXPRESSED IN BONE MARROW, SIGNAL = 1.1; EXPRESSED IN BRAIN, SIGNAL = 1.3; EST_HUMAN HIT: AI286005.1, EVALUE 4.00e-06; SWISSPROT HIT: P48058, EVALUE 9.00e-16
VGYWNDMDKLVLIQDVPTLGNDTAAIENRTVVVTTIMVSVGLC

SEQ ID NO: 43137 - protein, 100 aa, Homo sapiens
  MAP TO AL022727.1; EXPRESSED IN ADULT LIVER, SIGNAL =   1; EXPRESSED IN BT474, SIGNAL = 0.98; EXPRESSED IN LUNG, SIGNAL = 1.1; EXPRESSED IN BRAIN, SIGNAL = 1.4; EXPRESSED IN BONE MARROW, SIGNAL = 1.1; EXPRESSED IN HBL100, SIGNAL =   1; EST_HUMAN HIT: BF116115.1, EVALUE 3.00e-18; SWISSPROT HIT: P23275, EVALUE 8.00e-31
WPYLEVVLFVVILIFCLMTLIGNLFIIILTYLDSHLHTPLYFFLSNLSFLDLCYTTSSIPQLLVSLWGVEKTISYAGCMVQLYFFLTLGTTECVLLVVMS

SEQ ID NO: 43138 - protein, 85 aa, Homo sapiens
  MAP TO AL022727.1; EXPRESSED IN ADULT LIVER, SIGNAL =   1; EXPRESSED IN BT474, SIGNAL = 0.98; EXPRESSED IN LUNG, SIGNAL = 1.1; EXPRESSED IN BRAIN, SIGNAL = 1.4; EXPRESSED IN BONE MARROW, SIGNAL = 1.1; EXPRESSED IN HBL100, SIGNAL =   1; SWISSPROT HIT: P46824, EVALUE 4.40e+00; EST_HUMAN HIT: AA719797.1, EVALUE 3.00e-03
CGYFDLLLDDTDRKPVHHHPDVPGLPSPYSLVFLPFKSLISGSLLHHQLYPSVAGQSLGCGKDHFLCWLHGSTLLFSHTGNHRVC

SEQ ID NO: 43139 - protein, 57 aa, Homo sapiens
  MAP TO AC004832.2; EXPRESSED IN FETAL LIVER, SIGNAL = 0.84; EXPRESSED IN HELA, SIGNAL = 0.79; EXPRESSED IN ADULT LIVER, SIGNAL = 0.74; EXPRESSED IN LUNG, SIGNAL = 0.97; EXPRESSED IN BRAIN, SIGNAL = 0.7; EST_HUMAN HIT: AU153753.1, EVALUE 1.50e+00; SWISSPROT HIT: P20730, EVALUE 5.60e+00
FWVMGAVIQSPPCPCWCTSCLCWCTFCPYWYICCLCWGASCLGWCISCPCWCTFCPR

SEQ ID NO: 43140 - protein, 35 aa, Homo sapiens
  MAP TO AC007038.3; EXPRESSED IN HBL100, SIGNAL = 1.1; EXPRESSED IN BRAIN, SIGNAL = 0.93; EXPRESSED IN BONE MARROW, SIGNAL = 1.1; EXPRESSED IN ADULT LIVER, SIGNAL = 0.99; SWISSPROT HIT: P09814, EVALUE 6.20e+00
VPLHFHFETLLKKTEIKGNLAENKFVDEYIISPSP

SEQ ID NO: 43141 - protein, 59 aa, Homo sapiens
  MAP TO AC006115.1; EXPRESSED IN PLACENTA, SIGNAL = 7.7; EXPRESSED IN FETAL LIVER, SIGNAL = 2.9; EXPRESSED IN BRAIN, SIGNAL = 3.1; SWISSPROT HIT: Q09637, EVALUE 2.60e+00; EST_HUMAN HIT: AA065303.1, EVALUE 1.00e-10
LNDKRQKIPARENPCEGGSKNRNYEDSVIQSVFRAKPQKSVPGEGSGEFKKDGEFSVPS

SEQ ID NO: 43142 - protein, 313 aa, Homo sapiens
  MAP TO AC006115.1; EXPRESSED IN PLACENTA, SIGNAL = 7.7; EXPRESSED IN FETAL LIVER, SIGNAL = 2.9; EXPRESSED IN BRAIN, SIGNAL = 3.1; EST_HUMAN HIT: BF368121.1, EVALUE 2.00e-34; SWISSPROT HIT: Q15776, EVALUE 8.00e-28
LKTMPEAKKSTHRRGICEDESSHGVIMEKFIKDVSRSSKSGRARESSDRSQRFPRMSDDNWKDISLNKRESVIQQRVYEGNAFRGGFRFNSTLVSRKRVLERKRRYHFDTDGKGSIHDQKGCPRKKPFECGSEMRKAMSVSSLSSLSSPSFTESQPIDFGAMPYVCDECGRSFSVISEFVEHQIMHTRENLYEYGESFIHSVAVSEVQKSQVGGKRFECKDCGETFNKSAALAEHRKIHARGYLVECKNQECEEAFMPSPTFSELQKIYGKDKFYECRVCKETFLHSSALIEHQKIHFGDDKDNEREHERERE

SEQ ID NO: 43143 - protein, 56 aa, Homo sapiens
  MAP TO AC007327.1; EXPRESSED IN BT474, SIGNAL = 0.98; EXPRESSED IN FETAL LIVER, SIGNAL = 0.93; EXPRESSED IN ADULT LIVER, SIGNAL = 1.2; EXPRESSED IN BONE MARROW, SIGNAL = 1.4; EXPRESSED IN BRAIN, SIGNAL = 1.1
SPAACLLWKPSLPAGSPNLPQRPLHPPPRPPPPSKGAFPPSALAGLSHLHSQPARG

SEQ ID NO: 43144 - protein, 52 aa, Homo sapiens
  MAP TO AC006450.11; EXPRESSED IN PLACENTA, SIGNAL = 0.7; EXPRESSED IN BONE MARROW, SIGNAL = 1.2; EXPRESSED IN HBL100, SIGNAL = 5.7; EXPRESSED IN LUNG, SIGNAL = 0.85; EXPRESSED IN HELA, SIGNAL = 0.69; EXPRESSED IN BT474, SIGNAL = 0.64; EXPRESSED IN FETAL LIVER, SIGNAL = 0.82; EXPRESSED IN ADULT LIVER, SIGNAL = 0.66; EXPRESSED IN BRAIN, SIGNAL = 0.73; EST_HUMAN HIT: BE908683.1, EVALUE 2.20e+00; SWISSPROT HIT: Q08943, EVALUE 7.80e+00
AGNNMEGHGSHARGVKIQSEESTHTEGPAWQGLSKTKVDEVGIQAEEAERHR

SEQ ID NO: 43145 - protein, 44 aa, Homo sapiens
  MAP TO AC007011.1; EXPRESSED IN LUNG, SIGNAL = 0.95; EXPRESSED IN BRAIN, SIGNAL = 0.95; EST_HUMAN HIT: R50249.1, EVALUE 4.70e+00
DDLTLLGFGAPQEHLGSGWTKGDQVIPKATVLLLVHKCLWKVKA

SEQ ID NO: 43146 - protein, 70 aa, Homo sapiens
  MAP TO AC010083.1; EXPRESSED IN LUNG, SIGNAL = 0.91; EXPRESSED IN BRAIN, SIGNAL = 1.1; EXPRESSED IN BT474, SIGNAL = 0.97; EXPRESSED IN FETAL LIVER, SIGNAL = 2.1; EXPRESSED IN HELA, SIGNAL = 0.98; EST_HUMAN HIT: BE925247.1, EVALUE 1.90e+00; SWISSPROT HIT: Q12934, EVALUE 3.00e-25
LTRALQDITAAKPRQKALPKNVPRRKEIITKDKTNGALEDAPLKGLEDTKLVQVVLKEESESKFESESKE

SEQ ID NO: 43147 - protein, 71 aa, Homo sapiens
  MAP TO AL023283.6; EXPRESSED IN BONE MARROW, SIGNAL = 1.1; EXPRESSED IN PLACENTA, SIGNAL = 1.4; EXPRESSED IN LUNG, SIGNAL = 1.2; EXPRESSED IN HELA, SIGNAL = 1.3; EXPRESSED IN HBL100, SIGNAL = 1.2; EXPRESSED IN FETAL LIVER, SIGNAL = 1.4; EXPRESSED IN BT474, SIGNAL = 1.2; EXPRESSED IN BRAIN, SIGNAL =   1; EST_HUMAN HIT: AW812916.1, EVALUE 2.30e-01
QTNEHDSLAKLTHKINHHNMQTISGFSTHHYLYCCYSCLNNQFLSPGQMQQYSTCSVISQHTLAYAMVTSK

SEQ ID NO: 43148 - protein, 88 aa, Homo sapiens; identical to SEQ ID NO: 35516
  MAP TO AL080274.13; EXPRESSED IN HELA, SIGNAL =   2; EXPRESSED IN BRAIN, SIGNAL = 1.2; SWISSPROT HIT: Q05854, EVALUE 4.60e+00; EST_HUMAN HIT: AA903912.1, EVALUE 3.00e-08

SEQ ID NO: 43149 - protein, 45 aa, Homo sapiens; identical to SEQ ID NO: 38234
  MAP TO AL035685.13; EXPRESSED IN FETAL LIVER, SIGNAL = 0.96; EXPRESSED IN ADULT LIVER, SIGNAL = 2.5; EXPRESSED IN BRAIN, SIGNAL = 1.1; SWISSPROT HIT: O10339, EVALUE 2.70e+00

SEQ ID NO: 43150 - protein, 31 aa, Homo sapiens
  MAP TO AP000217.1; EXPRESSED IN HELA, SIGNAL = 0.63; EXPRESSED IN BRAIN, SIGNAL = 0.84; EXPRESSED IN FETAL LIVER, SIGNAL = 0.6; EXPRESSED IN LUNG, SIGNAL = 0.88
MTRSLQTISLLRAEELACPSGNTVSVYCSPC

SEQ ID NO: 43151 - protein, 48 aa, Homo sapiens
  MAP TO AP000217.1; EXPRESSED IN HELA, SIGNAL = 0.63; EXPRESSED IN BRAIN, SIGNAL = 0.84; EXPRESSED IN FETAL LIVER, SIGNAL = 0.6; EXPRESSED IN LUNG, SIGNAL = 0.88; EST_HUMAN HIT: AV737411.1, EVALUE 3.90e+00
ALSNDIVCRDLVILSVHATLHWSTNIDNIMLIESEKEEVAKVGDDLHK

SEQ ID NO: 43152 - protein, 40 aa, Homo sapiens
  MAP TO AF064862.1; EXPRESSED IN HBL100, SIGNAL = 0.94; EXPRESSED IN FETAL LIVER, SIGNAL = 1.1; EXPRESSED IN BRAIN, SIGNAL = 0.98; EXPRESSED IN BONE MARROW, SIGNAL = 0.91
GPQRETAMPASGPSTDPTPPSQHTPSPQTGGCQHPGLQDQ

SEQ ID NO: 43153 - protein, 24 aa, Homo sapiens
  MAP TO AL050349.9; EXPRESSED IN HELA, SIGNAL = 1.4; EXPRESSED IN PLACENTA, SIGNAL = 1.4; EXPRESSED IN HBL100, SIGNAL = 1.1; EXPRESSED IN ADULT LIVER, SIGNAL = 1.6; EXPRESSED IN BT474, SIGNAL = 1.1; EXPRESSED IN BRAIN, SIGNAL = 1.3; EXPRESSED IN BONE MARROW, SIGNAL = 0.98; EXPRESSED IN LUNG, SIGNAL = 1.1; EST_HUMAN HIT: AW248003.1, EVALUE 2.00e-05
MTSATGGTVATFDSPATLKTRRAK

SEQ ID NO: 43154 - protein, 58 aa, Homo sapiens
  MAP TO AL050349.9; EXPRESSED IN HELA, SIGNAL = 1.4; EXPRESSED IN PLACENTA, SIGNAL = 1.4; EXPRESSED IN HBL100, SIGNAL = 1.1; EXPRESSED IN ADULT LIVER, SIGNAL = 1.6; EXPRESSED IN BT474, SIGNAL = 1.1; EXPRESSED IN BRAIN, SIGNAL = 1.3; EXPRESSED IN BONE MARROW, SIGNAL = 0.98; EXPRESSED IN LUNG, SIGNAL = 1.1; EST_HUMAN HIT: AW248003.1, EVALUE 5.00e-04; SWISSPROT HIT: P36444, EVALUE 1.50e+00
WQGFFPDCVVLLGAKPVCGASSISHPHSVQPWQTGIQTQRTKPRRPHDQRHRGHGGHL

SEQ ID NO: 43155 - protein, 18 aa, Homo sapiens
  MAP TO AC009237.1; EXPRESSED IN PLACENTA, SIGNAL = 0.73; EXPRESSED IN BT474, SIGNAL = 0.62; EXPRESSED IN LUNG, SIGNAL = 0.95; EXPRESSED IN ADULT LIVER, SIGNAL = 0.74; EXPRESSED IN FETAL LIVER, SIGNAL = 0.58; EXPRESSED IN HELA, SIGNAL = 0.66; EXPRESSED IN BRAIN, SIGNAL = 0.75
CFSSLTIQPSRGPAVIRS

SEQ ID NO: 43156 - protein, 28 aa, Homo sapiens
  MAP TO AL049565.3; EXPRESSED IN HELA, SIGNAL = 0.8; EXPRESSED IN BT474, SIGNAL = 0.74; EXPRESSED IN BONE MARROW, SIGNAL = 0.75; EXPRESSED IN ADULT LIVER, SIGNAL = 0.93; EXPRESSED IN BRAIN, SIGNAL = 2.6; EXPRESSED IN PLACENTA, SIGNAL = 0.84; EXPRESSED IN FETAL LIVER, SIGNAL = 0.81; EXPRESSED IN LUNG, SIGNAL = 0.91; EXPRESSED IN HBL100, SIGNAL = 0.94; EST_HUMAN HIT: AW821909.1, EVALUE 2.70e-02
SCHVSHHAEEAGLLQWWNGFLKIELQYQ

SEQ ID NO: 43157 - protein, 336 aa, Homo sapiens
  MAP TO AL034420.16; EXPRESSED IN PLACENTA, SIGNAL = 0.72; EXPRESSED IN HBL100, SIGNAL =   1; EXPRESSED IN FETAL LIVER, SIGNAL = 1.1; EXPRESSED IN LUNG, SIGNAL = 0.75; EXPRESSED IN HELA, SIGNAL = 0.76; EXPRESSED IN BT474, SIGNAL = 0.78; EXPRESSED IN BONE MARROW, SIGNAL = 0.75; EXPRESSED IN ADULT LIVER, SIGNAL = 0.86; EXPRESSED IN BRAIN, SIGNAL = 0.81; EST_HUMAN HIT: AW270757.1, EVALUE 7.00e-68; SWISSPROT HIT: P39806, EVALUE 8.00e-39
LPQNLSSGTNPKDLTGGSLPGDLQPGPSPESEGGPTLPGVGPNYNSPRAGGFQGSGTPEPGSETLKLQQLVENIDKATTDPNECLICHRVLSCQSSLKMHYRTHTGERPFQCKICGRAFSTKGNLKTHLGVHRTNTSIKTQHSCPICQKKFTNAVMLQQHIRMHMGGQIPNTPLPENPCDFTGSEPMTVGENGSTGAICHDDVIESIDVEEVSSQEAPSSSSKVPTPLPSIHSASPTLGFAMMASLDAPGKVGPAPFNLQRQGSRENGSVESDGLTNDSSSLMGDQEYQSRSPDILETTSFQALSPANSQAESIKSKSPDAGSKAESSENSRTEME

SEQ ID NO: 43158 - protein, 79 aa, Homo sapiens
  MAP TO AL034420.16; EXPRESSED IN PLACENTA, SIGNAL = 0.72; EXPRESSED IN HBL100, SIGNAL =   1; EXPRESSED IN FETAL LIVER, SIGNAL = 1.1; EXPRESSED IN LUNG, SIGNAL = 0.75; EXPRESSED IN HELA, SIGNAL = 0.76; EXPRESSED IN BT474, SIGNAL = 0.78; EXPRESSED IN BONE MARROW, SIGNAL = 0.75; EXPRESSED IN ADULT LIVER, SIGNAL = 0.86; EXPRESSED IN BRAIN, SIGNAL = 0.81; EST_HUMAN HIT: AA601246.1, EVALUE 1.00e-34; SWISSPROT HIT: Q63801, EVALUE 3.60e+00
SLSPGLAPFTLKPDGTRVLPNVMSRLPSALLPQAPGSVLFQSPFSTVALDTSKKGKGKPPNISAVDVKPKDEAALYKHK

SEQ ID NO: 43159 - protein, 80 aa, Homo sapiens
  MAP TO AL034420.16; EXPRESSED IN PLACENTA, SIGNAL = 0.72; EXPRESSED IN HBL100, SIGNAL =   1; EXPRESSED IN FETAL LIVER, SIGNAL = 1.1; EXPRESSED IN LUNG, SIGNAL = 0.75; EXPRESSED IN HELA, SIGNAL = 0.76; EXPRESSED IN BT474, SIGNAL = 0.78; EXPRESSED IN BONE MARROW, SIGNAL = 0.75; EXPRESSED IN ADULT LIVER, SIGNAL = 0.86; EXPRESSED IN BRAIN, SIGNAL = 0.81; EST_HUMAN HIT: AA601246.1, EVALUE 1.00e-33; SWISSPROT HIT: P42768, EVALUE 2.10e+00
LPVPRAGTLHSEAGWDPGAPERHVPPPERFASSGPGLGALPEPFLHCGARHIQEREGEATEHLRGGCQTQRRGGPLQAQV

SEQ ID NO: 43160 - protein, 21 aa, Homo sapiens
  MAP TO AL022397.1; EXPRESSED IN BRAIN, SIGNAL = 1.5; EXPRESSED IN HELA, SIGNAL = 0.93
GGRISRNERKSEECQRNKQIV

SEQ ID NO: 43161 - protein, 39 aa, Homo sapiens
  MAP TO AL122057.1; EXPRESSED IN FETAL LIVER, SIGNAL = 0.96; EXPRESSED IN LUNG, SIGNAL = 1.8; EXPRESSED IN BRAIN, SIGNAL = 1.1; EXPRESSED IN HBL100, SIGNAL = 1.6; EXPRESSED IN HELA, SIGNAL = 1.7; EST_HUMAN HIT: BE741314.1, EVALUE 7.00e-09
CECSRPHPHPWRNLRPQPREDLARPPSRLRSRSRLCRSD

SEQ ID NO: 43162 - protein, 85 aa, Homo sapiens [sequence omitted]

SEQ ID NO: 43163 - protein, 70 aa, Homo sapiens
  MAP TO AC007749.2; EXPRESSED IN BONE MARROW, SIGNAL =   1; EXPRESSED IN BRAIN, SIGNAL = 0.95; SWISSPROT HIT: Q08678, EVALUE 2.30e+00; EST_HUMAN HIT: BE889144.1, EVALUE 2.40e+00
MVRRRRSSGTTVEGQMVKAWKSHLRLFCRQSSRDRTYSFSKHPARATSIRITCRAPLTCRFLGRTASISV

SEQ ID NO: 43164 - protein, 18 aa, Homo sapiens
  MAP TO AC007749.2; EXPRESSED IN BONE MARROW, SIGNAL =   1; EXPRESSED IN BRAIN, SIGNAL = 0.95
QRLMQYVPGICMLKELCR

SEQ ID NO: 43165 - protein, 33 aa, Homo sapiens
  MAP TO AC008176.1; EXPRESSED IN BRAIN, SIGNAL = 0.74; EXPRESSED IN FETAL LIVER, SIGNAL = 0.58; EXPRESSED IN ADULT LIVER, SIGNAL = 0.94; EXPRESSED IN LUNG, SIGNAL = 0.61; EST_HUMAN HIT: BE513228.1, EVALUE 1.50e+00
VGSPYLWVSECIYWTSCLWCGFPLLVPVASLVS

SEQ ID NO: 43166 - protein, 68 aa, Homo sapiens
  MAP TO AC006391.7; EXPRESSED IN BRAIN, SIGNAL = 0.91; EST_HUMAN HIT: BF530521.1, EVALUE 4.00e+00
WAMTQSSCVLMWEGMSIQGFGCCFNCSSWADITSHSGCLLLRLVRPISTCFKSWGDSGSVSPRTRRAE

SEQ ID NO: 43167 - protein, 45 aa, Homo sapiens
  MAP TO AF161800.1; EXPRESSED IN ADULT LIVER, SIGNAL = 0.79; EXPRESSED IN BRAIN, SIGNAL = 0.74; SWISSPROT HIT: P50442, EVALUE 2.70e+00
VSSEFGKVDGTADVTIPCDSCYDLTDFIVLGLDVFRVTRYLVVPR

SEQ ID NO: 43168 - protein, 182 aa, Homo sapiens
  MAP TO AC004886.1; EXPRESSED IN BRAIN, SIGNAL = 1.5; EST_HUMAN HIT: BE967305.2, EVALUE 5.90e+00; SWISSPROT HIT: P27110, EVALUE 3.50e-01
APINLSLGTPAHAVTLAITKPVTVPPVGVTNGWTDSTVSQGITDGEVVDLSTTKSHRTVVTMDESTSSVMTKIIEDEKPVDLTAGRRAVCCDVVYKLPFGRSCTAQQPATTLPEDRFGYRDDHYQYDRSGPYGYRGIGGMKPSMSDTNLAEAGHFFYKSKNAFDYSEGTDTAVDLTSGRVTT

SEQ ID NO: 43169 - protein, 33 aa, Homo sapiens
  MAP TO AC004886.1; EXPRESSED IN BRAIN, SIGNAL = 1.5; EST_HUMAN HIT: T34093.1, EVALUE 6.90e-02; SWISSPROT HIT: Q28198, EVALUE 1.60e+00
TNKLISRYSSTCSDIGYYKTCHCASCWCHKWMD

SEQ ID NO: 43170 - protein, 37 aa, Homo sapiens
  MAP TO AC007560.3; EXPRESSED IN HELA, SIGNAL = 0.61; EXPRESSED IN ADULT LIVER, SIGNAL = 1.1; EXPRESSED IN BRAIN, SIGNAL = 0.71; EXPRESSED IN BONE MARROW, SIGNAL = 0.84; EXPRESSED IN LUNG, SIGNAL = 0.61
IFSCINFRGEIRREKITRNGQNIAANNNTVSCEAGLQ

SEQ ID NO: 43171 - protein, 40 aa, Homo sapiens
  MAP TO AC007217.2; EXPRESSED IN HELA, SIGNAL = 0.64; EXPRESSED IN ADULT LIVER, SIGNAL = 0.8; EXPRESSED IN BRAIN, SIGNAL = 0.84; EXPRESSED IN PLACENTA, SIGNAL = 0.87; EXPRESSED IN BONE MARROW, SIGNAL = 0.65; EXPRESSED IN HBL100, SIGNAL = 0.69; EXPRESSED IN LUNG, SIGNAL = 0.71; EXPRESSED IN FETAL LIVER, SIGNAL = 0.62
LISLLAGMEQVEWRRTPVMTSAPITLIIAFQDSAQTLTVL

SEQ ID NO: 43172 - protein, 28 aa, Homo sapiens
  MAP TO AL034378.2; EXPRESSED IN FETAL LIVER, SIGNAL = 1.6; EXPRESSED IN BT474, SIGNAL = 0.96; EXPRESSED IN HELA, SIGNAL = 4.9; EXPRESSED IN BRAIN, SIGNAL = 1.1; EXPRESSED IN BONE MARROW, SIGNAL = 0.93
SARGEEVVQKQTIKMWTLFLELDGQEPA

SEQ ID NO: 43173 - protein, 182 aa, Homo sapiens
  MAP TO AC006213.1; EXPRESSED IN LUNG, SIGNAL = 1.1; EXPRESSED IN BRAIN, SIGNAL = 0.97; EST_HUMAN HIT: AA084272.1, EVALUE 7.00e-47; SWISSPROT HIT: Q9Y2G7, EVALUE 8.00e-35
FNFTTESNKLSSEKRNYEVNAYHQETWKRNKTFNLMRFIFRTDPQYTIEFGRQQRPKVGCFSQMIFKKHKSLPLHKRNNTREKSYECKEYKKGFRKYLHLTEHLRDHTGVIPYECNECGKAFVVFQHFIRHRKIHTDLKPYECNGCEKAFRFYSQLIQHQIIHTGMKPYECKQCGKAFRRHS

SEQ ID NO: 43174 - protein, 17 aa, Homo sapiens
  MAP TO AC006213.1; EXPRESSED IN LUNG, SIGNAL = 1.1; EXPRESSED IN BRAIN, SIGNAL = 0.97
ISQLKATSYLQKKEIMK

SEQ ID NO: 43175 - protein, 179 aa, Homo sapiens
  MAP TO AC005004.1; EXPRESSED IN BONE MARROW, SIGNAL = 1.2; EXPRESSED IN HELA, SIGNAL = 1.6; EXPRESSED IN PLACENTA, SIGNAL = 1.4; EXPRESSED IN FETAL LIVER, SIGNAL = 0.92; EXPRESSED IN BT474, SIGNAL = 0.92; EXPRESSED IN BRAIN, SIGNAL =   1; EST_HUMAN HIT: BE169080.1, EVALUE 2.00e+00; SWISSPROT HIT: P20535, EVALUE 7.50e-01
CNSLVSIQRNLEGNTQLNEASCNDFLFERKSIVSLMPEDQISPVSEVLKPKQGTALLLPSPEFDYRPESEKVIQTSHDDIPLLDEQSIACEMNELSCTNELVVNKVESECVLNQQVSLNSQEHANLPTDSLLHLNKEMPLATGRDAHQSHHPPLEGRADVIADIQTIPIQTKIKDISPP

SEQ ID NO: 43176 - protein, 44 aa, Homo sapiens
  MAP TO AC008157.1; EXPRESSED IN BONE MARROW, SIGNAL = 0.74; EXPRESSED IN HELA, SIGNAL = 0.67; EXPRESSED IN ADULT LIVER, SIGNAL = 0.65; EXPRESSED IN BRAIN, SIGNAL = 0.69; EST_HUMAN HIT: F32684.1, EVALUE 1.80e-01
RKESEGNRRRKGHRELPEMRKMNWNRFSGDCSSPSPDISQLWDF

SEQ ID NO: 43177 - protein, 69 aa, Homo sapiens
  MAP TO AC007182.3; EXPRESSED IN BRAIN, SIGNAL = 2.2; EXPRESSED IN BT474, SIGNAL = 0.6; EXPRESSED IN PLACENTA, SIGNAL =  37; EST_HUMAN HIT: AA938490.1, EVALUE 4.00e-34; SWISSPROT HIT: Q60765, EVALUE 8.00e-04
ESEDLEKQNAALRKEIKQLTEELKYFTSVLNSHEPLCSVLAASTPSPPEVVYSAHAFHQPHVSSPRFQP

SEQ ID NO: 43178 - protein, 60 aa, Homo sapiens
  MAP TO AC007182.3; EXPRESSED IN BRAIN, SIGNAL = 2.2; EXPRESSED IN BT474, SIGNAL = 0.6; EXPRESSED IN PLACENTA, SIGNAL =  37; EST_HUMAN HIT: AI668791.1, EVALUE 2.00e-29
ERGSTQGDQAAHRGTEVLHVGAEQPRAPVLGAGRQHALAPRGGVQRPRIPPTSCQLPALP

SEQ ID NO: 43179 - protein, 57 aa, Homo sapiens
  MAP TO AC007163.2; EXPRESSED IN BT474, SIGNAL = 1.5; EXPRESSED IN FETAL LIVER, SIGNAL = 1.1; EXPRESSED IN LUNG, SIGNAL = 1.1; EXPRESSED IN BRAIN, SIGNAL =   1; EXPRESSED IN HBL100, SIGNAL = 1.4; EXPRESSED IN HELA, SIGNAL = 2.4; EST_HUMAN HIT: AU131938.1, EVALUE 1.00e-26; SWISSPROT HIT: P45491, EVALUE 1.20e+00
ELFPANKQSVEHFTKYFTEAGLKELSEYVRNQQTIGARKELQKELQEQMSRGDPFKD

SEQ ID NO: 43180 - protein, 21 aa, Homo sapiens
  MAP TO AC007163.2; EXPRESSED IN BT474, SIGNAL = 1.5; EXPRESSED IN FETAL LIVER, SIGNAL = 1.1; EXPRESSED IN LUNG, SIGNAL = 1.1; EXPRESSED IN BRAIN, SIGNAL =   1; EXPRESSED IN HBL100, SIGNAL = 1.4; EXPRESSED IN HELA, SIGNAL = 2.4; EST_HUMAN HIT: AU130817.1, EVALUE 9.00e-04
NSFLPISKVLNTSQNILLRQA

SEQ ID NO: 43181 - protein, 40 aa, Homo sapiens
  MAP TO AC008174.1; EXPRESSED IN BRAIN, SIGNAL = 2.5
LSHSNFNGMPHNVDEPTPQTSVQFMDKMMDPLLSEADITI

SEQ ID NO: 43182 - protein, 27 aa, Homo sapiens
  MAP TO AC008174.1; EXPRESSED IN BRAIN, SIGNAL = 2.5
SPTLILMACLTMLMSQLPKHLFNLWIK

SEQ ID NO: 43183 - protein, 117 aa, Homo sapiens
  MAP TO AP000072.1; EXPRESSED IN BRAIN, SIGNAL = 1.4; EXPRESSED IN BONE MARROW, SIGNAL = 1.1; EXPRESSED IN BT474, SIGNAL = 1.1; EST_HUMAN HIT: AW778918.1, EVALUE 2.50e-01; SWISSPROT HIT: Q01338, EVALUE 1.90e-01
  unsure 101
CKEEKCNKMIMRRPRTRTRAPLQVDTSRKLPDACPALGGGARQPVFLSQSNMCGDSPAKAERLCVQRHVPGMETESGGVSSLLPSPARVGGPFGVIALSSXPTALQACGPMAVLDHE

SEQ ID NO: 43184 - protein, 105 aa, Homo sapiens
  MAP TO AC011193.1; EXPRESSED IN LUNG, SIGNAL = 0.89; EXPRESSED IN BRAIN, SIGNAL = 0.94; SWISSPROT HIT: P42217, EVALUE 7.80e+00; EST_HUMAN HIT: BE546340.1, EVALUE 1.40e+00
  unsure 42
  unsure 46
  unsure 103
PLPGPAALASTLLSNLATRKLLHDWAMRIGHELFRPHLAGAXGRYXGLEESLGHAVCAIWRARGGSMWNTELSLSSSPFKLTPTSCWIQSDLPIVSPGEQRMXSG

SEQ ID NO: 43185 - protein, 41 aa, Homo sapiens
  MAP TO AC007832.1; EXPRESSED IN BRAIN, SIGNAL = 0.69; EXPRESSED IN ADULT LIVER, SIGNAL = 0.79; EXPRESSED IN BT474, SIGNAL = 4.4
YTRQIGRGWGRERMTPNVGMLLKTRRLQTYLKNHLCRCFIM

SEQ ID NO: 43186 - protein, 33 aa, Homo sapiens
  MAP TO AC009705.2; EXPRESSED IN BONE MARROW, SIGNAL = 1.2; EXPRESSED IN BRAIN, SIGNAL =   1; EXPRESSED IN FETAL LIVER, SIGNAL = 0.99; EXPRESSED IN ADULT LIVER, SIGNAL = 0.95; EXPRESSED IN HELA, SIGNAL = 0.91
PCMIPTGSYPWTITILNVFTMPGGISPNPARKC

SEQ ID NO: 43187 - protein, 33 aa, Homo sapiens
  MAP TO AC004624.6; EXPRESSED IN LUNG, SIGNAL = 0.62; EXPRESSED IN HELA, SIGNAL = 0.77; EXPRESSED IN BRAIN, SIGNAL = 0.96; EXPRESSED IN BT474, SIGNAL = 1.1; EXPRESSED IN BONE MARROW, SIGNAL = 0.7; EXPRESSED IN FETAL LIVER, SIGNAL =   2; SWISSPROT HIT: P49025, EVALUE 3.70e+00; EST_HUMAN HIT: AW157571.1, EVALUE 2.00e-11
IYRLEMEENQLKNEMQDAKDQNELLEFRVLELE

SEQ ID NO: 43188 - protein, 74 aa, Homo sapiens
  MAP TO L05367.1; EXPRESSED IN BRAIN, SIGNAL = 1.6; EST_HUMAN HIT: AW119014.1, EVALUE 2.00e-39; SWISSPROT HIT: P22794, EVALUE 1.00e-35
LPSMPTDMEHTGHYLHLAFLMTTVFSLSPGTKANYTRLWANSTSSWDSVIQNKTGRNQNENINTNPITPEVDYK

SEQ ID NO: 43189 - protein, 19 aa, Homo sapiens
  MAP TO L05367.1; EXPRESSED IN BRAIN, SIGNAL = 1.6; EST_HUMAN HIT: AA360430.1, EVALUE 1.00e-04
CQVCPRTWNTQDITYILPF

SEQ ID NO: 43190 - protein, 41 aa, Homo sapiens
  MAP TO AC009301.1; EXPRESSED IN FETAL LIVER, SIGNAL = 0.57; EXPRESSED IN HELA, SIGNAL = 0.97; EXPRESSED IN ADULT LIVER, SIGNAL = 0.98; EXPRESSED IN BRAIN, SIGNAL = 0.74; EXPRESSED IN BT474, SIGNAL = 2.3; EXPRESSED IN HBL100, SIGNAL = 0.81; EST_HUMAN HIT: BE742098.1, EVALUE 2.00e-19; SWISSPROT HIT: P34678, EVALUE 2.00e-13
ISFRVWMCGGSLEIVPCSRVGHVFRKKHPYVFPDGNANTYI

SEQ ID NO: 43191 - protein, 20 aa, Homo sapiens
  MAP TO AC009301.1; EXPRESSED IN FETAL LIVER, SIGNAL = 0.57; EXPRESSED IN HELA, SIGNAL = 0.97; EXPRESSED IN ADULT LIVER, SIGNAL = 0.98; EXPRESSED IN BRAIN, SIGNAL = 0.74; EXPRESSED IN BT474, SIGNAL = 2.3; EXPRESSED IN HBL100, SIGNAL = 0.81; EST_HUMAN HIT: BE259924.1, EVALUE 3.70e+00
RRGVTVLQKSPSECGCAGAA

SEQ ID NO: 43192 - protein, 96 aa, Homo sapiens
  MAP TO AF064862.1; EXPRESSED IN BRAIN, SIGNAL = 1.1; EST_HUMAN HIT: BF348620.1, EVALUE 4.00e-45; SWISSPROT HIT: Q02173, EVALUE 1.60e-02
PQFSKEQELFASINTTRVRLNLIGWNDGGCPITSFTLEYRPFGTTVWTTAQRTSLSKSYILYDLQEATWYELQMRVCNSAGCAEKQANFATLNYDG

SEQ ID NO: 43193 - protein, 135 aa, Homo sapiens
  MAP TO AL109806.7; EXPRESSED IN LUNG, SIGNAL =   1; EXPRESSED IN BRAIN, SIGNAL =  14; EXPRESSED IN HELA, SIGNAL = 2.5; EST_HUMAN HIT: AI925674.1, EVALUE 2.00e-13; SWISSPROT HIT: Q14511, EVALUE 2.00e-14
NPGPLIPQPSSQQTPERKPRLSEHCRLYFGALFKAISAFHGSLSSSQPAEIITQSKLVIMVGQKLVDTLCMETQERDVRNEILRGSSHLCSLLKDVALATKNAVLTYPSPAALGHLQAEAEKLEQHTRQFRGTLG

SEQ ID NO: 43194 - protein, 255 aa, Homo sapiens
  MAP TO AC004925.1; EXPRESSED IN BRAIN, SIGNAL = 2.7; EXPRESSED IN BONE MARROW, SIGNAL = 1.1; EXPRESSED IN HELA, SIGNAL = 1.8; EST_HUMAN HIT: AA297278.1, EVALUE 5.00e-66; SWISSPROT HIT: P21451, EVALUE 3.00e-10
RFRAATNVQMYYEMIENCSSTTAKLAVIWVGALLLALPEVVLRQLSKEDLGFSGRAPAERCIIKISPDLPDTIYVLALTYDSARLWWYFGCYFCLPTLFTITCSLVTARKIRKAEKACTRGNKRQIQLESQMNCTVVALTILYGFCIIPENICNIVTAYMATGVSQQTMDLLNIISQFLLFFKSCVTPVLLFCLCKPFSRAFMECCCCCCEECIQKSSTVTSDDNDNEYTTELELSPFSTIRREMSTFASVGTHC

SEQ ID NO: 43195 - protein, 25 aa, Homo sapiens
  MAP TO AC004925.1; EXPRESSED IN BRAIN, SIGNAL = 2.7; EXPRESSED IN BONE MARROW, SIGNAL = 1.1; EXPRESSED IN HELA, SIGNAL = 1.8; EST_HUMAN HIT: H22771.1, EVALUE 4.00e-06
GLVAELRQKGALLRSLLIYQTPSMF

SEQ ID NO: 43196 - protein, 37 aa, Homo sapiens
  MAP TO AC009666.2; EXPRESSED IN FETAL LIVER, SIGNAL = 2.1; EXPRESSED IN BONE MARROW, SIGNAL = 0.98; EXPRESSED IN BRAIN, SIGNAL = 0.93; SWISSPROT HIT: P03136, EVALUE 8.10e+00; EST_HUMAN HIT: AI866782.1, EVALUE 1.90e-01
GDAQQGRGEGDTWHRRMGRQHHSHWPKGGSKPSNHRW

SEQ ID NO: 43197 - protein, 211 aa, Homo sapiens
  MAP TO AC007326.22; EXPRESSED IN FETAL LIVER, SIGNAL = 0.84; EXPRESSED IN ADULT LIVER, SIGNAL = 0.7; EXPRESSED IN BRAIN, SIGNAL = 1.1; EXPRESSED IN PLACENTA, SIGNAL = 0.8; EXPRESSED IN LUNG, SIGNAL = 0.76; EXPRESSED IN HELA, SIGNAL = 1.2; EXPRESSED IN BT474, SIGNAL = 1.1; EXPRESSED IN HBL100, SIGNAL = 0.72; EST_HUMAN HIT: AI635368.1, EVALUE 5.00e-97; SWISSPROT HIT: P10263, EVALUE 8.00e-70
WNDWAIIKAALEPFQTEEDSVSVSDAPGSCLIDCNEKTRKKSQKETESLHCEYVAEPVMAQSTQNVDYNQLQEVIYPETLKLEGKGPELVGPSESKPRGTSPLPAGQVPVTLQPQKQVKENKTQPPVAYQYWPPAELQYRPPPESQYGYPGMPPAPQGRAPYPQPPTRRLNPTAPPSRQGSELHEIIDKSRKEGDTEAWQFPVTLEPMPPG

SEQ ID NO: 43198 - protein, 50 aa, Homo sapiens
  MAP TO AF165124.1; EXPRESSED IN BT474, SIGNAL =   1; EXPRESSED IN BRAIN, SIGNAL = 0.99; SWISSPROT HIT: P18508, EVALUE 1.00e-24; EST_HUMAN HIT: R60404.1, EVALUE 1.70e+00
FTSQKSDDDYEDYASNKTWVLTPKVPEGDVTVILNNLLEGYDNKLRPDIG

SEQ ID NO: 43199 - protein, 37 aa, Homo sapiens
  MAP TO AL035451.5; EXPRESSED IN BRAIN, SIGNAL = 0.96
VKRYTFIQTQLFSKNLFSIEMSEMRQRIQKLDVKDAQ

SEQ ID NO: 43200 - protein, 68 aa, Homo sapiens
  MAP TO AC005037.2; EXPRESSED IN ADULT LIVER, SIGNAL = 0.69; EXPRESSED IN BRAIN, SIGNAL = 1.1; EXPRESSED IN BT474, SIGNAL = 1.4; EXPRESSED IN HBL100, SIGNAL = 1.7; EXPRESSED IN FETAL LIVER, SIGNAL = 0.89; EXPRESSED IN HELA, SIGNAL =   1; EST_HUMAN HIT: BE275324.1, EVALUE 4.00e-35; SWISSPROT HIT: P54472, EVALUE 1.00e-10
MEEVLQKKADLILSYHPPIFRPMKRITWNTWKERLVIRALENRVGIYSPHTAYDAAPQGVNNWLAKGL

SEQ ID NO: 43201 - protein, 67 aa, Homo sapiens
  MAP TO AP000199.1; EXPRESSED IN BRAIN, SIGNAL = 1.4; SWISSPROT HIT: P00428, EVALUE 6.60e+00; EST_HUMAN HIT: AI659715.1, EVALUE 8.00e-30
SSTPRRREAAYDEREVVAWEWLPRGRQQRSQCPGSGKYWRHLHCSGCRTGPFCICSYWRIHIQITEE

SEQ ID NO: 43202 - protein, 26 aa, Homo sapiens
  MAP TO AC011310.2; EXPRESSED IN BRAIN, SIGNAL = 0.92; SWISSPROT HIT: P75323, EVALUE 8.40e+00
VLGALGNSVAKDATEKSYLLQGFKNH

SEQ ID NO: 43203 - protein, 63 aa, Homo sapiens
  MAP TO AL117374.5; EXPRESSED IN ADULT LIVER, SIGNAL = 1.1; EXPRESSED IN BRAIN, SIGNAL = 0.95; EST_HUMAN HIT: AI089238.1, EVALUE 9.90e-01
VTLLTWVTNVSQFSKNFPSFCTGSPESWQTTTAGHPSTSPGSGGGFTELLEKDLKNPLSTLDT

SEQ ID NO: 43204 - protein, 45 aa, Homo sapiens
  MAP TO AL121575.6; EXPRESSED IN BRAIN, SIGNAL = 1.1; EST_HUMAN HIT: BF676078.1, EVALUE 7.00e-08; SWISSPROT HIT: Q03692, EVALUE 9.20e-01
SRGLRPSAPIFPELESDPGLAGHPGKAGVIVQMETQLQSIFEEVV

SEQ ID NO: 43205 - protein, 39 aa, Homo sapiens
  MAP TO AL035690.10; EXPRESSED IN BONE MARROW, SIGNAL = 0.94; EXPRESSED IN BRAIN, SIGNAL = 0.9; SWISSPROT HIT: P43220, EVALUE 1.00e-16; EST_HUMAN HIT: AW630780.1, EVALUE 2.00e-07
DSLSCRLVFLLMQYCVAANYYWLLVEGVYLYTLLAFSVL

SEQ ID NO: 43206 - protein, 57 aa, Homo sapiens [sequence omitted]

SEQ ID NO: 43207 - protein, 978 aa, Homo sapiens
  MAP TO AC008174.1; EXPRESSED IN BRAIN, SIGNAL = 2.6; SWISSPROT HIT: Q62209, EVALUE 5.00e-03
VLSEVIESHRPQKQSPLDIHLDSFVREIVARLLSKIFSPKHNTEIELKNMTQRIVNSINRHFNKAKIHILYDDKEQAFFSFNTDIVDELATSVYRNALKQHGLDLAVDKESEDSGIFVENITNLIVAAISDYLLHPLFSGDFSASTYSNSVAENIVQDILSNISKSTEPSQSVPLYNTLLPYTFLEDMIRVLLSKLFSSASSLVLNRDTQKDISRVNFNDIASNLVSDIRMKVSQHEIRFSKEEEETKFIYSEDDIQHLVDSVFANVVQTSGSQESAVQNITSSNDILIDRIAGFIIKHICQKHLQPFVSGKSLSSSDTYFDDERRQLFYTSVYSSTFLEDVISGVLRKIFHRVVGIVQTKSIRDSEDELFEKAEELIHLITGEFSKAQVSIIDNTEERLCLPPVERDVVKTIVDMVYSKVLQEYEMEVVPNKDFLNDTKTLAARITNIILAEIFDFQIHPDLIANLPFKSHSKLSANVLIQRVQYDISKSRFQRQASTMYTTMLSHSHLEKIVTQLTSQISPLNTSAEQSDTTKSDLSNTVIKLINEIMSIISKHEICIIKYGNKKQSMISAKDIQSMVDSIYADLSHSNIYQSITKDKKSISDIPVSKIASFIIKEIFNHHIQSFLSEDKTLLLAAVDQTYKLKAIDPKQRELSFIVNSSVFLEEVISELLCKILYAFSHNMLVTENPDRVKLKLTRIVTTLVNSIVLEFTTSEILVADNFDKNLCFSERYKEMVQKIVNSVYGKVLDQYKSLIQIHRVIQSDTICFGRKIYYLLLEEIYDYQVQSLVSGELESSSYSYPQADNIIRNVLNIITKDSHALPPYITVLPHSLLEDMVYRLLGHVFPSTHTENELKEKKFPPDDEFVEAASKLTDEIIKEISEHEIRLSMAEDNAESMQLEPIENLVDSICNNILKTSEFQAEVQKDADKKGCSFLSKLAGFIMKEIMYHHLQPFLHGEESSFSDLSDYDHVSELAKS

SEQ ID NO: 43208 - protein, 58 aa, Homo sapiens
  MAP TO AC007719.1; EXPRESSED IN BRAIN, SIGNAL = 0.72; EXPRESSED IN ADULT LIVER, SIGNAL = 0.65; EST_HUMAN HIT: D79105.1, EVALUE 1.00e-06; SWISSPROT HIT: Q63514, EVALUE 3.00e-07
VQCGNPGTTANGKVFRIDGTTFSSSVIYSCMEGYILSGPSVRQCTANGTWSGTLPNCT

SEQ ID NO: 43209 - protein, 52 aa, Homo sapiens
  MAP TO AC007719.1; EXPRESSED IN BRAIN, SIGNAL = 0.72; EXPRESSED IN ADULT LIVER, SIGNAL = 0.65; EST_HUMAN HIT: BF475842.1, EVALUE 6.50e+00
LCSVVTQEPQPMGKSSELMAQHFLVQSFIPAWRDTSFLDLQLDSAQPMEHGL

SEQ ID NO: 43210 - protein, 82 aa, Homo sapiens
  MAP TO AC006499.11; EXPRESSED IN HBL100, SIGNAL = 0.78; EXPRESSED IN BRAIN, SIGNAL = 0.74; SWISSPROT HIT: P33066, EVALUE 8.80e-01; EST_HUMAN HIT: W47077.1, EVALUE 1.90e+00
ESDELLVLVVESTNADIPFVQNFNITSFPCVHGMHGNELTWSKIEWRALMQRLVGSVQRASVRCKIIVLTFLLQISELGPGV

SEQ ID NO: 43211 - protein, 71 aa, Homo sapiens
  MAP TO AP000240.1; EXPRESSED IN PLACENTA, SIGNAL = 0.62; EXPRESSED IN BRAIN, SIGNAL = 0.85; EXPRESSED IN BONE MARROW, SIGNAL = 0.68; EST_HUMAN HIT: BF026788.1, EVALUE 2.40e+00; SWISSPROT HIT: Q46108, EVALUE 1.10e+00
LSSLGYVYQQRKNGLIQQGTALSSVGSSKIKGYENLRVEYGKSRQTKEVFPKDPPNQEELGGFGVPEAKEA

SEQ ID NO: 43212 - protein, 66 aa, Homo sapiens
  MAP TO AL008638.1; EXPRESSED IN ADULT LIVER, SIGNAL =   1; EXPRESSED IN BRAIN, SIGNAL =   1; SWISSPROT HIT: P18509, EVALUE 1.50e+00; EST_HUMAN HIT: BE512650.1, EVALUE 3.40e-02
MPHHPLPESGGSQKCISLSCVMPRSLAASRRPAQLPGRHASFLTAAGMRPCLSGGPGKPAEYAPSL

SEQ ID NO: 43213 - protein, 281 aa, Homo sapiens
  MAP TO AC005208.1; EXPRESSED IN PLACENTA, SIGNAL = 1.2; EXPRESSED IN ADULT LIVER, SIGNAL = 1.4; EXPRESSED IN BRAIN, SIGNAL =   1; EST_HUMAN HIT: AI792302.1, EVALUE 1.00e-43; SWISSPROT HIT: P52191, EVALUE 0.00e+00
VLTENPNQEIATSLEFLLLQNSPGSLRAQQRMSYYGSSYHIINADAKYPGYPPEHIIAEKRRARRRLLHKDGSCNVYFKHIFGEWGSYVVDIFTTLVDTKWRHMFVIFSLSYILSWLIFGSVFWLIAFHHGDLLNDPDITPCVDNVHSFTGAFLFSLETQTTIGYGYRCVTEECSVAVLMVILQSILSCIINTFIIGAALAKMATARKRAQTIRFSYFALIGMRDGKLCLMWRIGDFRPNHVVEGTVRAQLLRYTEDSEGRMTMAFKDLKLVNDQIILVTP

SEQ ID NO: 43214 - protein, 20 aa, Homo sapiens
  MAP TO AC005208.1; EXPRESSED IN PLACENTA, SIGNAL = 1.2; EXPRESSED IN ADULT LIVER, SIGNAL = 1.4; EXPRESSED IN BRAIN, SIGNAL =   1
LSYYQCGRKIPRLPARAHYS

SEQ ID NO: 43215 - protein, 39 aa, Homo sapiens
  MAP TO L14561.1; EXPRESSED IN BRAIN, SIGNAL = 3.4; SWISSPROT HIT: P20020, EVALUE 7.00e-18; EST_HUMAN HIT: AI570253.1, EVALUE 9.00e-17
ESRSSIHNFMTHPEFRIEDSEPHIPLIDDTDAEDDAPTK

SEQ ID NO: 43216 - protein, 179 aa, Homo sapiens
  MAP TO AC005632.2; EXPRESSED IN PLACENTA, SIGNAL = 0.59; EXPRESSED IN BONE MARROW, SIGNAL = 0.84; EXPRESSED IN BRAIN, SIGNAL = 0.76; EXPRESSED IN HELA, SIGNAL = 0.63; EXPRESSED IN ADULT LIVER, SIGNAL = 0.7; EXPRESSED IN FETAL LIVER, SIGNAL = 0.81; EXPRESSED IN LUNG, SIGNAL = 0.93; EST_HUMAN HIT: BF124990.1, EVALUE 3.00e-58; SWISSPROT HIT: P45539, EVALUE 2.00e-07
MAGAGPKRRALAAPVAEEKEEAREKMMAAKRADGAAPAGEGEGVTLQGNITLLKGVAVIVVAIMSSGIFVTPTGVLKEAGSPGLALVVWAACGVFSIVGALCYAELGTTISKSGGDYAYMLDVYGSLPAFLKLWIELLIIRPSSQYIVALVFATYLLKPLFPTCPVPEEAAKLVACHSV

SEQ ID NO: 43217 - protein, 179 aa, Homo sapiens
  MAP TO AC005632.2; EXPRESSED IN PLACENTA, SIGNAL = 0.59; EXPRESSED IN BONE MARROW, SIGNAL = 0.84; EXPRESSED IN BRAIN, SIGNAL = 0.76; EXPRESSED IN HELA, SIGNAL = 0.63; EXPRESSED IN ADULT LIVER, SIGNAL = 0.7; EXPRESSED IN FETAL LIVER, SIGNAL = 0.81; EXPRESSED IN LUNG, SIGNAL = 0.93; SWISSPROT HIT: Q16769, EVALUE 1.90e+00; EST_HUMAN HIT: BE156574.1, EVALUE 2.00e-17
GGCGPEAARASGPGGRGEGRGAGEDDGRQARGRRGAGRRGRGRDPAGEHHATQGRGRHRGRHHELGHLRDAHGRAQGGRLAGAGAGGVGRVRRLLHRGRALLRGAGHHHLQIGRRLRLHAGRLRLAARLPQALDRAAHHPAFIAVHRGPGLRHLPAQAALPHLPGARGGSQARSLPLRA

SEQ ID NO: 43218 - protein, 89 aa, Homo sapiens
  MAP TO AL121760.4; EXPRESSED IN BONE MARROW, SIGNAL = 1.1; EXPRESSED IN BRAIN, SIGNAL = 1.8; EXPRESSED IN PLACENTA, SIGNAL =   1; EXPRESSED IN HBL100, SIGNAL = 0.99; EST_HUMAN HIT: D44812.1, EVALUE 1.10e+00; SWISSPROT HIT: P36426, EVALUE 1.80e+00
SKPTKHRIIDDTETMARLMALSATLSHWTPVSLTRLHREAPTCDSQELTPKSALPDATVALVVTIMWTIMSTVHLPDILWVHWCHTFTL

SEQ ID NO: 43219 - protein, 33 aa, Homo sapiens
  MAP TO AC007832.1; EXPRESSED IN PLACENTA, SIGNAL = 0.94; EXPRESSED IN BRAIN, SIGNAL = 1.1; EST_HUMAN HIT: BE876713.1, EVALUE 2.00e+00
RNHRKSTKKGHKNRPEKCGSKGRRRGFQETGKV

SEQ ID NO: 43220 - protein, 39 aa, Homo sapiens
  MAP TO AC007857.1; EXPRESSED IN PLACENTA, SIGNAL = 0.78; EXPRESSED IN BONE MARROW, SIGNAL = 0.73; EXPRESSED IN ADULT LIVER, SIGNAL = 0.72; EXPRESSED IN BRAIN, SIGNAL = 0.81; EST_HUMAN HIT: AA558271.1, EVALUE 3.00e-04
KGVQSMQPPNMPLEHEDYFELKAIQKQQMQTKLSILLLS

SEQ ID NO: 43221 - protein, 247 aa, Homo sapiens
  MAP TO AC011231.1; EXPRESSED IN BRAIN, SIGNAL =   1; EXPRESSED IN BONE MARROW, SIGNAL = 0.89; SWISSPROT HIT: P35446, EVALUE 5.00e-10; EST_HUMAN HIT: AW612526.1, EVALUE 3.00e-27
PWGRCTGDCGPGGVQSRAVWCFHVDGWTSHLSNCGESNRPPKERSCFRVCDWHSDLFQWEVSDWHHCVLVPYARGEVKPRTAECVTAQHGLQHRMVRCIQKLNRTVVANEICEHFALQPPTEQACLIPCPRDCVVSEFLPWSNCSKGCGKKLQHRTRAVIAPPLFGGLQCPNLTESRACDAPISCPLGEEEYTFSLKVGPWSKCRLPHLKEINPSGRTVLDFNSDSNERVTFKHQSYKAHHHSKSWA

SEQ ID NO: 43222 - protein, 379 aa, Homo sapiens
  MAP TO AC006239.5; EXPRESSED IN BRAIN, SIGNAL = 2.7; SWISSPROT HIT: P41413, EVALUE 3.50e+00; EST_HUMAN HIT: BF348205.1, EVALUE 1.00e-114
TIQQWLARVQSLLYCNENGFWGTFLESQRSCVCHGSTTLCQRPIPCVIGGNNSCAMCSLANISLCGSCNKGYKLYRGRCEPQNVDSERSEQFISFETDLDFQDLELKYLLQKMDSRLYVHTTFISNEIRLDTFFDPRWRKRMSLTLKSNKNRMDFIHMVIGMSMRICQMRNSSLDPMFFVYVNPFSGSHSEGWNMPFGEFGYPRWEKIRLQNSQCYNWTLLLGNRWKTFFETVHIYLRSRTRLPTLLRNETGQGPVDLSDPSKRQFYIKISDVQVFGYSLRFNADLLRSAVQQVNQSYTQGGQFYSSSSVMLLLLDIRDRINRLAPPVAPGKPQLDLFSCMLKHRLKLTNSEIIRVNHALDLYNTEILKQSDQMTAKLC

SEQ ID NO: 43223 - protein, 261 aa, Homo sapiens
  MAP TO AC004624.6; EXPRESSED IN BRAIN, SIGNAL =   1; EST_HUMAN HIT: BE897872.1, EVALUE 1.40e-02; SWISSPROT HIT: P35748, EVALUE 2.00e-04
SQQVWGNWGICSNEEAKSKESGEGDKPGKTTALGTSEVPGNPGTLPHWDEASPNPPQGPAEPWGALERVRSRFHQLISGLKKQRSQILHDNTKLHGDQERFHERVCALEREREREVTKISRLERDNHRLVGDISQLKKELDQYLQAISDLEDCNGKSYCKILELEEENETLKGNLGQLQKATSESVRKSKDTMEQVTLENWKLQTLISELGVSYKELIKDIVLGIEDMIRALSGENEHLLRRVHVLEREVTLQRSTDQGRL

SEQ ID NO: 43224 - protein, 37 aa, Homo sapiens
  MAP TO AF186191.1; EXPRESSED IN BRAIN, SIGNAL = 1.1; EXPRESSED IN BONE MARROW, SIGNAL = 0.92
FCPSLKVNGHRAMSRWKMQVEASSLSPLVCLVETCNK

SEQ ID NO: 43225 - protein, 120 aa, Homo sapiens
  MAP TO AL031431.8; EXPRESSED IN BRAIN, SIGNAL = 0.94; EXPRESSED IN HBL100, SIGNAL = 0.67; EXPRESSED IN LUNG, SIGNAL = 0.89; EXPRESSED IN HELA, SIGNAL = 0.69; EST_HUMAN HIT: AW966015.1, EVALUE 4.00e-68; SWISSPROT HIT: P09631, EVALUE 1.00e+00
HKVKENSSHQPTLPSVPRTFLRRRPIMSVAADNLGGGSTTLAWHPSRTAAIAFVLSWRHCSLETSPQPHRLQWLPEQKGGVDRAPWLLPHAPIQAAFRHDSLPQTEGTPEAQTSRRISPP

SEQ ID NO: 43226 - protein, 54 aa, Homo sapiens
  MAP TO AC007126.5; EXPRESSED IN BRAIN, SIGNAL =   1
FTEVHLLMDTQSYLRLCMSQAALILSPCHSFPSLLLHLRSLLESVALLCIPLPN

SEQ ID NO: 43227 - protein, 52 aa, Homo sapiens; identical to SEQ ID NO: 42429
  MAP TO AC008430.2; EXPRESSED IN BRAIN, SIGNAL = 1.1; SWISSPROT HIT: P70490, EVALUE 3.00e-13; EST_HUMAN HIT: AW965338.1, EVALUE 6.00e-25

SEQ ID NO: 43228 - protein, 39 aa, Homo sapiens
  MAP TO AC008430.2; EXPRESSED IN BRAIN, SIGNAL = 1.1; EST_HUMAN HIT: AW965338.1, EVALUE 1.00e-15
LHKELKILVMYSLLAPTNWLTAMMENTGLYTRMKSKEKI

SEQ ID NO: 43229 - protein, 49 aa, Homo sapiens
  MAP TO AC006020.2; EXPRESSED IN LUNG, SIGNAL = 3.7; EXPRESSED IN BRAIN, SIGNAL = 0.93; EST_HUMAN HIT: H18572.1, EVALUE 7.00e-23; SWISSPROT HIT: P23471, EVALUE 5.00e-24
AEDEFVYWPNKDEPINCESFKVTLMAEEHKCLSNEEKLIIQDFILEATQ

SEQ ID NO: 43230 - protein, 27 aa, Homo sapiens
  MAP TO AP000117.1; EXPRESSED IN BRAIN, SIGNAL = 0.69
ITKPLGSSGTDKVFSPKSNLQYKMYKT

SEQ ID NO: 43231 - protein, 49 aa, Homo sapiens
  MAP TO AP000117.1; EXPRESSED IN BRAIN, SIGNAL = 0.69; SWISSPROT HIT: O60318, EVALUE 3.50e+00; EST_HUMAN HIT: AI865069.1, EVALUE 4.40e+00
AQWEALQGQEQQGAVWLPFQRLPPADSDHEAFGVFWHRQSLQPQIKPAV

SEQ ID NO: 43232 - protein, 396 aa, Homo sapiens
  MAP TO AC004886.1; EXPRESSED IN BRAIN, SIGNAL = 2.1; SWISSPROT HIT: P39770, EVALUE 8.90e-01; EST_HUMAN HIT: AU123733.1, EVALUE 9.00e-99
IDHHTPRNYVLIDDIGEITKGTAALSTAFSLHEKDLSKTDRLLRTTETRRSQEVTDFLAPLQSSSRLHSYVKAEEDPMEDPYELKLLKHQIKQEFRRGTESLDHLAGLSHYYHADTSYRHFPKSEKYSISRLTLEKQAAKQLPAAILYQKQSKHKKSLIDPKMSKFSPIQESRDLEPDYSSYMTSSTSSIGGISSRARLLQDDITFGLRKNITDQQKFMGSSLGTGLGTLGNTIRSALQDEADKPYSSGSRSRPSSRPSSVYGLDLSIKRDSSSSSLRLKAQEAEALDVSFSHASSSARTKPTSLPISQSRGRIPIVAQNSEEESPLSPVGQPMGMARAAAGPLPPISADTRDQFGSSHSLPEVQQHMREESRTRGYDRDIAFIMDDFQHAMSDSE

SEQ ID NO: 43233 - protein, 74 aa, Homo sapiens
  MAP TO AC007372.4; EXPRESSED IN HELA, SIGNAL = 0.72; EXPRESSED IN BRAIN, SIGNAL = 0.87; EST_HUMAN HIT: AA724777.1, EVALUE 5.00e-36; SWISSPROT HIT: Q92813, EVALUE 8.00e-37
MGILSVDLLITLQILPVFFSNCLFLALYDSVILLKHVVLLLSRSKSTRGEWRRMLTSEGLRCVWKSFLLDAYKQ

SEQ ID NO: 43234 - protein, 49 aa, Homo sapiens
  MAP TO AC007391.2; EXPRESSED IN HELA, SIGNAL = 0.67; EXPRESSED IN BONE MARROW, SIGNAL = 1.6; EXPRESSED IN BRAIN, SIGNAL = 0.96; EST_HUMAN HIT: F08166.1, EVALUE 5.00e-22; SWISSPROT HIT: Q16769, EVALUE 4.00e-23
NYHQPAILNSSALRQIAEGTSISEMWQNDLQPLLIERYPGSPGSYAARQ

SEQ ID NO: 43235 - protein, 54 aa, Homo sapiens
  MAP TO AC007556.2; EXPRESSED IN FETAL LIVER, SIGNAL = 0.62; EXPRESSED IN HELA, SIGNAL = 1.5; EXPRESSED IN BRAIN, SIGNAL = 0.81; EXPRESSED IN PLACENTA, SIGNAL = 0.81; EXPRESSED IN BT474, SIGNAL = 0.69; EXPRESSED IN LUNG, SIGNAL = 0.76; SWISSPROT HIT: P98164, EVALUE 2.00e-26; EST_HUMAN HIT: AU128912.1, EVALUE 4.00e-12
VVYYTVRGEGSRFGAIKRAYIPNFESGRNNLVQEVDLKLKYVMQPDGIAVDWVG

SEQ ID NO: 43236 - protein, 36 aa, Homo sapiens
  MAP TO AC007556.2; EXPRESSED IN FETAL LIVER, SIGNAL = 0.62; EXPRESSED IN HELA, SIGNAL = 1.5; EXPRESSED IN BRAIN, SIGNAL = 0.81; EXPRESSED IN PLACENTA, SIGNAL = 0.81; EXPRESSED IN BT474, SIGNAL = 0.69; EXPRESSED IN LUNG, SIGNAL = 0.76; EST_HUMAN HIT: AU128912.1, EVALUE 2.00e-11
LCITLCEGRALGLVLSNVPTSPTLNPAAIILCRKLT

SEQ ID NO: 43237 - protein, 32 aa, Homo sapiens
  MAP TO AC009226.2; EXPRESSED IN BRAIN, SIGNAL =   1
LFIALRIKHKLFTLANMTYNDQASAYFPLLLI

SEQ ID NO: 43238 - protein, 21 aa, Homo sapiens
  MAP TO AL096769.7; EXPRESSED IN BRAIN, SIGNAL = 0.79; EXPRESSED IN PLACENTA, SIGNAL = 0.64; EXPRESSED IN FETAL LIVER, SIGNAL = 0.57
SKPRIVATFCSLGPISIMSSV

SEQ ID NO: 43239 - protein, 57 aa, Homo sapiens
  MAP TO AL078474.2; EXPRESSED IN BRAIN, SIGNAL = 2.6; SWISSPROT HIT: P98073, EVALUE 6.00e-30; EST_HUMAN HIT: BE737932.1, EVALUE 8.00e-28
CGKKLAAQDITPKIVGGSNAKEGAWPWVVGLYYGGRLLCGASLVSSDWLVSAAHCVY

SEQ ID NO: 43240 - protein, 63 aa, Homo sapiens
  MAP TO AL096801.16; EXPRESSED IN ADULT LIVER, SIGNAL = 1.1; EXPRESSED IN BRAIN, SIGNAL = 1.1; EST_HUMAN HIT: AU133604.1, EVALUE 9.00e-22; SWISSPROT HIT: Q02917, EVALUE 8.70e-01
PLSPSPIPSPNAKLENSALLTVEPSPQDKNKGFFVDESEPLLRCDSTSSGSSALSRNGSFITK

SEQ ID NO: 43241 - protein, 53 aa, Homo sapiens
  MAP TO AL050349.8; EXPRESSED IN BRAIN, SIGNAL = 1.1; EXPRESSED IN HBL100, SIGNAL = 1.8; EST_HUMAN HIT: AU141320.1, EVALUE 7.00e-25; SWISSPROT HIT: Q92581, EVALUE 3.50e+00
IHSWNLARFVFTYKGLRALQSYIQGKTYPAHAFLAAFLGGILVFGENNNINSQ

SEQ ID NO: 43242 - protein, 45 aa, Homo sapiens
  MAP TO AC007679.2; EXPRESSED IN LUNG, SIGNAL = 0.77; EXPRESSED IN BRAIN, SIGNAL = 0.87; SWISSPROT HIT: P39523, EVALUE 2.10e+00; EST_HUMAN HIT: AU122140.1, EVALUE 4.00e+00
KDTHRKRAERKGSGSSRESCLGEKHGKRFHRKTQVVEEQQPAFMD

SEQ ID NO: 43243 - protein, 220 aa, Homo sapiens
  MAP TO AC004142.1; EXPRESSED IN BRAIN, SIGNAL = 1.2; EST_HUMAN HIT: AA025228.1, EVALUE 3.00e-72; SWISSPROT HIT: Q03696, EVALUE 5.00e-04
ATAEPQPEIYWITPSGQKLLPNTLTDKFYVHSEGTLDINGVTPKEGGLYTCIATNLVGADLKSVMIKVDGSFPQDNNGSLNIKIRDIQANSVLVSWKASSKILKSSVKWTAFVKTENSHAAQSARIPSDVKVYNLTHLNPSTEYKICIDIPTIYQKNRKKCVNVTTKGLHPDQKEYEKNNTTTLMACLGGLLGIIGVICLISCLSPEMNCDGGHSYVRNY

SEQ ID NO: 43244 - protein, 748 aa, Homo sapiens
  MAP TO AC004886.1; EXPRESSED IN BRAIN, SIGNAL = 1.1; EST_HUMAN HIT: AI636014.1, EVALUE 3.00e-51; SWISSPROT HIT: P38254, EVALUE 1.40e+00
EKEDDKSDTSSSQQPKSPQGLSDTGYSSDGISSSLGEIPSLIPTDEKDILKGLKKDSFSQESSPSSPSDLAKLESTVLSILEAQASTLADEKSEKKTQPHEVSPEQPKDQEKTQSLSETLEITISEEEIKESQEERKDTFKKDSQQDIPSSKDHKEKSEFVDDITTRREPYDSVEESSESENSPVPQRKRRTSVGSSSSDEYKQEDSQGSGEEEDFIRKQIIEMSADEDASGSEDDEFIRNQLKEISSSTESQKKEETKGKGKITAGKHRRLTRKSSTSIDEDAGRRHSWHDEDDEAFDESPELKYRETKSQESEELVVTGGGGLRRFKTIELNSTIADKYSAESSQKKTSLYFDEEPELEMESLTDSPEDRSRGEGSSSLHASSFTPGTSPTSVSSLDEDSDSSPSHKKGESKQQRKARHRPHGPLLPTIEDSSEEEELREEEELLKEQEKQREIEQQQRKSSSKKSKKDKDELRAQRRRERPKTPPSNLSPIEDASPTEELRQAAEMEELHRSSCSEYSPSIESDPEGFEISPEKIIEVQKVYKLPTAVSLYSPTDEQSIMQKEGSQKALKSAEEMYEEMMHKTHKYKAFPAANERDEVFEKEPLYGGMLIEDYIYESLVEDTYNGSVDGSLLTRQEEENGFMQQKGREQKIRLSEQIYEDPMQKITDLQKEFYELESLHSVVPQEDIVSSSFIIPESHEIVDLGTMVTSTEEERKLLDADAAYEELMKRQQMQLTPGSSPTQAPI

SEQ ID NO: 43245 - protein, 71 aa, Homo sapiens
  MAP TO AC004886.1; EXPRESSED IN BRAIN, SIGNAL = 1.9; EST_HUMAN HIT: AV759958.1, EVALUE 6.30e-01; SWISSPROT HIT: P25054, EVALUE 3.30e-02
KALESAFVPYEKPLPDDISPQKVLHPDMAKVPPASPKTAKMMQRSMSDPKPLSPTADESSRAPFQYTEGYT

SEQ ID NO: 43246 - protein, 432 aa, Homo sapiens
  MAP TO AC005859.1; EXPRESSED IN BRAIN, SIGNAL = 0.99; EST_HUMAN HIT: AW867810.1, EVALUE 5.00e-13; SWISSPROT HIT: Q28888, EVALUE 4.00e-14
VFPMWTLKRQILILFNIILISKLLGARWFPKTLPCDVTLDVPKNHVIVDCTDKHLTEIPGGIPTNTTNLTLTINHIPDISPASFHRLDHLVEIDFRCNCVPIPLGSKNNMCIKRLQIKPRSFSGLTYLKSLYLDGNQLLEIPQGLPPSLQLLSLEANNIFSIRKENLTELANIEILYLGQNCYYRNPCYVSYSIEKDAFLNLTKLKVLSLKDNNVTAVPTVLPSTLTELYLYNNMIAKIQEDDFNNLNQLQILDLSGNCPRCYNAPFPCAPCKNNSPLQIPVNAFDALTELKVLRLHSNSLQHVPPRWFKNINKLQELDLSQNFLAKEIGDAKFLHFLPSLIQLDLSFNFELQVYRASMNLSQAFSSLKSLKILRIRGYVFKELKSFNLSPLHNLQNLEVLDLGTNFIKIANLSMFKQFKRLKVIDLSVNKI

SEQ ID NO: 43247 - protein, 47 aa, Homo sapiens
  MAP TO AC007535.3; EXPRESSED IN FETAL LIVER, SIGNAL = 3.6; EXPRESSED IN BRAIN, SIGNAL = 0.89
HTHTPHTSTETSQKEQEESKNLKIRKVREVSTVKKTWSNKNVFEFYR

SEQ ID NO: 43248 - protein, 1065 aa, Homo sapiens
  MAP TO AC006385.3; EXPRESSED IN BRAIN, SIGNAL = 6.5; SWISSPROT HIT: P11137, EVALUE 0.00e+00; EST_HUMAN HIT: AL134015.1, EVALUE 3.00e-72
MKNEIVTETSPFAPAFLQPDDKKSLQQTSGPATAKDSFKIEEPHEAKPDKMAEAPPSEAMTLPKDAHIPVVEEHVMGKVLEEEKEAINQETVQQRDTFTPSGQEPILTEKETELKLEEKTTISDKEAVPKESKPPKPADEEIGIIQTSTEHTFSEQKDQEPTTDMLKQDSFPVSLEQAVTDSAMTSKTLEKAMTEPSALIEKSSIQELFEMRVDDKDKIEGVGAATSAELDMPFYEDKSGMSKYFETSALKEEATKSIEPGSDYYELSDTRESVHESIDTMSPMHKNGDKEFQTGKESQPSPPAQEAGYSTLAQSYPSDLPEEPSSPQERMFTIDPKVYGEKRDLHSKNKDDLTLSRSLGLGGRSAIEQRSMSINLPMSCLDSIALGFNFGRGHDLSPLASDILTNTSGSMDEGDDYLPATTPALEKAPCFPVESKEEEQIEKVKATGEESTQAEISCESPFLAKDFYKNGTVMAPDLPEMLDLAGTRSRLASVSADAEVARRKSVPSETVVEDSRTGLPPVTDENHVIVKTDSQLEDLGYCVFNKYTVPLPSPVQDSENLSGESGTFYEGTDDKVRRDLATDLSLIEVKLAAAGRVKDEFSVDKEASAHISGDKSGLSKEFDQEKKANDRLDTVLEKSEEHADSKEHAKKTEEAGDEIETFGLGVTYEQALAKDLSIPTDASSEKAEKGLSSVPEIAEVEPSKKVEQGLDFAVQGQLDVKISDFGQMASGLNIDDRRATELKLEATQDMTPSSKAPQEADAFMGVESGHMKEGTKVSETEVKEKVAKPDLVHQEAVDKEESYESSGEHESLTMESLKADEGKKETSPESSLIQDEIAVKLSVEIPCPPAVSEADLATDERADVQMEFIQGPKEESKETPDISITPSDVAEPLHETIVSEPAEIQSEEEEIEAQGEYDKLLFRSDTLQITDLGVSGAREEFVETCPSEHKGVIESVVTIEDDFITVVQTTTDEGESGSHSVRFAALEQPEVERRPSPHDEEEFEVEEAAEAQAEPKDGSPEAPASPEREEVALSEYKTETYDDYKDETTIDDSIMDADSLWVDTQ

SEQ ID NO: 43249 - protein, 222 aa, Homo sapiens
  MAP TO AC006531.1; EXPRESSED IN BRAIN, SIGNAL = 1.5; EST_HUMAN HIT: AW893633.1, EVALUE 1.00e-12; SWISSPROT HIT: Q00959, EVALUE 1.00e-109
GIYSCIHGVHIEEKKKSPDFNLTGSQSNMLKLLRSAKNISSMSNMNSSRMDSPKRAADFIQRGSLIMDMVSDKGNLMYSDNRSFQGKESIFGDNMNELQTFVANRQKDNLNNYVFQGQHPLTLNESNPNTVEVAVSTESKANSRPRQLWKKSVDSIRQDSLSQNPVSQRDEATAENRTHSLKSPRYLPEEMAHSDISETSNRATCHREPDNSKNHKTKDNFK

SEQ ID NO: 43250 - protein, 21 aa, Homo sapiens
  MAP TO AC006531.1; EXPRESSED IN BRAIN, SIGNAL = 1.5; EST_HUMAN HIT: AW893633.1, EVALUE 4.00e-04
ASTAAFMECTLKKRRSLQTSI

SEQ ID NO: 43251 - protein, 378 aa, Homo sapiens
  MAP TO AL022143.1; EXPRESSED IN BRAIN, SIGNAL = 1.6; EST_HUMAN HIT: AW955819.1, EVALUE 0.00e+00; SWISSPROT HIT: Q28661, EVALUE 9.00e-03
FYLCSPRSLSYWWNRIQSLLYCGESTFPGTFLEQSHSCTCPYDQSSCQGPIPCALGEGPACAHCAPDNSTRCGSCNPGYVLAQGLCRPEVAESLENFLGLETDLQDLELKYLLQKQDSRIEVHSIFISNDMRLGSWFDPSWRKRMLLTLKSNKYKPGLVHVMLALSLQICLTKNSTLEPVMAIYVNPFGGSHSESWFMPVNEGSFPDWERTNVDAAAQCQNWTITLGNRWKTFFETVHVYLRSRIKSLDDSSNETIYYEPLEMTDPSKNLGYMKINTLQVFGYSLPFDPDAIRDLILQLDYPYTQGSQDSALLQLIELRDRVNQLSPPGKVRLDLFSCLLRHRLKLANNEVGRIQSSLRAFNSKLPNPVEYETGKLCS

SEQ ID NO: 43252 - protein, 66 aa, Homo sapiens
  MAP TO AC010724.1; EXPRESSED IN ADULT LIVER, SIGNAL = 0.94; EXPRESSED IN BRAIN, SIGNAL = 0.97; EST_HUMAN HIT: BE302536.1, EVALUE 8.00e-13; SWISSPROT HIT: Q03571, EVALUE 1.00e-06
VQVIPWVLADSNFVRSPSQRLDPSRTVFVGALHGMLNAEALAAILNDLFGGVVYAGIDTDKHKYPI

SEQ ID NO: 43253 - protein, 72 aa, Homo sapiens
  MAP TO Z98884.11; EXPRESSED IN ADULT LIVER, SIGNAL = 1.2; EXPRESSED IN FETAL LIVER, SIGNAL = 0.59; EXPRESSED IN BRAIN, SIGNAL = 0.9; EXPRESSED IN PLACENTA, SIGNAL = 0.66; EST_HUMAN HIT: AA663888.1, EVALUE 1.00e-29; SWISSPROT HIT: Q99104, EVALUE 2.00e-05
YALYKKMTQAAILIQSKFRSYYEQKKFQQSRRAAVLIQKYYRSYKKCGKRRQARRTAVIVQQKLRWVEKSSW

SEQ ID NO: 43254 - protein, 29 aa, Homo sapiens
  MAP TO AL078599.19; EXPRESSED IN BONE MARROW, SIGNAL = 0.94; EXPRESSED IN BRAIN, SIGNAL = 0.99
LSVIEVRRQNFIHRKIILMSNLTPLGFCL

SEQ ID NO: 43255 - protein, 30 aa, Homo sapiens
  MAP TO AP000159.1; EXPRESSED IN BRAIN, SIGNAL = 0.75; EXPRESSED IN PLACENTA, SIGNAL = 0.91
PCMTSTFISPQCLDHVTSHFSSHSLLLIHT

SEQ ID NO: 43256 - protein, 34 aa, Homo sapiens
  MAP TO AL049556.13; EXPRESSED IN BT474, SIGNAL = 0.67; EXPRESSED IN HELA, SIGNAL = 0.67; EXPRESSED IN BRAIN, SIGNAL = 0.73
QLQNHEHHAKNRFLKKLFPVGRKIPLPSFQNQTK

SEQ ID NO: 43257 - protein, 34 aa, Homo sapiens
  MAP TO AL049556.13; EXPRESSED IN BT474, SIGNAL = 0.67; EXPRESSED IN HELA, SIGNAL = 0.67; EXPRESSED IN BRAIN, SIGNAL = 0.73
FCLVLEGGKRDLSSHRKKFLKKSVLGMMFMILQL

SEQ ID NO: 43258 - protein, 30 aa, Homo sapiens
  MAP TO AP000022.2; EXPRESSED IN BT474, SIGNAL = 1.2; EXPRESSED IN BONE MARROW, SIGNAL = 1.1; EXPRESSED IN BRAIN, SIGNAL = 1.1
RELFSPTCGIDHISFVQSRACKWELAEVYA

SEQ ID NO: 43259 - protein, 65 aa, Homo sapiens
  MAP TO AL034425.6; EXPRESSED IN BRAIN, SIGNAL = 1.3; EST_HUMAN HIT: BF663773.1, EVALUE 3.90e-01; SWISSPROT HIT: P57378, EVALUE 8.90e-01
EETQVGQASTHNIHACVQREARWAEQQGRDKCSGGPAGAIPKAQDQILLSYPLEYKPLPPECKPQ

SEQ ID NO: 43260 - protein, 78 aa, Homo sapiens
  MAP TO AP000175.1; EXPRESSED IN BRAIN, SIGNAL = 0.69; EXPRESSED IN BT474, SIGNAL = 0.63; EST_HUMAN HIT: AA418916.1, EVALUE 1.00e-24; SWISSPROT HIT: O88866, EVALUE 1.00e-25
ISLEDLSPSVVLHMTEKLGYKNSDVINTVLSNRACHILAIYFLLNKKLERYLSGVSATLEAIVSAVCGKKSSYTQSAS

SEQ ID NO: 43261 - protein, 48 aa, Homo sapiens
  MAP TO Z83844.5; EXPRESSED IN BONE MARROW, SIGNAL = 0.9; EXPRESSED IN BRAIN, SIGNAL = 1.1
NCRDELVNLFTLHRVGLTRLPGLSTFEGVHVITLKSNHGRQLEGVQTT

SEQ ID NO: 43262 - protein, 50 aa, Homo sapiens
  MAP TO AC008085.1; EXPRESSED IN PLACENTA, SIGNAL = 0.7; EXPRESSED IN BRAIN, SIGNAL = 0.7; EXPRESSED IN ADULT LIVER, SIGNAL = 1.3; SWISSPROT HIT: Q48311, EVALUE 4.60e+00; EST_HUMAN HIT: AW408543.1, EVALUE 2.00e-02
AITLLRICPKEIIRDVQRFMYKDVHPSAIYNSEILETLQVSISGRMVNDG

SEQ ID NO: 43263 - protein, 67 aa, Homo sapiens
  MAP TO AL031301.1; EXPRESSED IN BRAIN, SIGNAL = 1.6
HHHHQYHHHHHPHQQHHNSTINIIITTINIIITTINIIITTINIIIAINIIITPITLIINSTVIIIT

SEQ ID NO: 43264 - protein, 64 aa, Homo sapiens
  MAP TO AL023513.1; EXPRESSED IN BRAIN, SIGNAL = 1.1; EST_HUMAN HIT: F05756.1, EVALUE 3.00e-35; SWISSPROT HIT: Q63515, EVALUE 1.00e-03
FEKGHCYEPYIQNGNFTTSDPTYNIGTIVEFTCDPGHSLEQGPAIIECINVRDPYWNDTEPLCR

SEQ ID NO: 43265 - protein, 20 aa, Homo sapiens
  MAP TO AL023513.1; EXPRESSED IN BRAIN, SIGNAL = 1.1; EST_HUMAN HIT: F05756.1, EVALUE 5.00e-06
LPGAGPGHHRMHQCAGPILE

SEQ ID NO: 43266 - protein, 69 aa, Homo sapiens
  MAP TO AC007237.3; EXPRESSED IN LUNG, SIGNAL = 0.68; EXPRESSED IN BRAIN, SIGNAL = 0.73; EXPRESSED IN HELA, SIGNAL = 0.61; EST_HUMAN HIT: AW163674.1, EVALUE 6.00e-23; SWISSPROT HIT: Q89420, EVALUE 5.60e+00
SSEHEDKSAGASGEMPSQPYPAPVYSQPEELKEQMDDTKPTKPEDNEEPDPLPDNWEMAYTEKGEVYFI

SEQ ID NO: 43267 - protein, 48 aa, Homo sapiens
  MAP TO AC011425.1; EXPRESSED IN BRAIN, SIGNAL =   5; EXPRESSED IN ADULT LIVER, SIGNAL = 1.1; EST_HUMAN HIT: Z39464.1, EVALUE 3.40e+00; SWISSPROT HIT: Q60613, EVALUE 4.60e+00
THTFSLSVSGMLAASSRNSCCSKRPLNILVNMLKATGPVLLCWIIPFS

SEQ ID NO: 43268 - protein, 201 aa, Homo sapiens
  MAP TO AC004074.1; EXPRESSED IN BRAIN, SIGNAL = 5.6; EST_HUMAN HIT: F08328.1, EVALUE 1.00e-50; SWISSPROT HIT: P51860, EVALUE 1.00e-111
KYDEPILKLLTDIKVKLSDPGEPLSFTLEFHFKPNEYFKNELLTKTYVLKSKLAYYDPHPYRGTAIEYSTGCEIDWNEGKNVTLKTIKKKQKHRIWGTIRTVTEDFPKDSFFNFFSPHGITSNGRDGNDDFLLGHNLRTYIIPRSVLFFSGDALESQQEGVVREVNDAIYDKIIYDNWMAAIEEVKACCKNLEALVEDIDR

SEQ ID NO: 43269 - protein, 38 aa, Homo sapiens
  MAP TO AC010149.1; EXPRESSED IN BRAIN, SIGNAL = 2.6; EXPRESSED IN ADULT LIVER, SIGNAL = 1.6
MKTLEATCQRKQDSHQPESLNGCVTQRTLTTSNHLILI

SEQ ID NO: 43270 - protein, 28 aa, Homo sapiens
  MAP TO AC011406.1; EXPRESSED IN BRAIN, SIGNAL = 0.9; EST_HUMAN HIT: AW236547.1, EVALUE 9.00e-09
SDMSSRELKRRFEVFGEIEECEVLTRNR

SEQ ID NO: 43271 - protein, 38 aa, Homo sapiens
  MAP TO AC010083.1; EXPRESSED IN BRAIN, SIGNAL =   1; EST_HUMAN HIT: AA709470.1, EVALUE 4.00e-16; SWISSPROT HIT: P16519, EVALUE 3.00e-17
VKMALQQEGFDRKKRGYRDINEIDINMNDPLFTKQWYL

SEQ ID NO: 43272 - protein, 125 aa, Homo sapiens
  MAP TO AC007462.2; EXPRESSED IN BRAIN, SIGNAL = 1.2; EXPRESSED IN BONE MARROW, SIGNAL = 0.63; EST_HUMAN HIT: R59266.1, EVALUE 1.00e-59; SWISSPROT HIT: P31696, EVALUE 2.00e-03
MAGDHTRLEFHNIETGIITERRYLSSVPSNFIGHLQSLTFNGMAYIDLCKNGDIDYCELNARFGFRNIIADPVTFKTKSSYVALATLQAYTSMHLFFQFKTTSLDGLILYNSGDGNDFIVVELVK

SEQ ID NO: 43273 - protein, 30 aa, Homo sapiens
  MAP TO AL121796.1; EXPRESSED IN BRAIN, SIGNAL =   1; EST_HUMAN HIT: W93045.1, EVALUE 4.00e+00
SFSARALPCRQPSSAAAQLRASPPWVPVTP

SEQ ID NO: 43274 - protein, 27 aa, Homo sapiens
  MAP TO AL121796.1; EXPRESSED IN BRAIN, SIGNAL =   1; SWISSPROT HIT: P46692, EVALUE 1.70e+00
PSALGLSPADSLPQQPHSSGLLLPGCQ

SEQ ID NO: 43275 - protein, 28 aa, Homo sapiens
  MAP TO AC008080.1; EXPRESSED IN BRAIN, SIGNAL = 1.1
YHKFPDNSMVAAAGKPQQRGGPVGRAAR

SEQ ID NO: 43276 - protein, 665 aa, Homo sapiens
  MAP TO AL121716.2; EXPRESSED IN BRAIN, SIGNAL = 1.2; EST_HUMAN HIT: AA603882.1, EVALUE 3.00e-71; SWISSPROT HIT: Q9Y3R5, EVALUE 1.00e-64
ISVSQVQLITSKGNGEKPLTMDEIENFSLTVNPLSDRLSLLSTSSETIPMVVSDFDLPDQQIEILQSSDSGCSQSSAGDNLSYEVDPETVNAQEDSQMPKESSPDDDVQQVVFDLICKVVSGLEVESASVTSQLEIEAMPPKCSDIDPDEETIKIEDDSIQQSQNALLSNESSQFLSVSAEGGHECVANGISRNSSSPCISGTTHTLHDSSVASIETKSRQRSHSSIQFSFKEKLSEKVSEKETIVKESGKQPGAKPKVKLARKKDDDKKKSSNEKLKQTSVFFSDGLDLENWYSCGEGDISEIESDMGSPGSRKSPNFNIHPLYQHVLLYLQLYDSSRTLYAFSAIKAILKTNPIAFVNAISTTSVNNAYTPQLSLLQNLLARHRISVMGKDFYSHIPVDSNHNFRSSMYIEILISLCLYYMRSHYPTHVKVTAQDLIGNRNMQMMSIEILTLLFTELAKVIESSAKGFPSFISDMLSKCKVQKVILHCLLSSIFSAQKWHSEKMAGKNLVAVEEGFSEDSLINFSEDEFDNGSTLQSQLLKVLQRLIVLEHRVMTIPEENETGFDFVVSDLEHISPHQPMTSLQYLHAQPITCQGMFLCAVIRALHQHCACKMHPQWIGLITSTLPYMGKVLQRVVVSVTLQLCRNLDNLIQQYKYETGLSDS

SEQ ID NO: 43277 - protein, 31 aa, Homo sapiens
  MAP TO AC010961.2; EXPRESSED IN BRAIN, SIGNAL = 0.95; SWISSPROT HIT: P08292, EVALUE 2.10e+00
MFSAQACQELVIPDYGELCGTETNESFSQWK

SEQ ID NO: 43278 - protein, 52 aa, Homo sapiens
  MAP TO AC011741.2; EXPRESSED IN BRAIN, SIGNAL = 1.1; EST_HUMAN HIT: AU133743.1, EVALUE 1.00e-18; SWISSPROT HIT: Q61301, EVALUE 4.00e-23
VINAALTLAARPQSKVAQDNMDVFKDQWEKQVRVLTEAVDDITSVDDFLSVS

SEQ ID NO: 43279 - protein, 83 aa, Homo sapiens
  MAP TO AC012145.1; EXPRESSED IN BRAIN, SIGNAL = 1.4; EST_HUMAN HIT: BF154497.1, EVALUE 1.00e-47; SWISSPROT HIT: P15533, EVALUE 4.00e-18
ETFCCPQCRAPFHMDSLRPNKQLGSLIEALKETDQEMSCEEHGEQFHLFCEDEGQLICWRCERAPQHKGHTTALVEDVCQGYK

SEQ ID NO: 43280 - protein, 30 aa, Homo sapiens
  MAP TO AC011422.2; EXPRESSED IN BRAIN, SIGNAL = 2.5; EST_HUMAN HIT: AL134969.1, EVALUE 3.00e-06
LFSLFSIYMKMGLSIVISNQRIFFMQLQPQ

SEQ ID NO: 43281 - protein, 60 aa, Homo sapiens
  MAP TO AC005079.1; EXPRESSED IN ADULT LIVER, SIGNAL = 0.81; EXPRESSED IN BRAIN, SIGNAL = 0.77; EXPRESSED IN BONE MARROW, SIGNAL = 0.71; EXPRESSED IN LUNG, SIGNAL = 0.79; SWISSPROT HIT: P11369, EVALUE 2.00e-12; EST_HUMAN HIT: AW811963.1, EVALUE 3.00e-12
WAKGINKQFTKNNIQMANKHLRRSTSLAIRETQIKMTKRYHYTPIRMAKIKNNNNNDTKC

SEQ ID NO: 43282 - protein, 46 aa, Homo sapiens
  MAP TO AC005697.1; EXPRESSED IN PLACENTA, SIGNAL = 0.89; EXPRESSED IN ADULT LIVER, SIGNAL = 0.67; EXPRESSED IN LUNG, SIGNAL = 0.7; EXPRESSED IN FETAL LIVER, SIGNAL = 0.71; EXPRESSED IN BRAIN, SIGNAL = 0.81; EXPRESSED IN BONE MARROW, SIGNAL = 0.75; EST_HUMAN HIT: AW971768.1, EVALUE 3.00e+00
KFEITGVEYISKLSQSRGEKPGCLSTNSHPSLVEDVSSVFCECPRM

SEQ ID NO: 43283 - protein, 47 aa, Homo sapiens
  MAP TO AC004106.1; EXPRESSED IN ADULT LIVER, SIGNAL = 0.82; EXPRESSED IN PLACENTA, SIGNAL = 1.2; EXPRESSED IN FETAL LIVER, SIGNAL =   1; EXPRESSED IN BRAIN, SIGNAL = 0.83; EXPRESSED IN LUNG, SIGNAL = 1.2; EXPRESSED IN BONE MARROW, SIGNAL = 1.2; SWISSPROT HIT: P56377, EVALUE 2.00e-21; EST_HUMAN HIT: AW971616.1, EVALUE 3.00e-20
MQFMLLFSRQGKLRLQKWYVPLSDKEKKKITRELVQTVLARKPKMCS

SEQ ID NO: 43284 - protein, 38 aa, Homo sapiens
  MAP TO AC004106.1; EXPRESSED IN ADULT LIVER, SIGNAL = 0.82; EXPRESSED IN PLACENTA, SIGNAL = 1.2; EXPRESSED IN FETAL LIVER, SIGNAL =   1; EXPRESSED IN BRAIN, SIGNAL = 0.83; EXPRESSED IN LUNG, SIGNAL = 1.2; EXPRESSED IN BONE MARROW, SIGNAL = 1.2; EST_HUMAN HIT: AW971608.1, EVALUE 6.00e-17
CSLCCFLVVRESFDCKNGMSHYQTKRRKRSQENLFRPF

SEQ ID NO: 43285 - protein, 77 aa, Homo sapiens
  MAP TO AC005217.1; EXPRESSED IN BONE MARROW, SIGNAL = 0.73; EXPRESSED IN ADULT LIVER, SIGNAL = 0.56; EXPRESSED IN PLACENTA, SIGNAL = 0.78; EXPRESSED IN BRAIN, SIGNAL = 0.74; EXPRESSED IN LUNG, SIGNAL = 0.64; EST_HUMAN HIT: AI250742.1, EVALUE 3.60e-01; SWISSPROT HIT: P52429, EVALUE 3.00e+00
DYEGMAGSKISSWWSQGLWGRFVALLEILKVFLIAEKGPLETEERKRMLKHQSPRSFGVGGGERRSPSTREEMALLG

SEQ ID NO: 43286 - protein, 91 aa, Homo sapiens
  MAP TO AC005079.1; EXPRESSED IN PLACENTA, SIGNAL = 1.1; EXPRESSED IN LUNG, SIGNAL = 1.1; EXPRESSED IN FETAL LIVER, SIGNAL = 0.98; EXPRESSED IN BRAIN, SIGNAL =   1; EXPRESSED IN BONE MARROW, SIGNAL = 1.2; EXPRESSED IN ADULT LIVER, SIGNAL = 1.1; EST_HUMAN HIT: AI056338.1, EVALUE 2.00e-10; SWISSPROT HIT: P54673, EVALUE 9.60e-01
WDFTSQSHSMSWGVVLDEYLLNNDASNLQVQAPSIVSTAMWSNFDAQNLFKSNQIDTTHLGNKPSQRATTSWGSRHSSPSNHTSTLTSRFV

SEQ ID NO: 43287 - protein, 60 aa, Homo sapiens
  MAP TO AC005014.1; EXPRESSED IN LUNG, SIGNAL = 1.2; EXPRESSED IN BRAIN, SIGNAL = 1.1; EXPRESSED IN PLACENTA, SIGNAL = 0.92; EXPRESSED IN BONE MARROW, SIGNAL = 0.86; EXPRESSED IN ADULT LIVER, SIGNAL = 1.1; EXPRESSED IN FETAL LIVER, SIGNAL = 0.78; EST_HUMAN HIT: BF673718.1, EVALUE 8.00e-15
GKLDVNSNCVNEEQPEAEVGISQKDSNPEDSGEGKKESLESEAELEGLQDAPAGPQVSEE

SEQ ID NO: 43288 - protein, 41 aa, Homo sapiens
  MAP TO AC005587.1; EXPRESSED IN PLACENTA, SIGNAL = 0.95; EXPRESSED IN BRAIN, SIGNAL = 1.3; EXPRESSED IN BONE MARROW, SIGNAL = 0.57; EXPRESSED IN ADULT LIVER, SIGNAL = 3.8; EXPRESSED IN LUNG, SIGNAL =   1; EXPRESSED IN HELA, SIGNAL = 1.9; EXPRESSED IN FETAL LIVER, SIGNAL = 1.9; SWISSPROT HIT: P06802, EVALUE 7.00e-10; EST_HUMAN HIT: AU138961.1, EVALUE 9.00e-11
CRKPDQHFKPYLTPDLPKRLHYAKNVRIDKVHLFVDQQWLA

SEQ ID NO: 43289 - protein, 67 aa, Homo sapiens
  MAP TO AC004921.1; EXPRESSED IN PLACENTA, SIGNAL = 1.3; EXPRESSED IN LUNG, SIGNAL = 1.5; EXPRESSED IN FETAL LIVER, SIGNAL = 1.1; EXPRESSED IN BRAIN, SIGNAL = 1.1; EXPRESSED IN ADULT LIVER, SIGNAL = 1.2; EXPRESSED IN BONE MARROW, SIGNAL = 1.3; SWISSPROT HIT: P35911, EVALUE 7.70e+00; EST_HUMAN HIT: BE397904.1, EVALUE 4.30e+00
TECVFRRTHIPLPSCLLHLGEVSALQQINTGLKLSNPVTKRRKENHLHLKHQIARPVLPKLRCAQES

SEQ ID NO: 43290 - protein, 28 aa, Homo sapiens
  MAP TO AC005385.2; EXPRESSED IN BRAIN, SIGNAL = 1.2; EXPRESSED IN PLACENTA, SIGNAL = 0.9; EXPRESSED IN LUNG, SIGNAL = 1.1; EXPRESSED IN BONE MARROW, SIGNAL = 0.95; EXPRESSED IN ADULT LIVER, SIGNAL = 1.1; EXPRESSED IN FETAL LIVER, SIGNAL = 0.84; EST_HUMAN HIT: AW337808.1, EVALUE 3.00e-08
LGVKIAKAVACHNFVKAKKEVENSQAAR

SEQ ID NO: 43291 - protein, 73 aa, Homo sapiens
  MAP TO AC003035.1; EXPRESSED IN LUNG, SIGNAL = 0.89; EXPRESSED IN FETAL LIVER, SIGNAL =   1; EXPRESSED IN BRAIN, SIGNAL = 0.97; EXPRESSED IN BONE MARROW, SIGNAL = 0.86; EXPRESSED IN PLACENTA, SIGNAL = 0.84; EXPRESSED IN ADULT LIVER, SIGNAL = 0.8; SWISSPROT HIT: P41417, EVALUE 1.50e+00; EST_HUMAN HIT: BE222250.1, EVALUE 1.00e-36
RQQQLDAERLDSYVNADHDLYCNTRRSVEAPTERPGERRQAEMKRLYGDSAAKIQAMEAAVQLSFDKHCDRKQ

SEQ ID NO: 43292 - protein, 47 aa, Homo sapiens
  MAP TO AC004127.1; EXPRESSED IN ADULT LIVER, SIGNAL = 1.4; EXPRESSED IN BRAIN, SIGNAL = 1.3; EXPRESSED IN BONE MARROW, SIGNAL = 1.1; EXPRESSED IN PLACENTA, SIGNAL = 1.1; EXPRESSED IN LUNG, SIGNAL = 1.1; EXPRESSED IN FETAL LIVER, SIGNAL = 1.2; EST_HUMAN HIT: BE777997.1, EVALUE 2.00e-19; SWISSPROT HIT: P30362, EVALUE 1.00e-10
CGSVLNTNGEVEMDASIMDGKDLSAGAVSAVQCIANPIKLARLVMEK

SEQ ID NO: 43293 - protein, 37 aa, Homo sapiens
  MAP TO AC004129.1; EXPRESSED IN BRAIN, SIGNAL = 0.69; EXPRESSED IN ADULT LIVER, SIGNAL = 1.1; EXPRESSED IN PLACENTA, SIGNAL = 0.69; EXPRESSED IN LUNG, SIGNAL = 0.72; EXPRESSED IN FETAL LIVER, SIGNAL = 0.88; EXPRESSED IN BONE MARROW, SIGNAL = 0.84
EGLEEPQGVSDQLNTESSVCQEDPFDPEAIANCCFFL

SEQ ID NO: 43294 - protein, 127 aa, Homo sapiens
  MAP TO AC005070.1; EXPRESSED IN PLACENTA, SIGNAL = 1.2; EXPRESSED IN LUNG, SIGNAL = 1.2; EXPRESSED IN FETAL LIVER, SIGNAL = 1.1; EXPRESSED IN BONE MARROW, SIGNAL = 1.2; EXPRESSED IN ADULT LIVER, SIGNAL = 1.2; EXPRESSED IN BRAIN, SIGNAL =   1; EST_HUMAN HIT: BF438240.1, EVALUE 1.00e-69; SWISSPROT HIT: P33244, EVALUE 1.60e-01
TMLTLGPFRNSNLTELGLQEIKTIGYTSPRSRTEVNRQCPGEKEPVSDLQLGLDAVEPTALHKTLETPAHDRAEPNSQLDSTHSGRGTMYSSWVKSPDRTGVNFSVNSNLRDLTPSHQLEVGGGFRI

SEQ ID NO: 43295 - protein, 61 aa, Homo sapiens
  MAP TO AC004417.1; EXPRESSED IN PLACENTA, SIGNAL = 0.61; EXPRESSED IN BRAIN, SIGNAL = 0.56; EXPRESSED IN BONE MARROW, SIGNAL = 0.73; EXPRESSED IN LUNG, SIGNAL =   9; EXPRESSED IN ADULT LIVER, SIGNAL = 0.79; SWISSPROT HIT: P11533, EVALUE 7.80e+00; EST_HUMAN HIT: BF673245.1, EVALUE 2.00e+00
NTYVPGTVPQDKDIAATNADPVTAFKVPSVQQQRQMNIKQVIVRNYKKRSERQSSGCPGSM

SEQ ID NO: 43296 - protein, 19 aa, Homo sapiens
  MAP TO AC005696.1; EXPRESSED IN PLACENTA, SIGNAL = 0.96; EXPRESSED IN BONE MARROW, SIGNAL = 0.88; EXPRESSED IN ADULT LIVER, SIGNAL = 0.76; EXPRESSED IN LUNG, SIGNAL = 0.82; EXPRESSED IN FETAL LIVER, SIGNAL = 0.95; EXPRESSED IN BRAIN, SIGNAL = 0.68; EST_HUMAN HIT: BE867909.1, EVALUE 3.00e-03
IFVQMAMKRHIQFLKRKLN

SEQ ID NO: 43297 - protein, 57 aa, Homo sapiens
  MAP TO AC005213.1; EXPRESSED IN LUNG, SIGNAL = 0.77; EXPRESSED IN BRAIN, SIGNAL = 0.62; EXPRESSED IN BONE MARROW, SIGNAL = 0.54; EXPRESSED IN ADULT LIVER, SIGNAL = 0.44; SWISSPROT HIT: P41756, EVALUE 6.00e+00; EST_HUMAN HIT: T39129.1, EVALUE 1.00e-18
EEQETSGDFGSGGSVVLLDDLEYERELGPKDKEGKLRVHTRAVTEDDEDEDDDKEDE

SEQ ID NO: 43298 - protein, 66 aa, Homo sapiens
  MAP TO AC005661.1; EXPRESSED IN LUNG, SIGNAL = 0.71; EXPRESSED IN BRAIN, SIGNAL = 0.81; EXPRESSED IN BONE MARROW, SIGNAL = 0.5; EXPRESSED IN PLACENTA, SIGNAL = 0.67; EXPRESSED IN ADULT LIVER, SIGNAL = 0.84; SWISSPROT HIT: Q10146, EVALUE 3.00e-01; EST_HUMAN HIT: AU137282.1, EVALUE 3.00e-33
PPSSIGCRKKYIDGEKQAEPVVVLDPVSTHEPQTKDQVAEKDPTQHKEDEGEIQPENKEDSIENVR

SEQ ID NO: 43299 - protein, 72 aa, Homo sapiens
  MAP TO AC004891.1; EXPRESSED IN LUNG, SIGNAL = 0.81; EXPRESSED IN PLACENTA, SIGNAL = 0.79; EXPRESSED IN FETAL LIVER, SIGNAL = 0.75; EXPRESSED IN BRAIN, SIGNAL = 1.8; EXPRESSED IN BONE MARROW, SIGNAL = 0.82; EXPRESSED IN ADULT LIVER, SIGNAL = 0.77; SWISSPROT HIT: Q05793, EVALUE 4.00e-04; EST_HUMAN HIT: AW898086.1, EVALUE 1.00e-39
GAGGQQGFLGCIRSLRMNGVTLDLEERAKVTSGFISGCSGHCTSYGTNCENGGKCLERYHGYSCDCSNTAYD

SEQ ID NO: 43300 - protein, 28 aa, Homo sapiens
  MAP TO AC004891.1; EXPRESSED IN LUNG, SIGNAL = 0.81; EXPRESSED IN PLACENTA, SIGNAL = 0.79; EXPRESSED IN FETAL LIVER, SIGNAL = 0.75; EXPRESSED IN BRAIN, SIGNAL = 1.8; EXPRESSED IN BONE MARROW, SIGNAL = 0.82; EXPRESSED IN ADULT LIVER, SIGNAL = 0.77
PSVIPRWCWGPAGLPGLHPLLEDEWGDT

SEQ ID NO: 43301 - protein, 59 aa, Homo sapiens
  MAP TO AC005191.1; EXPRESSED IN PLACENTA, SIGNAL = 1.2; EXPRESSED IN LUNG, SIGNAL = 1.1; EXPRESSED IN FETAL LIVER, SIGNAL = 1.1; EXPRESSED IN BONE MARROW, SIGNAL = 1.2; EXPRESSED IN ADULT LIVER, SIGNAL = 1.1; EXPRESSED IN BRAIN, SIGNAL = 1.3; EST_HUMAN HIT: BE169013.1, EVALUE 6.00e-15; SWISSPROT HIT: Q9UL62, EVALUE 1.00e-29
LGPLQISLGRMLLDILKFLFIYCLVLLAFANGLNQLYFYYETRAIDEPNNCKGIRCEKQ

SEQ ID NO: 43302 - protein, 45 aa, Homo sapiens
  MAP TO AC004990.1; EXPRESSED IN PLACENTA, SIGNAL = 0.71; EXPRESSED IN HELA, SIGNAL =  58; EXPRESSED IN BRAIN, SIGNAL = 0.55; EXPRESSED IN BONE MARROW, SIGNAL = 0.57; EXPRESSED IN LUNG, SIGNAL = 0.56; EXPRESSED IN ADULT LIVER, SIGNAL = 0.64; EST_HUMAN HIT: AA215791.1, EVALUE 1.00e-20
NVSDEVSSEEGPETGYSLRRHVDRTSEGVLRNRKSHHYKKHYPNE

SEQ ID NO: 43303 - protein, 20 aa, Homo sapiens
  MAP TO AC005606.1; EXPRESSED IN LUNG, SIGNAL =   1; EXPRESSED IN FETAL LIVER, SIGNAL = 1.1; EXPRESSED IN BRAIN, SIGNAL = 1.3; EXPRESSED IN PLACENTA, SIGNAL =   1; EXPRESSED IN BONE MARROW, SIGNAL = 1.6; EXPRESSED IN ADULT LIVER, SIGNAL = 1.2
PPVPPEVFRPSARTPGLPAP

SEQ ID NO: 43304 - protein, 121 aa, Homo sapiens
  MAP TO AC004126.1; EXPRESSED IN BRAIN, SIGNAL = 0.58; EXPRESSED IN ADULT LIVER, SIGNAL = 0.56; EST_HUMAN HIT: BE904955.1, EVALUE 3.00e-32
DYLAQGLKLSPGQVQTFLLWGAGALVVYWLLSLLLGLVLALLGRILWGLKLVIFLAGFVALMRSVPDPSTRALLLLALLILYALLSRLTGSRASGAQLEAKVRGLERQVEELRWRQRRAAK

SEQ ID NO: 43305 - protein, 38 aa, Homo sapiens
  MAP TO AC004896.1; EXPRESSED IN PLACENTA, SIGNAL =   1; EXPRESSED IN LUNG, SIGNAL = 0.88; EXPRESSED IN FETAL LIVER, SIGNAL = 0.96; EXPRESSED IN BONE MARROW, SIGNAL = 1.2; EXPRESSED IN ADULT LIVER, SIGNAL = 0.9; EXPRESSED IN BRAIN, SIGNAL = 0.95
PGNIEGTAGQPDAKREASKPLQATDIYRNYGIASIIHT

SEQ ID NO: 43306 - protein, 45 aa, Homo sapiens
  MAP TO AC002364.1; EXPRESSED IN LUNG, SIGNAL = 0.48; EXPRESSED IN BONE MARROW, SIGNAL = 0.64; EXPRESSED IN BRAIN, SIGNAL = 0.62; EXPRESSED IN ADULT LIVER, SIGNAL = 0.42; EST_HUMAN HIT: U46304.1, EVALUE 4.00e-18; SWISSPROT HIT: P24785, EVALUE 4.80e+00
KALEFQVPLVFNEVFRIPVHSSALTLKSLQLYVCSVTPQLQEELL

SEQ ID NO: 43307 - protein, 23 aa, Homo sapiens
  MAP TO AC002364.1; EXPRESSED IN LUNG, SIGNAL = 0.48; EXPRESSED IN BONE MARROW, SIGNAL = 0.64; EXPRESSED IN BRAIN, SIGNAL = 0.62; EXPRESSED IN ADULT LIVER, SIGNAL = 0.42; EST_HUMAN HIT: AW501547.1, EVALUE 2.00e-08
RLWSSKCRWCLTKCSESPCIPAR

SEQ ID NO: 43308 - protein, 55 aa, Homo sapiens
  MAP TO AC006410.1; EXPRESSED IN PLACENTA, SIGNAL = 0.74; EXPRESSED IN LUNG, SIGNAL = 0.91; EXPRESSED IN BONE MARROW, SIGNAL = 0.98; EXPRESSED IN ADULT LIVER, SIGNAL = 0.97; EXPRESSED IN FETAL LIVER, SIGNAL = 0.95; EXPRESSED IN BRAIN, SIGNAL = 0.94
FLSSPSISITVTIIITITVTIIITITVTITNTLKVFTLPGLLHINSPSPHHSAMK

SEQ ID NO: 43309 - protein, 63 aa, Homo sapiens
  MAP TO AC004108.1; EXPRESSED IN FETAL LIVER, SIGNAL = 0.71; EXPRESSED IN ADULT LIVER, SIGNAL = 0.61; EXPRESSED IN PLACENTA, SIGNAL = 0.75; EXPRESSED IN LUNG, SIGNAL = 0.73; EXPRESSED IN BRAIN, SIGNAL = 0.65; EXPRESSED IN BONE MARROW, SIGNAL = 0.78; SWISSPROT HIT: P32595, EVALUE 6.80e-01; EST_HUMAN HIT: BF675106.1, EVALUE 8.90e-01
EESNGQITKQTCNTTPKDKIRIVLEPKQTGCRDAINRLKYGGIRAPTIPHALKTWQREGNWLK

SEQ ID NO: 43310 - protein, 20 aa, Homo sapiens
  MAP TO AC003669.1; EXPRESSED IN PLACENTA, SIGNAL = 0.97; EXPRESSED IN LUNG, SIGNAL = 0.81; EXPRESSED IN BONE MARROW, SIGNAL = 0.64; EXPRESSED IN FETAL LIVER, SIGNAL = 0.72; EXPRESSED IN BRAIN, SIGNAL = 0.57; EXPRESSED IN ADULT LIVER, SIGNAL = 0.68
GHTSDQCSGLKRNREFGDWQ

SEQ ID NO: 43311 - protein, 149 aa, Homo sapiens
  MAP TO AC006368.2; EXPRESSED IN BRAIN, SIGNAL = 0.63; EXPRESSED IN BONE MARROW, SIGNAL = 0.55; EXPRESSED IN ADULT LIVER, SIGNAL = 0.49; SWISSPROT HIT: P11369, EVALUE 4.00e-30; EST_HUMAN HIT: AU137226.1, EVALUE 1.00e-27
ALCDFGNHHHQNHTRPTRIENNGSVSLMKTEAKILNKILASGIHQCIKRIVKCDQAGFIPCIPGLQGWFNIHKSINVLQHINKMKDKSHKIIFLDAEKPFDKKQHLFMIQTQQISHRRNVPPHNKVRIQKPTVNIIPHSEKMKPFSLKS

SEQ ID NO: 43312 - protein, 44 aa, Homo sapiens
  MAP TO AC005920.1; EXPRESSED IN LUNG, SIGNAL = 0.54; EXPRESSED IN BONE MARROW, SIGNAL = 0.6; EXPRESSED IN ADULT LIVER, SIGNAL = 0.59; EXPRESSED IN BRAIN, SIGNAL = 0.74; EST_HUMAN HIT: AU143722.1, EVALUE 8.00e-20; SWISSPROT HIT: P49840, EVALUE 8.20e+00
KERPISLGIFPLPAGDGLLTPDAQKGGETPGSEQWKFQELSQPR

SEQ ID NO: 43313 - protein, 44 aa, Homo sapiens
  MAP TO AC005389.1; EXPRESSED IN LUNG, SIGNAL = 0.71; EXPRESSED IN FETAL LIVER, SIGNAL = 0.7; EXPRESSED IN BRAIN, SIGNAL = 0.61; EXPRESSED IN BONE MARROW, SIGNAL = 0.71; EXPRESSED IN PLACENTA, SIGNAL = 0.76; EXPRESSED IN ADULT LIVER, SIGNAL = 0.62; EST_HUMAN HIT: BF081780.1, EVALUE 1.60e-01
QKSLYVPPRSSTHTWPRMIRSWKSSGISCNPRISGRSYRSCRPS

SEQ ID NO: 43314 - protein, 49 aa, Homo sapiens
  MAP TO AC005021.1; EXPRESSED IN PLACENTA, SIGNAL = 0.82; EXPRESSED IN ADULT LIVER, SIGNAL = 5.4; EXPRESSED IN LUNG, SIGNAL = 0.74; EXPRESSED IN FETAL LIVER, SIGNAL = 1.9; EXPRESSED IN BRAIN, SIGNAL = 0.76; EXPRESSED IN BONE MARROW, SIGNAL = 0.67; SWISSPROT HIT: Q15166, EVALUE 1.00e-24; EST_HUMAN HIT: AV648699.1, EVALUE 2.00e-23
GLKYPGMPNFAPDEPGKIFLMDLNEQNPRAQALEISGGFDKELFNPHGI

SEQ ID NO: 43315 - protein, 84 aa, Homo sapiens
  MAP TO AC004542.1; EXPRESSED IN LUNG, SIGNAL = 0.61; EXPRESSED IN BONE MARROW, SIGNAL = 0.57; EXPRESSED IN BRAIN, SIGNAL = 0.74; EXPRESSED IN ADULT LIVER, SIGNAL = 0.58; SWISSPROT HIT: P16258, EVALUE 3.00e-22; EST_HUMAN HIT: AI419969.1, EVALUE 7.00e-33
DSGDDDEATTPADKSELHHTLKNLSLKLDDLSTCNDLIAKHGAALQRSLTELDGLKIPSESGEKLKVVNERATLFRITSNAMIN

SEQ ID NO: 43316 - protein, 22 aa, Homo sapiens
  MAP TO AC004542.1; EXPRESSED IN LUNG, SIGNAL = 0.61; EXPRESSED IN BONE MARROW, SIGNAL = 0.57; EXPRESSED IN BRAIN, SIGNAL = 0.74; EXPRESSED IN ADULT LIVER, SIGNAL = 0.58; EST_HUMAN HIT: BE895014.1, EVALUE 2.00e-06
GYHPSRQERAAPHPEESFPEVR

SEQ ID NO: 43317 - protein, 72 aa, Homo sapiens
  MAP TO AC004983.2; EXPRESSED IN PLACENTA, SIGNAL = 0.75; EXPRESSED IN LUNG, SIGNAL = 0.67; EXPRESSED IN BONE MARROW, SIGNAL = 0.53; EXPRESSED IN ADULT LIVER, SIGNAL = 0.57; EXPRESSED IN BRAIN, SIGNAL = 0.86; EST_HUMAN HIT: AA323348.1, EVALUE 2.00e-21
VRVLRLREDLPEGEPHPPPRDPHEGEAAWVKRPWDRHKVTSRGRRTSRRDIARETALNQNYDATLGRGPISG

SEQ ID NO: 43318 - protein, 66 aa, Homo sapiens [sequence omitted]

SEQ ID NO: 43319 - protein, 102 aa, Homo sapiens
  MAP TO AC004148.1; EXPRESSED IN PLACENTA, SIGNAL = 0.7; EXPRESSED IN BONE MARROW, SIGNAL = 0.66; EXPRESSED IN ADULT LIVER, SIGNAL = 0.88; EXPRESSED IN LUNG, SIGNAL = 0.77; EXPRESSED IN FETAL LIVER, SIGNAL = 0.69; EXPRESSED IN BRAIN, SIGNAL = 0.78; EST_HUMAN HIT: BE256708.1, EVALUE 5.00e-56; SWISSPROT HIT: Q38953, EVALUE 2.00e-13
MSMPIASSRGDVESVRRCLAHSLFMSTAELQPDGTYATTDTHQPVAIHPSSVLFHCKPACVVYTELLYTNKCYMRDLCVIDAQWLYEAAPEYFRRKLRTARN

SEQ ID NO: 43320 - protein, 50 aa, Homo sapiens
  MAP TO AC005058.1; EXPRESSED IN BRAIN, SIGNAL = 0.89; EXPRESSED IN ADULT LIVER, SIGNAL = 2.1; EXPRESSED IN PLACENTA, SIGNAL = 0.69; EXPRESSED IN LUNG, SIGNAL = 0.79; EXPRESSED IN FETAL LIVER, SIGNAL = 0.96; EXPRESSED IN BONE MARROW, SIGNAL = 0.7; EST_HUMAN HIT: AI935616.1, EVALUE 7.00e-21; SWISSPROT HIT: P35890, EVALUE 2.70e+00
IIARVSIDNRTRALVQALRRTTDPKLCITRVEELTFHLLEFPEGKGVAVK

SEQ ID NO: 43321 - protein, 44 aa, Homo sapiens
  MAP TO AC005774.1; EXPRESSED IN PLACENTA, SIGNAL = 0.66; EXPRESSED IN LUNG, SIGNAL = 0.65; EXPRESSED IN BRAIN, SIGNAL = 0.76; EXPRESSED IN ADULT LIVER, SIGNAL = 0.63; EXPRESSED IN BONE MARROW, SIGNAL = 0.59; EST_HUMAN HIT: AA169808.1, EVALUE 3.00e-03
KRVPIQTLREDSWILCKKRIRGQSTVQSKRKLIKKVKWGKYSYS

SEQ ID NO: 43322 - protein, 44 aa, Homo sapiens
  MAP TO AC006211.1; EXPRESSED IN LUNG, SIGNAL = 0.58; EXPRESSED IN BRAIN, SIGNAL = 0.66; EXPRESSED IN BONE MARROW, SIGNAL = 0.49; EXPRESSED IN ADULT LIVER, SIGNAL = 0.56; SWISSPROT HIT: O14718, EVALUE 3.70e+00; EST_HUMAN HIT: H99079.1, EVALUE 4.00e-04
YELTFDLFQEDVRNVLLNAFPSSHENTAVFNQAEHLLHYNYLLG

SEQ ID NO: 43323 - protein, 38 aa, Homo sapiens
  MAP TO AC006410.1; EXPRESSED IN PLACENTA, SIGNAL = 0.74; EXPRESSED IN LUNG, SIGNAL = 0.91; EXPRESSED IN BONE MARROW, SIGNAL = 0.98; EXPRESSED IN ADULT LIVER, SIGNAL = 0.97; EXPRESSED IN FETAL LIVER, SIGNAL = 0.95; EXPRESSED IN BRAIN, SIGNAL = 0.94
MVMMMVTVMVMMMVTVIEMEGEERNCCSSGDQTGTQRK

SEQ ID NO: 43324 - protein, 74 aa, Homo sapiens
  MAP TO AL049836.2; EXPRESSED IN BRAIN, SIGNAL = 1.9; EXPRESSED IN ADULT LIVER, SIGNAL =   2; EXPRESSED IN PLACENTA, SIGNAL = 0.9; EXPRESSED IN BT474, SIGNAL = 0.77; EXPRESSED IN FETAL LIVER, SIGNAL = 0.64; EXPRESSED IN BONE MARROW, SIGNAL = 0.8; EXPRESSED IN LUNG, SIGNAL = 0.59; SWISSPROT HIT: Q92777, EVALUE 5.70e-01; EST_HUMAN HIT: BF690007.1, EVALUE 2.70e-01
SRDPSWPRKREGFQPQGRVWAALLPPGCLFTPCTDVSTESRREGAQHTDGGSKVESKRFTNAQPRPLLISNGNI

SEQ ID NO: 43325 - protein, 91 aa, Homo sapiens
  MAP TO AL049835.3; EXPRESSED IN BONE MARROW, SIGNAL = 1.5; EXPRESSED IN BRAIN, SIGNAL = 1.5; EXPRESSED IN HELA, SIGNAL = 0.69; EXPRESSED IN ADULT LIVER, SIGNAL = 0.88; EXPRESSED IN HBL100, SIGNAL = 2.5; SWISSPROT HIT: Q03555, EVALUE 8.00e-24
ECFQFILPALPHAIDLLRDAIVKVKEVHDELEDLPSPPPPLSPPPTTSPHKQTEDKGVQCEEEEEEKKDSGVASTEDSSSSHITAAAIAAK

SEQ ID NO: 43326 - protein, 74 aa, Homo sapiens
  MAP TO AC007462.2; EXPRESSED IN FETAL LIVER, SIGNAL = 1.3; EXPRESSED IN BONE MARROW, SIGNAL = 0.72; EXPRESSED IN HELA, SIGNAL = 1.5; EXPRESSED IN BRAIN, SIGNAL = 1.6; EXPRESSED IN PLACENTA, SIGNAL = 1.3; EXPRESSED IN LUNG, SIGNAL = 1.3; EST_HUMAN HIT: BE873583.1, EVALUE 4.00e-02; SWISSPROT HIT: Q9ZCB1, EVALUE 7.60e+00
PFLSTRCVLPTLLLVRVRFWTWMMSCTWGGCQKIKLALSSPPRCGLLCSTMATWAASGICSSMAKAKISGKWLK

SEQ ID NO: 43327 - protein, 33 aa, Homo sapiens
  MAP TO AL022318.2; EXPRESSED IN BRAIN, SIGNAL = 1.5; EXPRESSED IN LUNG, SIGNAL = 1.3; EXPRESSED IN BONE MARROW, SIGNAL =   2; EXPRESSED IN ADULT LIVER, SIGNAL = 1.6; EST_HUMAN HIT: BE878489.1, EVALUE 4.40e+00; SWISSPROT HIT: Q9Z136, EVALUE 8.50e+00
TPVFSPAPWSPAFQIPVAHREQSVASSTSPLSL

SEQ ID NO: 43328 - protein, 61 aa, Homo sapiens
  MAP TO AL034406.1; EXPRESSED IN BRAIN, SIGNAL = 1.4; EST_HUMAN HIT: AF074614.1, EVALUE 1.00e-07; SWISSPROT HIT: Q59170, EVALUE 6.90e-01
VAPSSLLHSVTPHQQSRGPGNLPKCMAHHCHYQHPNKLPGGPRTGPSGLINTGAYVSCSGD

SEQ ID NO: 43329 - protein, 52 aa, Homo sapiens
  MAP TO AC005392.1; EXPRESSED IN PLACENTA, SIGNAL = 0.91; EXPRESSED IN BRAIN, SIGNAL = 0.9; EXPRESSED IN BONE MARROW, SIGNAL = 0.94; EXPRESSED IN ADULT LIVER, SIGNAL = 0.77; EXPRESSED IN LUNG, SIGNAL = 0.99; EXPRESSED IN FETAL LIVER, SIGNAL = 0.8; EST_HUMAN HIT: AW363244.1, EVALUE 4.00e-11; SWISSPROT HIT: P13688, EVALUE 2.00e-11
MGSNPSAEYSWLLNGNNQQTGQELFIPQVTTENSGDYLCYVHNPVTNGKNFA

SEQ ID NO: 43330 - protein, 51 aa, Homo sapiens
  MAP TO AC003685.1; EXPRESSED IN PLACENTA, SIGNAL = 0.76; EXPRESSED IN LUNG, SIGNAL = 0.9; EXPRESSED IN BRAIN, SIGNAL = 0.81; EXPRESSED IN BONE MARROW, SIGNAL = 0.72; EXPRESSED IN FETAL LIVER, SIGNAL = 0.81; EXPRESSED IN ADULT LIVER, SIGNAL = 0.78; EST_HUMAN HIT: AW444496.1, EVALUE 1.00e-10; SWISSPROT HIT: P38911, EVALUE 1.20e+00
LKMVCLLHFNAGKDPVRDECEERNPFTETREEDVTDEHGEREPFAEKDEHT

SEQ ID NO: 43331 - protein, 89 aa, Homo sapiens
  MAP TO AC003688.1; EXPRESSED IN PLACENTA, SIGNAL = 0.88; EXPRESSED IN BONE MARROW, SIGNAL = 0.92; EXPRESSED IN ADULT LIVER, SIGNAL = 0.83; EXPRESSED IN LUNG, SIGNAL = 0.8; EXPRESSED IN FETAL LIVER, SIGNAL = 0.82; EXPRESSED IN BRAIN, SIGNAL = 0.87; SWISSPROT HIT: O55188, EVALUE 2.40e+00; EST_HUMAN HIT: BE278202.1, EVALUE 3.00e-19
DTDSEEEEEEEEEEEEEEMATVVGGEAPVPVLPTPPEAPRPPATVHPEGVPPADSESKEVGSTETSQDGDASSSEGEMRVMDEDIMVES

SEQ ID NO: 43332 - protein, 75 aa, Homo sapiens
  MAP TO AC003950.1; EXPRESSED IN PLACENTA, SIGNAL = 1.3; EXPRESSED IN LUNG, SIGNAL = 1.1; EXPRESSED IN BONE MARROW, SIGNAL =   1; EXPRESSED IN ADULT LIVER, SIGNAL = 0.72; EXPRESSED IN FETAL LIVER, SIGNAL = 0.8; EXPRESSED IN BRAIN, SIGNAL = 1.2; EST_HUMAN HIT: BE250614.1, EVALUE 3.00e+00; SWISSPROT HIT: P12534, EVALUE 1.50e+00
MLAAPEISKVISFSLSWDMGHCGRQAVPASQSLETCEVMSVLRRCKGASAKTFCSSAMRLEAADLKASVVLLVCV

SEQ ID NO: 43333 - protein, 34 aa, Homo sapiens
  MAP TO AC003957.1; EXPRESSED IN PLACENTA, SIGNAL = 1.3; EXPRESSED IN BRAIN, SIGNAL = 1.3; EXPRESSED IN BONE MARROW, SIGNAL = 1.4; EXPRESSED IN ADULT LIVER, SIGNAL = 1.3; EXPRESSED IN LUNG, SIGNAL = 1.4; EXPRESSED IN FETAL LIVER, SIGNAL = 1.2; EST_HUMAN HIT: H85189.1, EVALUE 8.00e-12; SWISSPROT HIT: P09330, EVALUE 3.00e-06
VVVTNTIPHEVQKLQCPKIKTVDISMILSEAIRR

SEQ ID NO: 43334 - protein, 25 aa, Homo sapiens
  MAP TO AC003957.1; EXPRESSED IN PLACENTA, SIGNAL = 1.3; EXPRESSED IN BRAIN, SIGNAL = 1.3; EXPRESSED IN BONE MARROW, SIGNAL = 1.4; EXPRESSED IN ADULT LIVER, SIGNAL = 1.3; EXPRESSED IN LUNG, SIGNAL = 1.4; EXPRESSED IN FETAL LIVER, SIGNAL = 1.2; EST_HUMAN HIT: BE502744.1, EVALUE 2.00e-08
WWSPIQFHMKSRSSSAPRLKLWISA

SEQ ID NO: 43335 - protein, 66 aa, Homo sapiens
  MAP TO AC006515.7; EXPRESSED IN ADULT LIVER, SIGNAL = 0.89; EXPRESSED IN PLACENTA, SIGNAL = 0.93; EXPRESSED IN LUNG, SIGNAL = 0.76; EXPRESSED IN FETAL LIVER, SIGNAL = 1.1; EXPRESSED IN BRAIN, SIGNAL =   1; EXPRESSED IN BONE MARROW, SIGNAL = 0.91
EMLSHAQIQGKHHFSNLSDDSPGPTGPEIVRVMMGVGMRKRRRIKWKESVWPWESCLIFPKQLRPQ

SEQ ID NO: 43336 - protein, 26 aa, Homo sapiens
  MAP TO AC002449.1; EXPRESSED IN PLACENTA, SIGNAL = 0.94; EXPRESSED IN LUNG, SIGNAL = 1.1; EXPRESSED IN BRAIN, SIGNAL = 0.93; EXPRESSED IN BONE MARROW, SIGNAL =   1; EXPRESSED IN ADULT LIVER, SIGNAL = 1.1; EXPRESSED IN FETAL LIVER, SIGNAL = 1.1
GQEARSGEGLFLVGTLQSSKAVQGIK

SEQ ID NO: 43337 - protein, 26 aa, Homo sapiens
  MAP TO AC002449.1; EXPRESSED IN PLACENTA, SIGNAL = 0.94; EXPRESSED IN LUNG, SIGNAL = 1.1; EXPRESSED IN BRAIN, SIGNAL = 0.93; EXPRESSED IN BONE MARROW, SIGNAL =   1; EXPRESSED IN ADULT LIVER, SIGNAL = 1.1; EXPRESSED IN FETAL LIVER, SIGNAL = 1.1; EST_HUMAN HIT: AI681519.1, EVALUE 2.10e+00
VKKPDLVRAFFWWGLCRAPRRCKASN

SEQ ID NO: 43338 - protein, 44 aa, Homo sapiens
  MAP TO AC005367.1; EXPRESSED IN ADULT LIVER, SIGNAL = 1.1; EXPRESSED IN PLACENTA, SIGNAL = 0.96; EXPRESSED IN LUNG, SIGNAL = 0.98; EXPRESSED IN BRAIN, SIGNAL = 0.99; EXPRESSED IN FETAL LIVER, SIGNAL = 0.83; EXPRESSED IN BONE MARROW, SIGNAL = 0.91
HDFLGLSCVLEEEGVGKLEEGGGPEKECGQLGVGSLAHHELELR

SEQ ID NO: 43339 - protein, 50 aa, Homo sapiens
  MAP TO AC005161.1; EXPRESSED IN LUNG, SIGNAL = 0.85; EXPRESSED IN BRAIN, SIGNAL = 0.83; EXPRESSED IN BONE MARROW, SIGNAL = 0.76; EXPRESSED IN PLACENTA, SIGNAL =   1; EXPRESSED IN FETAL LIVER, SIGNAL = 0.69; EXPRESSED IN ADULT LIVER, SIGNAL = 0.76; SWISSPROT HIT: P54218, EVALUE 2.70e+00
RQFGCTYQNLTASKFRILFSKNNCKTHKSMCMRMILRAYSQKCKHNVSVQ

SEQ ID NO: 43340 - protein, 64 aa, Homo sapiens
  MAP TO AC004600.2; EXPRESSED IN PLACENTA, SIGNAL = 1.2; EXPRESSED IN FETAL LIVER, SIGNAL = 0.97; EXPRESSED IN BRAIN, SIGNAL = 0.96; EXPRESSED IN BONE MARROW, SIGNAL = 0.7; EXPRESSED IN ADULT LIVER, SIGNAL = 1.1; EXPRESSED IN LUNG, SIGNAL = 0.94; SWISSPROT HIT: O18696, EVALUE 5.90e+00
LRAVEMKPARMSFVLPVQLFFVWIIMQQLLKPSSFIRLMQNSVILIPPRKEQAQLTLRTRKVPP

SEQ ID NO: 43341 - protein, 48 aa, Homo sapiens
  MAP TO AC005385.2; EXPRESSED IN PLACENTA, SIGNAL = 1.1; EXPRESSED IN ADULT LIVER, SIGNAL = 1.2; EXPRESSED IN LUNG, SIGNAL =   1; EXPRESSED IN HELA, SIGNAL = 1.8; EXPRESSED IN FETAL LIVER, SIGNAL = 0.74; EXPRESSED IN BRAIN, SIGNAL = 0.76; EXPRESSED IN BONE MARROW, SIGNAL = 0.84
PPLKAPVNQPSPWLLSTALSSLYVFVSPVFLGPLLPPPVAVPGDSTMD

SEQ ID NO: 43342 - protein, 49 aa, Homo sapiens
  MAP TO AC005385.2; EXPRESSED IN PLACENTA, SIGNAL = 1.1; EXPRESSED IN ADULT LIVER, SIGNAL = 1.2; EXPRESSED IN LUNG, SIGNAL =   1; EXPRESSED IN HELA, SIGNAL = 1.8; EXPRESSED IN FETAL LIVER, SIGNAL = 0.74; EXPRESSED IN BRAIN, SIGNAL = 0.76; EXPRESSED IN BONE MARROW, SIGNAL = 0.84; SWISSPROT HIT: Q51508, EVALUE 2.70e+00
STIKSPGEPALSMAAVHCSLLFICVCVSCLPGTPAASACRCSGGLYNGL

SEQ ID NO: 43343 - protein, 29 aa, Homo sapiens
  MAP TO AC002463.1; EXPRESSED IN PLACENTA, SIGNAL = 0.59; EXPRESSED IN BRAIN, SIGNAL = 0.94; EXPRESSED IN BONE MARROW, SIGNAL = 0.88; EXPRESSED IN ADULT LIVER, SIGNAL = 0.93; EXPRESSED IN LUNG, SIGNAL = 0.7; EXPRESSED IN FETAL LIVER, SIGNAL =   1
VAWLEAVDEAVQAQPAAGRGLGGAARGPG

SEQ ID NO: 43344 - protein, 27 aa, Homo sapiens
  MAP TO AC002463.1; EXPRESSED IN PLACENTA, SIGNAL = 0.59; EXPRESSED IN BRAIN, SIGNAL = 0.94; EXPRESSED IN BONE MARROW, SIGNAL = 0.88; EXPRESSED IN ADULT LIVER, SIGNAL = 0.93; EXPRESSED IN LUNG, SIGNAL = 0.7; EXPRESSED IN FETAL LIVER, SIGNAL =   1
GTASCRARPRRRCSWPWSVSALTPGLR

SEQ ID NO: 43345 - protein, 62 aa, Homo sapiens
  MAP TO AC004054.1; EXPRESSED IN LUNG, SIGNAL = 1.9; EXPRESSED IN PLACENTA, SIGNAL = 1.7; EXPRESSED IN FETAL LIVER, SIGNAL = 1.3; EXPRESSED IN BRAIN, SIGNAL = 0.8; EXPRESSED IN BONE MARROW, SIGNAL = 1.7; EXPRESSED IN ADULT LIVER, SIGNAL = 0.87; EST_HUMAN HIT: R67840.1, EVALUE 5.00e-08
LQPYSQYQTALLNITVWKCWTQCILADSIFETSHGHQWTGSYTWMGAASSVHEEKDAQDMRW

SEQ ID NO: 43346 - protein, 54 aa, Homo sapiens
  MAP TO AC007567.1; EXPRESSED IN PLACENTA, SIGNAL = 1.6; EXPRESSED IN BRAIN, SIGNAL = 1.4; EXPRESSED IN BONE MARROW, SIGNAL = 1.5; EXPRESSED IN LUNG, SIGNAL = 1.5; EXPRESSED IN FETAL LIVER, SIGNAL = 1.6; EXPRESSED IN HELA, SIGNAL = 1.2; SWISSPROT HIT: Q92598, EVALUE 4.60e+00
PKDSIKSPALNQTENQIELQKTEISLDESNVLCTLHKEKPPLCTLDIDVNSLTQ

SEQ ID NO: 43347 - protein, 37 aa, Homo sapiens
  MAP TO Z98884.11; EXPRESSED IN HELA, SIGNAL = 1.7; EXPRESSED IN BRAIN, SIGNAL = 1.5; EST_HUMAN HIT: AI650919.1, EVALUE 5.00e-13
KARSGSSGKREIAVVFRVIQELLGSLIGNSDQKEGRG

SEQ ID NO: 43348 - protein, 54 aa, Homo sapiens
  MAP TO AP000352.2; EXPRESSED IN LUNG, SIGNAL = 1.4; EXPRESSED IN BONE MARROW, SIGNAL = 1.5; EXPRESSED IN ADULT LIVER, SIGNAL = 1.8; EXPRESSED IN FETAL LIVER, SIGNAL = 1.8; EXPRESSED IN BRAIN, SIGNAL = 1.5; EXPRESSED IN PLACENTA, SIGNAL = 1.3; EXPRESSED IN HELA, SIGNAL = 1.5; SWISSPROT HIT: Q9Y6J0, EVALUE 4.00e-26
VRVLQKELAASTSEDTHPYKEELETALEQCFYCLYSFPSKKSKARYLEEHSAQQ

SEQ ID NO: 43349 - protein, 51 aa, Homo sapiens
  MAP TO AP000352.2; EXPRESSED IN LUNG, SIGNAL = 1.4; EXPRESSED IN BONE MARROW, SIGNAL = 1.5; EXPRESSED IN ADULT LIVER, SIGNAL = 1.8; EXPRESSED IN FETAL LIVER, SIGNAL = 1.8; EXPRESSED IN BRAIN, SIGNAL = 1.5; EXPRESSED IN PLACENTA, SIGNAL = 1.3; EXPRESSED IN HELA, SIGNAL = 1.5; EST_HUMAN HIT: AW816275.1, EVALUE 2.00e-18
SRRNWLHPPLKTRTLTRRSWRQPWSSASTACTASPARRVRPGTWRNTRPSR

SEQ ID NO: 43350 - protein, 27 aa, Homo sapiens
  MAP TO AC004615.1; EXPRESSED IN LUNG, SIGNAL = 0.97; EXPRESSED IN FETAL LIVER, SIGNAL = 0.86; EXPRESSED IN PLACENTA, SIGNAL = 0.82; EXPRESSED IN BRAIN, SIGNAL =   1; EXPRESSED IN BONE MARROW, SIGNAL = 0.87; EXPRESSED IN ADULT LIVER, SIGNAL = 0.84; SWISSPROT HIT: Q13591, EVALUE 4.00e-10
IRVLLVGGDRLFTCGTNAFTPVCTNRS

SEQ ID NO: 43351 - protein, 27 aa, Homo sapiens
  MAP TO AC004615.1; EXPRESSED IN LUNG, SIGNAL = 0.97; EXPRESSED IN FETAL LIVER, SIGNAL = 0.86; EXPRESSED IN PLACENTA, SIGNAL = 0.82; EXPRESSED IN BRAIN, SIGNAL =   1; EXPRESSED IN BONE MARROW, SIGNAL = 0.87; EXPRESSED IN ADULT LIVER, SIGNAL = 0.84
HPGASGGWRPVIHLWDQCIHACLHQPL

SEQ ID NO: 43352 - protein, 66 aa, Homo sapiens
  MAP TO AC005410.1; EXPRESSED IN LUNG, SIGNAL = 0.95; EXPRESSED IN FETAL LIVER, SIGNAL = 0.76; EXPRESSED IN BRAIN, SIGNAL = 0.8; EXPRESSED IN PLACENTA, SIGNAL = 0.95; EXPRESSED IN BONE MARROW, SIGNAL = 0.89; EXPRESSED IN ADULT LIVER, SIGNAL = 0.9; SWISSPROT HIT: P48634, EVALUE 3.90e-01
ETKQRKGEDRDAQDRHREEDHRDYGYAATSQGRAAVPEAERKGGSSPRTFGRSMALPTPSDFWPLE

SEQ ID NO: 43353 - protein, 64 aa, Homo sapiens
  MAP TO AC005410.1; EXPRESSED IN LUNG, SIGNAL = 0.95; EXPRESSED IN FETAL LIVER, SIGNAL = 0.76; EXPRESSED IN BRAIN, SIGNAL = 0.8; EXPRESSED IN PLACENTA, SIGNAL = 0.95; EXPRESSED IN BONE MARROW, SIGNAL = 0.89; EXPRESSED IN ADULT LIVER, SIGNAL = 0.9; SWISSPROT HIT: P28691, EVALUE 5.20e-01
NNYPYRRPNKEKEKIEMHKTDTGKKTIEITVMLPQAKEEQQYQKLKERGDPPPEPSGEAWPCQH

SEQ ID NO: 43354 - protein, 34 aa, Homo sapiens
  MAP TO AC005030.1; EXPRESSED IN BONE MARROW, SIGNAL = 0.7; EXPRESSED IN PLACENTA, SIGNAL = 0.66; EXPRESSED IN LUNG, SIGNAL = 0.87; EXPRESSED IN FETAL LIVER, SIGNAL = 0.7; EXPRESSED IN ADULT LIVER, SIGNAL = 0.8; EXPRESSED IN BRAIN, SIGNAL = 0.67; SWISSPROT HIT: P54868, EVALUE 6.50e+00
PGSVKVGSFCYDSGIPMNTGRERVGQEHAPGNLC

SEQ ID NO: 43355 - protein, 39 aa, Homo sapiens
  MAP TO AC004626.1; EXPRESSED IN LUNG, SIGNAL = 0.54; EXPRESSED IN BRAIN, SIGNAL = 0.57; EXPRESSED IN BONE MARROW, SIGNAL = 2.1; EXPRESSED IN PLACENTA, SIGNAL = 0.59; EXPRESSED IN ADULT LIVER, SIGNAL = 0.4; EST_HUMAN HIT: BF365143.1, EVALUE 9.00e-15
LLFILKTMTLITLFSIRSRMGFLMLGSSGSHETRYACSK

SEQ ID NO: 43356 - protein, 33 aa, Homo sapiens
  MAP TO AC002532.1; EXPRESSED IN ADULT LIVER, SIGNAL = 0.75; EXPRESSED IN PLACENTA, SIGNAL = 0.64; EXPRESSED IN LUNG, SIGNAL = 0.66; EXPRESSED IN BRAIN, SIGNAL = 0.82; EXPRESSED IN BONE MARROW, SIGNAL = 0.71
CHETVGRRVLFSDCCSQKAQGNQISARCVEGQD

SEQ ID NO: 43357 - protein, 99 aa, Homo sapiens
  MAP TO AC006501.5; EXPRESSED IN ADULT LIVER, SIGNAL = 0.68; EXPRESSED IN LUNG, SIGNAL = 0.73; EXPRESSED IN BRAIN, SIGNAL = 0.81; EXPRESSED IN BONE MARROW, SIGNAL = 0.63; EXPRESSED IN PLACENTA, SIGNAL = 0.72; SWISSPROT HIT: O14727, EVALUE 2.00e-10
KNMVKLIHTLADHGDDVNCCAFSFSLLATCSLDKTIRLYSLRDFTELPHSPLKFHTYAVHCCCFSPSGHILASCSTDGTTVLWNTENGQMLAVMEQPSG

SEQ ID NO: 43358 - protein, 87 aa, Homo sapiens
  MAP TO AC005613.1; EXPRESSED IN LUNG, SIGNAL = 0.88; EXPRESSED IN FETAL LIVER, SIGNAL = 0.76; EXPRESSED IN BONE MARROW, SIGNAL = 0.87; EXPRESSED IN PLACENTA, SIGNAL = 0.81; EXPRESSED IN BRAIN, SIGNAL = 0.99; EXPRESSED IN ADULT LIVER, SIGNAL = 0.86; SWISSPROT HIT: O75570, EVALUE 8.00e+00
VLPNLILYLDFHVFLHVHQGPVIKLPNTAVQVYKLSSACQLIKFMCVPFKYMINEYNKYKTHYWKQVIIGTFIFADFLLFLILIWVR

SEQ ID NO: 43359 - protein, 56 aa, Homo sapiens
  MAP TO AC005881.2; EXPRESSED IN PLACENTA, SIGNAL = 0.68; EXPRESSED IN FETAL LIVER, SIGNAL = 0.76; EXPRESSED IN BONE MARROW, SIGNAL = 0.84; EXPRESSED IN LUNG, SIGNAL = 0.85; EXPRESSED IN BRAIN, SIGNAL = 0.65; EXPRESSED IN ADULT LIVER, SIGNAL = 0.76; SWISSPROT HIT: P10978, EVALUE 2.10e+00
SEMGILTSTALLHRIVRQVTSDVLLQEMVFFILGEQREPETLAEISRHPLRHRLIE

SEQ ID NO: 43360 - protein, 40 aa, Homo sapiens [sequence omitted]

SEQ ID NO: 43361 - protein, 50 aa, Homo sapiens
  MAP TO AC004944.1; EXPRESSED IN BONE MARROW, SIGNAL =   1; EXPRESSED IN PLACENTA, SIGNAL = 1.2; EXPRESSED IN LUNG, SIGNAL = 1.2; EXPRESSED IN FETAL LIVER, SIGNAL = 1.1; EXPRESSED IN ADULT LIVER, SIGNAL = 1.2; EXPRESSED IN BRAIN, SIGNAL = 0.97; EST_HUMAN HIT: AA400293.1, EVALUE 1.00e-06
KQPQADPAGGVVEEGIIIMGDDGSMCVMAREDLPVGLDVEMEESDIGDPD

SEQ ID NO: 43362 - protein, 52 aa, Homo sapiens
  MAP TO AC006518.17; EXPRESSED IN BONE MARROW, SIGNAL = 0.65; EXPRESSED IN ADULT LIVER, SIGNAL = 1.4; EXPRESSED IN PLACENTA, SIGNAL = 6.3; EXPRESSED IN LUNG, SIGNAL = 0.74; EXPRESSED IN BRAIN, SIGNAL = 1.1; SWISSPROT HIT: P02810, EVALUE 6.10e+00
PPGDSGNQDDGPQQRPPKPGGHHRHPPPPPFQNQQRPPRRGHRQLSLPRFPS

SEQ ID NO: 43363 - protein, 52 aa, Homo sapiens
  MAP TO AC005038.1; EXPRESSED IN LUNG, SIGNAL = 1.4; EXPRESSED IN BRAIN, SIGNAL = 1.3; EXPRESSED IN BONE MARROW, SIGNAL = 1.4; EXPRESSED IN PLACENTA, SIGNAL = 1.5; EXPRESSED IN FETAL LIVER, SIGNAL = 1.6; EXPRESSED IN ADULT LIVER, SIGNAL = 1.2; SWISSPROT HIT: P48067, EVALUE 5.00e-27
NGAVPSEATKRDQNLKRGNWGNQIEFVLTSVGYAVGLGNVWRFPYLCYRNGG

SEQ ID NO: 43364 - protein, 19 aa, Homo sapiens
  MAP TO AC005038.1; EXPRESSED IN LUNG, SIGNAL = 1.4; EXPRESSED IN BRAIN, SIGNAL = 1.3; EXPRESSED IN BONE MARROW, SIGNAL = 1.4; EXPRESSED IN PLACENTA, SIGNAL = 1.5; EXPRESSED IN FETAL LIVER, SIGNAL = 1.6; EXPRESSED IN ADULT LIVER, SIGNAL = 1.2
PRGTRTSNGATGATRSSLY

SEQ ID NO: 43365 - protein, 89 aa, Homo sapiens [sequence omitted]

SEQ ID NO: 43366 - protein, 46 aa, Homo sapiens
  MAP TO AC004835.2; EXPRESSED IN BONE MARROW, SIGNAL =   1; EXPRESSED IN ADULT LIVER, SIGNAL = 1.2; EXPRESSED IN PLACENTA, SIGNAL = 1.2; EXPRESSED IN FETAL LIVER, SIGNAL = 1.1; EXPRESSED IN BRAIN, SIGNAL = 1.1; EXPRESSED IN LUNG, SIGNAL = 1.2; SWISSPROT HIT: Q02040, EVALUE 5.00e-06
WSEDNMTVTVVYDNSEATELCAAQHLYLKPIAKLLINILLPGSLEP

SEQ ID NO: 43367 - protein, 29 aa, Homo sapiens
  MAP TO AC004656.1; EXPRESSED IN LUNG, SIGNAL = 0.73; EXPRESSED IN ADULT LIVER, SIGNAL = 0.64; EXPRESSED IN PLACENTA, SIGNAL = 0.88; EXPRESSED IN BRAIN, SIGNAL = 0.74; EXPRESSED IN BONE MARROW, SIGNAL = 0.77; SWISSPROT HIT: Q15120, EVALUE 5.00e-12
LLFGGDTNPVHPKHIGSIDPTCNVADVVK

SEQ ID NO: 43368 - protein, 81 aa, Homo sapiens
  MAP TO AC004707.1; EXPRESSED IN PLACENTA, SIGNAL = 0.78; EXPRESSED IN LUNG, SIGNAL = 0.82; EXPRESSED IN FETAL LIVER, SIGNAL = 0.84; EXPRESSED IN BRAIN, SIGNAL = 0.97; EXPRESSED IN BONE MARROW, SIGNAL = 0.73; EXPRESSED IN ADULT LIVER, SIGNAL = 0.88; EST_HUMAN HIT: BE905703.1, EVALUE 5.00e-20
SKSGSRPRKPPPRKHTRSWAVLKLLLLLLLFGVAGGLVACRVTELQQQPLCTSVNTIYDNAVQGLRRHEILQWVLQTDSQQ

SEQ ID NO: 43369 - protein, 57 aa, Homo sapiens
  MAP TO AC005562.1; EXPRESSED IN PLACENTA, SIGNAL = 0.78; EXPRESSED IN BRAIN, SIGNAL = 0.73; EXPRESSED IN BONE MARROW, SIGNAL = 0.77; EXPRESSED IN ADULT LIVER, SIGNAL = 0.69; EXPRESSED IN LUNG, SIGNAL = 0.69; SWISSPROT HIT: Q04695, EVALUE 1.00e-27
MQNLNDRLASYLDKMRALEEANTELEVKIRDWYQRQAPGPARDYSQYYRTIEELQNK

SEQ ID NO: 43370 - protein, 71 aa, Homo sapiens
  MAP TO AC005562.1; EXPRESSED IN PLACENTA, SIGNAL = 0.78; EXPRESSED IN BRAIN, SIGNAL = 0.73; EXPRESSED IN BONE MARROW, SIGNAL = 0.77; EXPRESSED IN ADULT LIVER, SIGNAL = 0.69; EXPRESSED IN LUNG, SIGNAL = 0.69; SWISSPROT HIT: O44248, EVALUE 1.70e+00
DLLVAWAVPSGVAAIPAATALALAVAMAAALGALMGCWPEVRRPPCRTSMTAWPPTWTRCAPWRRPTLSWR

SEQ ID NO: 43371 - protein, 57 aa, Homo sapiens
  MAP TO AC004841.2; EXPRESSED IN ADULT LIVER, SIGNAL = 0.84; EXPRESSED IN BRAIN, SIGNAL = 0.72; EXPRESSED IN BONE MARROW, SIGNAL = 0.86; EXPRESSED IN PLACENTA, SIGNAL = 0.81; EXPRESSED IN LUNG, SIGNAL = 0.74; EXPRESSED IN FETAL LIVER, SIGNAL = 0.8; EST_HUMAN HIT: H02110.1, EVALUE 2.10e-02
QGKRCQQNNNNNNNNNKTKQNFTLKELLKILHNIVIARMKCWKLIQIWQGVWQFAKA

SEQ ID NO: 43372 - protein, 41 aa, Homo sapiens
  MAP TO AC005157.1; EXPRESSED IN LUNG, SIGNAL =   1; EXPRESSED IN ADULT LIVER, SIGNAL = 0.93; EXPRESSED IN PLACENTA, SIGNAL = 0.93; EXPRESSED IN FETAL LIVER, SIGNAL = 1.1; EXPRESSED IN BRAIN, SIGNAL =   1; EXPRESSED IN BONE MARROW, SIGNAL =   1; SWISSPROT HIT: P32482, EVALUE 2.80e+00
EMLASLIMELIVGQAQKWKKLEESLVEGGAAWAQLLLPAKE

SEQ ID NO: 43373 - protein, 39 aa, Homo sapiens
  MAP TO AC005157.1; EXPRESSED IN LUNG, SIGNAL =   1; EXPRESSED IN ADULT LIVER, SIGNAL = 0.93; EXPRESSED IN PLACENTA, SIGNAL = 0.93; EXPRESSED IN FETAL LIVER, SIGNAL = 1.1; EXPRESSED IN BRAIN, SIGNAL =   1; EXPRESSED IN BONE MARROW, SIGNAL =   1; SWISSPROT HIT: Q03692, EVALUE 2.20e+00
MYPGGDAGISHHGANCRTGPEMEEAGRESSGRWGSVGPA

SEQ ID NO: 43374 - protein, 35 aa, Homo sapiens
  MAP TO AC005899.1; EXPRESSED IN PLACENTA, SIGNAL = 0.97; EXPRESSED IN ADULT LIVER, SIGNAL = 1.1; EXPRESSED IN LUNG, SIGNAL = 0.96; EXPRESSED IN FETAL LIVER, SIGNAL = 0.99; EXPRESSED IN BRAIN, SIGNAL = 0.7; EXPRESSED IN BONE MARROW, SIGNAL = 0.92; EST_HUMAN HIT: BF679053.1, EVALUE 8.00e-12
YVRPFLNSISKAKAARLVRSLLDLFLDMEAATGQE

SEQ ID NO: 43375 - protein, 27 aa, Homo sapiens
  MAP TO AC004664.1; EXPRESSED IN PLACENTA, SIGNAL = 0.61; EXPRESSED IN LUNG, SIGNAL = 0.71; EXPRESSED IN FETAL LIVER, SIGNAL = 0.77; EXPRESSED IN BONE MARROW, SIGNAL = 0.8; EXPRESSED IN ADULT LIVER, SIGNAL = 0.65; EXPRESSED IN BRAIN, SIGNAL = 0.58
QLGPHGSAFLETKNLDWAASDSVRQEQ

SEQ ID NO: 43376 - protein, 29 aa, Homo sapiens
  MAP TO AL031587.3; EXPRESSED IN BRAIN, SIGNAL = 1.4; SWISSPROT HIT: P14893, EVALUE 5.00e+00
WLLCWAFSLESKTWLKVSLTWWLAHSGCS

SEQ ID NO: 43377 - protein, 22 aa, Homo sapiens
  MAP TO AC004664.1; EXPRESSED IN PLACENTA, SIGNAL = 0.61; EXPRESSED IN LUNG, SIGNAL = 0.71; EXPRESSED IN FETAL LIVER, SIGNAL = 0.77; EXPRESSED IN BONE MARROW, SIGNAL = 0.8; EXPRESSED IN ADULT LIVER, SIGNAL = 0.65; EXPRESSED IN BRAIN, SIGNAL = 0.58; EST_HUMAN HIT: BF668615.1, EVALUE 8.20e+00
SWVPMALLSWRPRTWTGLPQTV

SEQ ID NO: 43378 - protein, 76 aa, Homo sapiens
  MAP TO AC003093.1; EXPRESSED IN PLACENTA, SIGNAL = 0.7; EXPRESSED IN LUNG, SIGNAL = 0.77; EXPRESSED IN BRAIN, SIGNAL = 0.66; EXPRESSED IN BONE MARROW, SIGNAL = 0.78; EXPRESSED IN ADULT LIVER, SIGNAL = 0.6; EST_HUMAN HIT: BF569626.1, EVALUE 7.00e-27
TTPMSPEALSHSHPFFFFRTINLRNPVLQQVLEGRNEVLCVLTQKITTMQKCVISEHMQVEEKCGGIVGIQTKTVQ

SEQ ID NO: 43379 - protein, 43 aa, Homo sapiens
  MAP TO AC004738.1; EXPRESSED IN BONE MARROW, SIGNAL = 0.76; EXPRESSED IN ADULT LIVER, SIGNAL = 0.92; EXPRESSED IN PLACENTA, SIGNAL =   1; EXPRESSED IN FETAL LIVER, SIGNAL = 0.88; EXPRESSED IN BRAIN, SIGNAL = 0.77; EXPRESSED IN LUNG, SIGNAL = 0.88; EST_HUMAN HIT: AA297724.1, EVALUE 7.00e+00
SIYMSEEKVPHNNRKRSQNELSSGAGSWDACSYSKGLTLRRHS

SEQ ID NO: 43380 - protein, 44 aa, Homo sapiens
  MAP TO AC004648.1; EXPRESSED IN PLACENTA, SIGNAL = 1.1; EXPRESSED IN LUNG, SIGNAL = 1.1; EXPRESSED IN FETAL LIVER, SIGNAL = 1.1; EXPRESSED IN BRAIN, SIGNAL = 1.1; EXPRESSED IN BONE MARROW, SIGNAL = 1.1; EXPRESSED IN ADULT LIVER, SIGNAL = 1.3; SWISSPROT HIT: P13026, EVALUE 8.20e+00
AAVKELTAVYSIAFDIASNSFWVSAVHVCLGNIRNSYVSPIWKT

SEQ ID NO: 43381 - protein, 82 aa, Homo sapiens
  MAP TO AC006239.5; EXPRESSED IN PLACENTA, SIGNAL = 0.8; EXPRESSED IN LUNG, SIGNAL =   1; EXPRESSED IN FETAL LIVER, SIGNAL = 1.2; EXPRESSED IN BRAIN, SIGNAL =   1; EXPRESSED IN BONE MARROW, SIGNAL = 1.2; EXPRESSED IN ADULT LIVER, SIGNAL =   1; SWISSPROT HIT: Q58851, EVALUE 2.40e+00
SDGSNSSRRVGDWKNIIGSIFRAVEVIKRKDNLYAKYKFQPLKLKDLNVNPGSTIDHTADLEYTQSLQTSLFTPLNQVKPIY

SEQ ID NO: 43382 - protein, 42 aa, Homo sapiens
  MAP TO AC005586.1; EXPRESSED IN PLACENTA, SIGNAL = 1.4; EXPRESSED IN BONE MARROW, SIGNAL = 1.1; EXPRESSED IN FETAL LIVER, SIGNAL = 1.1; EXPRESSED IN LUNG, SIGNAL = 1.2; EXPRESSED IN BRAIN, SIGNAL = 1.2; EXPRESSED IN ADULT LIVER, SIGNAL = 1.2; SWISSPROT HIT: O88942, EVALUE 4.80e+00
MTFWRSAVFWTLSGHQPTVIPSHSPLRTATGNPNAFKNWLRQ

SEQ ID NO: 43383 - protein, 171 aa, Homo sapiens
  MAP TO AC005552.1; EXPRESSED IN PLACENTA, SIGNAL = 1.9; EXPRESSED IN BRAIN, SIGNAL = 1.8; EXPRESSED IN BONE MARROW, SIGNAL = 2.1; EXPRESSED IN HELA, SIGNAL = 2.1; EXPRESSED IN LUNG, SIGNAL = 2.1; EST_HUMAN HIT: AA641005.1, EVALUE 9.50e-01
LSRWLELCGPGPGWKLTQPWAEAMAVISPRTVPSSLSSSSAPSASCHQMNFLLSNWSWRNGASIQLLRLETLIKGQQVNLLPFSMQAGWGHLLIPPLHQPVALPGEQQMRSLEALGGQGREKAGSRALPLVTNSLLAQLCLCPSGYPAQGTQPLPEIPGNLGSKRLQRYQI

SEQ ID NO: 43384 - protein, 53 aa, Homo sapiens
  MAP TO AC003101.1; EXPRESSED IN PLACENTA, SIGNAL = 1.6; EXPRESSED IN LUNG, SIGNAL = 1.6; EXPRESSED IN FETAL LIVER, SIGNAL = 1.4; EXPRESSED IN BRAIN, SIGNAL = 1.4; EXPRESSED IN ADULT LIVER, SIGNAL = 1.6; EXPRESSED IN HELA, SIGNAL = 2.3; EXPRESSED IN BONE MARROW, SIGNAL = 1.4; SWISSPROT HIT: P19598, EVALUE 8.00e+00
LIEDLRKELEHLQMYKLDCERPGRGRSASSGLGEFNARAREVELEHEVKRLKQ

SEQ ID NO: 43385 - protein, 64 aa, Homo sapiens
  MAP TO AC003101.1; EXPRESSED IN PLACENTA, SIGNAL = 1.6; EXPRESSED IN LUNG, SIGNAL = 1.6; EXPRESSED IN FETAL LIVER, SIGNAL = 1.4; EXPRESSED IN BRAIN, SIGNAL = 1.4; EXPRESSED IN ADULT LIVER, SIGNAL = 1.6; EXPRESSED IN HELA, SIGNAL = 2.3; EXPRESSED IN BONE MARROW, SIGNAL = 1.4; EST_HUMAN HIT: BF035674.1, EVALUE 5.00e-12
EGAGAPADVQAGLRAARQGPQCLLWPRRVQCQGPRGGARARGQAAQAGGSSSLCVQWGRVAGPT

SEQ ID NO: 43386 - protein, 25 aa, Homo sapiens
  MAP TO AC005384.1; EXPRESSED IN PLACENTA, SIGNAL = 1.4; EXPRESSED IN LUNG, SIGNAL = 1.4; EXPRESSED IN FETAL LIVER, SIGNAL = 1.2; EXPRESSED IN BRAIN, SIGNAL = 1.5; EXPRESSED IN BONE MARROW, SIGNAL = 0.96; EXPRESSED IN ADULT LIVER, SIGNAL = 1.4; EST_HUMAN HIT: BE070218.1, EVALUE 2.70e+00
SEAPFASGSDCQAGALLPPGDIWQC

SEQ ID NO: 43387 - protein, 26 aa, Homo sapiens
  MAP TO AC006539.1; EXPRESSED IN BONE MARROW, SIGNAL = 1.1; EXPRESSED IN FETAL LIVER, SIGNAL = 0.92; EXPRESSED IN ADULT LIVER, SIGNAL = 0.82; EXPRESSED IN PLACENTA, SIGNAL = 0.78; EXPRESSED IN LUNG, SIGNAL = 0.79; EXPRESSED IN BRAIN, SIGNAL = 1.2; EST_HUMAN HIT: N50109.1, EVALUE 4.00e-05
KRAWLLNKLNKWVNWPWVYDLYGVGQ

SEQ ID NO: 43388 - protein, 64 aa, Homo sapiens
  MAP TO AC005283.1; EXPRESSED IN LUNG, SIGNAL = 0.91; EXPRESSED IN PLACENTA, SIGNAL = 1.3; EXPRESSED IN FETAL LIVER, SIGNAL = 0.9; EXPRESSED IN BRAIN, SIGNAL = 0.91; EXPRESSED IN BONE MARROW, SIGNAL =   1; EXPRESSED IN ADULT LIVER, SIGNAL = 0.88; SWISSPROT HIT: Q62786, EVALUE 1.20e+00
TKLQVSKSKRTLTLVENKPIQLNCSVKSQTSQNSHFAVLWYVHKPSDANGKLILKTTHNSAFEY

SEQ ID NO: 43389 - protein, 42 aa, Homo sapiens
  MAP TO AC005283.1; EXPRESSED IN LUNG, SIGNAL = 0.91; EXPRESSED IN PLACENTA, SIGNAL = 1.3; EXPRESSED IN FETAL LIVER, SIGNAL = 0.9; EXPRESSED IN BRAIN, SIGNAL = 0.91; EXPRESSED IN BONE MARROW, SIGNAL =   1; EXPRESSED IN ADULT LIVER, SIGNAL = 0.88; EST_HUMAN HIT: AI659351.1, EVALUE 3.00e-10
SRGQRQRQLLLPRGVVAAEPQLRLVQAGRGGFWAHRSHCETA

SEQ ID NO: 43390 - protein, 88 aa, Homo sapiens
  MAP TO AC006385.3; EXPRESSED IN LUNG, SIGNAL = 0.85; EXPRESSED IN FETAL LIVER, SIGNAL = 0.83; EXPRESSED IN PLACENTA, SIGNAL = 0.9; EXPRESSED IN BRAIN, SIGNAL = 0.98; EXPRESSED IN BONE MARROW, SIGNAL = 0.77; EXPRESSED IN ADULT LIVER, SIGNAL = 0.84; SWISSPROT HIT: P41820, EVALUE 8.90e+00
SQISTITVATFNTTLASFNVGYADFFNEHMRKLCNQVPIPEMPHEPLACANLPRSLTDSCINYSYLEDTEHIDGTNNFVHKNGMLDLS

SEQ ID NO: 43391 - protein, 20 aa, Homo sapiens
  MAP TO AC006385.3; EXPRESSED IN LUNG, SIGNAL = 0.85; EXPRESSED IN FETAL LIVER, SIGNAL = 0.83; EXPRESSED IN PLACENTA, SIGNAL = 0.9; EXPRESSED IN BRAIN, SIGNAL = 0.98; EXPRESSED IN BONE MARROW, SIGNAL = 0.77; EXPRESSED IN ADULT LIVER, SIGNAL = 0.84
DLRSPPSQLRPSIPLWRHST

SEQ ID NO: 43392 - protein, 53 aa, Homo sapiens
  MAP TO AC005020.1; EXPRESSED IN BONE MARROW, SIGNAL = 0.75; EXPRESSED IN PLACENTA, SIGNAL = 0.68; EXPRESSED IN LUNG, SIGNAL = 0.98; EXPRESSED IN FETAL LIVER, SIGNAL = 0.72; EXPRESSED IN BRAIN, SIGNAL = 0.62; EXPRESSED IN ADULT LIVER, SIGNAL = 0.66; SWISSPROT HIT: Q9Y2L8, EVALUE 1.00e-20
KLVKIEEVADVAVSFILEEWGHLDQSQKSLYRDDRKENYGSITSMGKDYFICM

SEQ ID NO: 43393 - protein, 42 aa, Homo sapiens
  MAP TO AC003030.1; EXPRESSED IN BRAIN, SIGNAL = 1.1; EXPRESSED IN PLACENTA, SIGNAL = 0.85; EXPRESSED IN LUNG, SIGNAL = 0.79; EXPRESSED IN BONE MARROW, SIGNAL = 0.78; EXPRESSED IN ADULT LIVER, SIGNAL = 0.79; EXPRESSED IN FETAL LIVER, SIGNAL = 0.9; EST_HUMAN HIT: AU126919.1, EVALUE 2.00e-18
LNKACGNAMDAHEAAQMHQNFSQQLLQDHIEACSLPEHNLIT

SEQ ID NO: 43394 - protein, 65 aa, Homo sapiens
  MAP TO AC004925.1; EXPRESSED IN BRAIN, SIGNAL = 1.2; EXPRESSED IN BONE MARROW, SIGNAL = 1.2; EXPRESSED IN ADULT LIVER, SIGNAL = 1.1; EXPRESSED IN PLACENTA, SIGNAL =   1; EXPRESSED IN FETAL LIVER, SIGNAL = 1.1; EXPRESSED IN LUNG, SIGNAL = 1.4; SWISSPROT HIT: P51830, EVALUE 3.40e+00
GMQLPRATASQALAAFGAVLLSLAPSATFSVALVTLLDCLPCCSWILTAESTIREKFNLKTEAWM

SEQ ID NO: 43395 - protein, 80 aa, Homo sapiens
  MAP TO AC005023.1; EXPRESSED IN LUNG, SIGNAL = 0.87; EXPRESSED IN FETAL LIVER, SIGNAL = 0.9; EXPRESSED IN PLACENTA, SIGNAL = 0.77; EXPRESSED IN BRAIN, SIGNAL = 0.97; EXPRESSED IN BONE MARROW, SIGNAL = 0.89; EXPRESSED IN ADULT LIVER, SIGNAL = 0.71; SWISSPROT HIT: P34545, EVALUE 5.50e+00
MTATFSGAHTASNNCKISSLFFISFPSVVKSPLSLCIPPWARRVAKAYFESVHMFTFFPLANNSALVNAINSAFLAEVPE

SEQ ID NO: 43396 - protein, 36 aa, Homo sapiens
  MAP TO AC005521.1; EXPRESSED IN LUNG, SIGNAL = 0.77; EXPRESSED IN ADULT LIVER, SIGNAL = 0.66; EXPRESSED IN PLACENTA, SIGNAL = 0.59; EXPRESSED IN FETAL LIVER, SIGNAL = 0.85; EXPRESSED IN BRAIN, SIGNAL = 0.8; EXPRESSED IN BONE MARROW, SIGNAL = 0.69; SWISSPROT HIT: P52794, EVALUE 8.40e+00
SSAHLGIDIWLQKPQGKRHNASHPQFSYLGGKRERR

SEQ ID NO: 43397 - protein, 75 aa, Homo sapiens
  MAP TO AC006427.13; EXPRESSED IN BRAIN, SIGNAL = 1.4; EXPRESSED IN PLACENTA, SIGNAL = 1.6; EXPRESSED IN LUNG, SIGNAL = 1.4; EXPRESSED IN BONE MARROW, SIGNAL = 1.3; EXPRESSED IN ADULT LIVER, SIGNAL = 2.6; EXPRESSED IN FETAL LIVER, SIGNAL = 2.8; SWISSPROT HIT: O60503, EVALUE 8.60e-01
TVDTRRSPGREEKTRMRNPSSLLVPRGYSGSASRPAAKETACPCFPSLGSGWEIGKGASLKIPKNGKGEGASKKV

SEQ ID NO: 43398 - protein, 24 aa, Homo sapiens
  MAP TO AL021707.2; EXPRESSED IN BRAIN, SIGNAL = 2.3; EXPRESSED IN HELA, SIGNAL = 1.4; EXPRESSED IN LUNG, SIGNAL = 1.9; EXPRESSED IN BONE MARROW, SIGNAL = 2.8
SPGGPGCIIKETLFFAECRLCKAR

SEQ ID NO: 43399 - protein, 26 aa, Homo sapiens
  MAP TO AL022238.1; EXPRESSED IN FETAL LIVER, SIGNAL = 1.7; EXPRESSED IN BRAIN, SIGNAL = 1.7; EXPRESSED IN PLACENTA, SIGNAL = 1.8; EXPRESSED IN HELA, SIGNAL = 1.2; EXPRESSED IN LUNG, SIGNAL = 1.4; EXPRESSED IN BONE MARROW, SIGNAL = 1.7; SWISSPROT HIT: P30566, EVALUE 3.00e-08
LARVISRLADFAKERASLPTLGFTHF

SEQ ID NO: 43400 - protein, 172 aa, Homo sapiens
  MAP TO AL022312.7; EXPRESSED IN PLACENTA, SIGNAL = 1.2; EXPRESSED IN BRAIN, SIGNAL = 1.9; EXPRESSED IN BONE MARROW, SIGNAL = 1.4; EXPRESSED IN LUNG, SIGNAL = 1.2; EXPRESSED IN FETAL LIVER, SIGNAL = 1.3; SWISSPROT HIT: P29324, EVALUE 2.40e+00
ENKILETVRNVMELSGEHETATYPGKRKSQLCLFCDSVKTHNLFIEMGNENMRKLEVLWFGSAEDITPSPPRLSPPAWIRFCVNTRPALHSRAHGRLPLQWFPDLSAIFAGGVFLGHCGYLKAMSKQTLLSLPENPWQELPFSPSLSFVSSCPFLPAAASSLNPTELLPGRG

SEQ ID NO: 43401 - protein, 97 aa, Homo sapiens
  MAP TO AC005291.1; EXPRESSED IN PLACENTA, SIGNAL = 0.79; EXPRESSED IN LUNG, SIGNAL = 0.91; EXPRESSED IN FETAL LIVER, SIGNAL = 0.86; EXPRESSED IN BONE MARROW, SIGNAL = 1.5; EXPRESSED IN ADULT LIVER, SIGNAL = 0.94; EXPRESSED IN BRAIN, SIGNAL = 0.81; SWISSPROT HIT: P13535, EVALUE 4.00e-49
ASLEHEEGKILRIQLELNQVKSEVDRKIAEKDEEIDQLKRNHTRVVETMQSTLDAEIRSRNDALRVKKKMEGDLNEMEIQLNHANRLAAESLRNYRN

SEQ ID NO: 43402 - protein, 25 aa, Homo sapiens
  MAP TO AC005355.1; EXPRESSED IN LUNG, SIGNAL = 0.92; EXPRESSED IN FETAL LIVER, SIGNAL = 0.73; EXPRESSED IN BRAIN, SIGNAL = 0.55; EXPRESSED IN BONE MARROW, SIGNAL = 0.74; EXPRESSED IN ADULT LIVER, SIGNAL = 0.76
SAAADALTSPSPRERRASFSVHLNI

SEQ ID NO: 43403 - protein, 25 aa, Homo sapiens
  MAP TO AC005355.1; EXPRESSED IN LUNG, SIGNAL = 0.92; EXPRESSED IN FETAL LIVER, SIGNAL = 0.73; EXPRESSED IN BRAIN, SIGNAL = 0.55; EXPRESSED IN BONE MARROW, SIGNAL = 0.74; EXPRESSED IN ADULT LIVER, SIGNAL = 0.76; EST_HUMAN HIT: BF688881.1, EVALUE 2.70e+00
SDIQVDRKRCSSFSWTWRCESISSC

SEQ ID NO: 43404 - protein, 50 aa, Homo sapiens
  MAP TO AC000097.1; EXPRESSED IN LUNG, SIGNAL = 0.74; EXPRESSED IN FETAL LIVER, SIGNAL = 0.83; EXPRESSED IN BRAIN, SIGNAL = 0.8; EXPRESSED IN BONE MARROW, SIGNAL = 0.89; EXPRESSED IN ADULT LIVER, SIGNAL = 0.67; EXPRESSED IN PLACENTA, SIGNAL = 0.87; SWISSPROT HIT: P54797, EVALUE 2.00e-20
TYGLSNALLETPWRKLCFGKQLFLEAVERSQALPKDVLIASLLDVLNNEE

SEQ ID NO: 43405 - protein, 43 aa, Homo sapiens
  MAP TO AC000097.1; EXPRESSED IN LUNG, SIGNAL = 0.74; EXPRESSED IN FETAL LIVER, SIGNAL = 0.83; EXPRESSED IN BRAIN, SIGNAL = 0.8; EXPRESSED IN BONE MARROW, SIGNAL = 0.89; EXPRESSED IN ADULT LIVER, SIGNAL = 0.67; EXPRESSED IN PLACENTA, SIGNAL = 0.87; SWISSPROT HIT: Q43845, EVALUE 9.50e-01
RLPGGSCALGSSSSWRLWNGARRCPRMCSSPASWMCSTMKRRE

SEQ ID NO: 43406 - protein, 36 aa, Homo sapiens
  MAP TO AC006254.10; EXPRESSED IN BRAIN, SIGNAL = 0.97; EXPRESSED IN ADULT LIVER, SIGNAL =  30; EXPRESSED IN PLACENTA, SIGNAL = 0.65; EXPRESSED IN LUNG, SIGNAL = 0.44; EXPRESSED IN BONE MARROW, SIGNAL = 0.56; EXPRESSED IN FETAL LIVER, SIGNAL = 8.1; SWISSPROT HIT: Q14624, EVALUE 6.00e-16
VTFKNPLVWVHASPEHVVVTRNRRSSAYKWKETLFS

SEQ ID NO: 43407 - protein, 57 aa, Homo sapiens
  MAP TO AC005666.1; EXPRESSED IN PLACENTA, SIGNAL = 0.8; EXPRESSED IN LUNG, SIGNAL = 0.68; EXPRESSED IN FETAL LIVER, SIGNAL = 0.96; EXPRESSED IN ADULT LIVER, SIGNAL = 0.63; EXPRESSED IN BRAIN, SIGNAL = 0.97; EXPRESSED IN BONE MARROW, SIGNAL = 0.81; SWISSPROT HIT: Q13615, EVALUE 8.00e-17
VKLVQHTYSCLYGTFLANNPCEREKRNIYKRTCSVWALLRAGNKNFHNFLYTPSSDM

SEQ ID NO: 43408 - protein, 45 aa, Homo sapiens
  MAP TO AC003667.1; EXPRESSED IN LUNG, SIGNAL = 0.76; EXPRESSED IN FETAL LIVER, SIGNAL = 0.97; EXPRESSED IN PLACENTA, SIGNAL = 0.92; EXPRESSED IN BRAIN, SIGNAL = 0.68; EXPRESSED IN BONE MARROW, SIGNAL = 0.93; EXPRESSED IN ADULT LIVER, SIGNAL = 0.86; EST_HUMAN HIT: AW962082.1, EVALUE 3.00e-09
NSSTISNKSGESRHTCSILRGKAFSFSPFSMMTAMGLSYMAFIML

SEQ ID NO: 43409 - protein, 68 aa, Homo sapiens
  MAP TO AC003667.1; EXPRESSED IN LUNG, SIGNAL = 0.76; EXPRESSED IN FETAL LIVER, SIGNAL = 0.97; EXPRESSED IN PLACENTA, SIGNAL = 0.92; EXPRESSED IN BRAIN, SIGNAL = 0.68; EXPRESSED IN BONE MARROW, SIGNAL = 0.93; EXPRESSED IN ADULT LIVER, SIGNAL = 0.86; SWISSPROT HIT: P08548, EVALUE 9.00e-19
IQHPFMTKTLNKLGIEGTYLNIMKAMYDKPMAVIILNGEKLKAFPLRMEQVCLLSPLLFDIVLEFLAR

SEQ ID NO: 43410 - protein, 77 aa, Homo sapiens
  MAP TO AC002080.1; EXPRESSED IN LUNG, SIGNAL = 0.74; EXPRESSED IN PLACENTA, SIGNAL = 0.66; EXPRESSED IN BRAIN, SIGNAL = 0.64; EXPRESSED IN BONE MARROW, SIGNAL = 0.68; EXPRESSED IN ADULT LIVER, SIGNAL = 0.54; EST_HUMAN HIT: AI691015.1, EVALUE 9.20e-01
VAAEHARKPLSSPSGWEAGCGTSGTVWEAVHGEAAEHHCVSFILDKHHRSKKREKKTGTKKRSPFLLQSPLIFTDKA

SEQ ID NO: 43411 - protein, 51 aa, Homo sapiens
  MAP TO AC006257.1; EXPRESSED IN LUNG, SIGNAL = 0.74; EXPRESSED IN FETAL LIVER, SIGNAL = 0.77; EXPRESSED IN PLACENTA, SIGNAL = 0.76; EXPRESSED IN BRAIN, SIGNAL = 0.85; EXPRESSED IN BONE MARROW, SIGNAL = 0.83; EXPRESSED IN ADULT LIVER, SIGNAL = 0.71; SWISSPROT HIT: P49643, EVALUE 1.00e-21
TKMEFSGRKWRKLRLAGDQRNASYPHCLQFYLQPPSENISLIEFENLAIDR

SEQ ID NO: 43412 - protein, 36 aa, Homo sapiens
  MAP TO AC005971.5; EXPRESSED IN PLACENTA, SIGNAL = 0.85; EXPRESSED IN LUNG, SIGNAL = 0.72; EXPRESSED IN FETAL LIVER, SIGNAL = 0.87; EXPRESSED IN BRAIN, SIGNAL = 0.66; EXPRESSED IN ADULT LIVER, SIGNAL = 1.1; EXPRESSED IN BONE MARROW, SIGNAL = 0.82
LLSQGWQRRKRWRKWMGRRKRWRKWMGRRERQAHLV

SEQ ID NO: 43413 - protein, 68 aa, Homo sapiens
  MAP TO AC005409.1; EXPRESSED IN PLACENTA, SIGNAL = 1.1; EXPRESSED IN LUNG, SIGNAL =   1; EXPRESSED IN FETAL LIVER, SIGNAL = 0.89; EXPRESSED IN BRAIN, SIGNAL = 0.68; EXPRESSED IN BONE MARROW, SIGNAL = 0.95; EXPRESSED IN ADULT LIVER, SIGNAL = 0.93; SWISSPROT HIT: P28976, EVALUE 3.00e-01
EKQLECLLTHCIKVPMLVLDPALPANITLKDLPSLYPSFHSASDIFNVAKPKNPSTNVSVVVFDSTKD

SEQ ID NO: 43414 - protein, 97 aa, Homo sapiens
  MAP TO AB016897.1; EXPRESSED IN BRAIN, SIGNAL = 1.9; SWISSPROT HIT: Q15569, EVALUE 6.50e-01
MASCQLCRQLQLAAASSPLMSTCGPHHSPHCPTSAPLLAGSAFGFQTPAGHFLQLLLTIMHLHPNTDPQPCPCCFKSPTVLRFPSLFVIYHWHIFRA

SEQ ID NO: 43415 - protein, 67 aa, Homo sapiens
  MAP TO AC005318.1; EXPRESSED IN PLACENTA, SIGNAL = 0.76; EXPRESSED IN LUNG, SIGNAL = 0.98; EXPRESSED IN FETAL LIVER, SIGNAL = 0.87; EXPRESSED IN BONE MARROW, SIGNAL = 0.66; EXPRESSED IN ADULT LIVER, SIGNAL =   1; EXPRESSED IN BRAIN, SIGNAL = 0.59; SWISSPROT HIT: P08910, EVALUE 5.00e-32
LTLLPTGCTWEFGAMVNYIKKTYPLTQLVVVGFSLGGNIVCKYLGETQANQEKVLCCVSVCQGYSAL

SEQ ID NO: 43416 - protein, 27 aa, Homo sapiens
  MAP TO AC004769.1; EXPRESSED IN BRAIN, SIGNAL = 0.94; EXPRESSED IN ADULT LIVER, SIGNAL = 0.87; EXPRESSED IN PLACENTA, SIGNAL = 1.4; EXPRESSED IN FETAL LIVER, SIGNAL = 0.8; EXPRESSED IN BONE MARROW, SIGNAL = 0.7; EXPRESSED IN LUNG, SIGNAL = 0.83
TVFNPRETVPHLKELILQGILCKNQNE

SEQ ID NO: 43417 - protein, 27 aa, Homo sapiens
  MAP TO AC004769.1; EXPRESSED IN BRAIN, SIGNAL = 0.94; EXPRESSED IN ADULT LIVER, SIGNAL = 0.87; EXPRESSED IN PLACENTA, SIGNAL = 1.4; EXPRESSED IN FETAL LIVER, SIGNAL = 0.8; EXPRESSED IN BONE MARROW, SIGNAL = 0.7; EXPRESSED IN LUNG, SIGNAL = 0.83; SWISSPROT HIT: P09592, EVALUE 8.60e+00
TQCLTPEKLSPTSRSLFCRVFCVRTRM

SEQ ID NO: 43418 - protein, 195 aa, Homo sapiens
  MAP TO AC006486.1; EXPRESSED IN LUNG, SIGNAL = 0.81; EXPRESSED IN PLACENTA, SIGNAL = 0.73; EXPRESSED IN FETAL LIVER, SIGNAL = 0.89; EXPRESSED IN BRAIN, SIGNAL = 0.78; EXPRESSED IN BONE MARROW, SIGNAL = 0.87; EXPRESSED IN ADULT LIVER, SIGNAL = 0.91; SWISSPROT HIT: P52409, EVALUE 5.40e-01
PVSQPFQQPEKPGRVRRRKTRRERNKALVGSRRPLAHHDPPVAIRDPPVVPTASKLVVITQGRLSREHRGLFNHEVKSLDVARLLSSGTLVPGSPTLPAKPSPSPGRAQEPAPRSRDKENQVPGGSGPGPPSSPELSGVGQLLAELQCQLSLPQAFPRRNLIQDARDAIVHTLQACHGCVPDLALVLRGCQPPLP

SEQ ID NO: 43419 - protein, 34 aa, Homo sapiens
  MAP TO AC006486.1; EXPRESSED IN LUNG, SIGNAL = 0.81; EXPRESSED IN PLACENTA, SIGNAL = 0.73; EXPRESSED IN FETAL LIVER, SIGNAL = 0.89; EXPRESSED IN BRAIN, SIGNAL = 0.78; EXPRESSED IN BONE MARROW, SIGNAL = 0.87; EXPRESSED IN ADULT LIVER, SIGNAL = 0.91; EST_HUMAN HIT: D61564.1, EVALUE 4.00e-13
QSPSLFSSLRNLVVSVVGRLGGNVTRPWWAAAGH

SEQ ID NO: 43420 - protein, 46 aa, Homo sapiens
  MAP TO AC004962.1; EXPRESSED IN PLACENTA, SIGNAL =   1; EXPRESSED IN LUNG, SIGNAL = 0.94; EXPRESSED IN BRAIN, SIGNAL = 1.1; EXPRESSED IN FETAL LIVER, SIGNAL = 1.1; EXPRESSED IN ADULT LIVER, SIGNAL = 0.95; EXPRESSED IN BONE MARROW, SIGNAL = 1.1; SWISSPROT HIT: P05458, EVALUE 4.80e+00
SKETCFSKKKLMKEVDTGWAKAQEATRLTQLPHFQYQAIMKEKRLK

SEQ ID NO: 43421 - protein, 26 aa, Homo sapiens
  MAP TO AC005922.1; EXPRESSED IN LUNG, SIGNAL =   1; EXPRESSED IN FETAL LIVER, SIGNAL = 0.69; EXPRESSED IN BRAIN, SIGNAL = 0.72; EXPRESSED IN PLACENTA, SIGNAL = 0.86; EXPRESSED IN BONE MARROW, SIGNAL = 0.73; EXPRESSED IN ADULT LIVER, SIGNAL = 0.69
HERGSANMGSSLQELSQKMENEKTDL

SEQ ID NO: 43422 - protein, 26 aa, Homo sapiens
  MAP TO AC005922.1; EXPRESSED IN LUNG, SIGNAL =   1; EXPRESSED IN FETAL LIVER, SIGNAL = 0.69; EXPRESSED IN BRAIN, SIGNAL = 0.72; EXPRESSED IN PLACENTA, SIGNAL = 0.86; EXPRESSED IN BONE MARROW, SIGNAL = 0.73; EXPRESSED IN ADULT LIVER, SIGNAL = 0.69; EST_HUMAN HIT: AV734393.1, EVALUE 8.00e-04
RMSVGQQTWALLCKNCLKKWRMKRQT

SEQ ID NO: 43423 - protein, 119 aa, Homo sapiens
  MAP TO AC003663.1; EXPRESSED IN ADULT LIVER, SIGNAL = 0.96; EXPRESSED IN PLACENTA, SIGNAL = 0.97; EXPRESSED IN LUNG, SIGNAL = 1.1; EXPRESSED IN BRAIN, SIGNAL = 0.8; EXPRESSED IN FETAL LIVER, SIGNAL = 0.95; EXPRESSED IN BONE MARROW, SIGNAL = 0.91; SWISSPROT HIT: Q99102, EVALUE 2.00e-03
QGQQREPPNQLLPPDPSTAGTQDALNQPPLLDSSTVGTQDTLNQLSLPDSSKVRTQDTLNQPLLTDPSTARTQDTLNQPLLPDPSTAGTQDALKMPSQVMGKDRLVSERSQDNWDNLAH

SEQ ID NO: 43424 - protein, 53 aa, Homo sapiens
  MAP TO AC003687.1; EXPRESSED IN PLACENTA, SIGNAL = 0.93; EXPRESSED IN BRAIN, SIGNAL = 0.92; EXPRESSED IN ADULT LIVER, SIGNAL = 0.91; EXPRESSED IN LUNG, SIGNAL = 0.84; EXPRESSED IN FETAL LIVER, SIGNAL =   1; EXPRESSED IN BONE MARROW, SIGNAL = 0.88; EST_HUMAN HIT: BF511575.1, EVALUE 6.00e-09
GSALLISQAVSTQLLWTTRLMGAPTTGSSRSTAGGGAATSPRTSPTCAGCTAQ

SEQ ID NO: 43425 - protein, 53 aa, Homo sapiens
  MAP TO AC003687.1; EXPRESSED IN PLACENTA, SIGNAL = 0.93; EXPRESSED IN BRAIN, SIGNAL = 0.92; EXPRESSED IN ADULT LIVER, SIGNAL = 0.91; EXPRESSED IN LUNG, SIGNAL = 0.84; EXPRESSED IN FETAL LIVER, SIGNAL =   1; EXPRESSED IN BONE MARROW, SIGNAL = 0.88; SWISSPROT HIT: P00705, EVALUE 5.00e-08
ALPYAGVCLAYFTSGFNAAALDYEADGSTNNGIFQINSRRWCSNLTPNVPNVC

SEQ ID NO: 43426 - protein, 26 aa, Homo sapiens
  MAP TO AL031587.3; EXPRESSED IN HELA, SIGNAL = 1.3; EXPRESSED IN BRAIN, SIGNAL = 1.8; EXPRESSED IN LUNG, SIGNAL = 1.2; EXPRESSED IN BONE MARROW, SIGNAL = 1.7
HFRFRIELKEGSGSGSGLRLRVGSRP

SEQ ID NO: 43427 - protein, 39 aa, Homo sapiens
  MAP TO AP000350.1; EXPRESSED IN BRAIN, SIGNAL = 1.4; SWISSPROT HIT: P54245, EVALUE 5.60e-01
FTTCAASTAHHRTGARQTRTHVPVWMSSWLGNTRPFSCP

SEQ ID NO: 43428 - protein, 32 aa, Homo sapiens
  MAP TO Z97055.1; EXPRESSED IN PLACENTA, SIGNAL = 1.5; EXPRESSED IN BRAIN, SIGNAL = 1.4; EXPRESSED IN HELA, SIGNAL = 1.4; EXPRESSED IN LUNG, SIGNAL = 1.7
LWLCVFLQPCSAAQVGKKLGLIWARVLTGKCD

SEQ ID NO: 43429 - protein, 87 aa, Homo sapiens
  MAP TO AP000356.1; EXPRESSED IN HELA, SIGNAL = 2.2; EXPRESSED IN BRAIN, SIGNAL = 1.8; EXPRESSED IN LUNG, SIGNAL = 1.5; SWISSPROT HIT: P03315, EVALUE 5.60e+00
VPGLVVALGLQLRLTRLLPQQPVWWQSRCGAGERSVLQEGTRLSFCSAGEGLDASVTSHKAWLPDSPAGSDAFLPRALGLKQPGFLL

SEQ ID NO: 43430 - protein, 19 aa, Homo sapiens
  MAP TO AC008009.4; EXPRESSED IN FETAL LIVER, SIGNAL = 4.6; EXPRESSED IN HELA, SIGNAL = 1.4; EXPRESSED IN BRAIN, SIGNAL = 1.7; EXPRESSED IN PLACENTA, SIGNAL = 1.6; EXPRESSED IN LUNG, SIGNAL = 2.1; EST_HUMAN HIT: AV706204.1, EVALUE 3.70e-02
EKNSFLLDFLRYFSCDKQI

SEQ ID NO: 43431 - protein, 90 aa, Homo sapiens
  MAP TO AP000352.2; EXPRESSED IN HELA, SIGNAL = 1.4; EXPRESSED IN PLACENTA, SIGNAL = 1.2; EXPRESSED IN BRAIN, SIGNAL = 1.5; EXPRESSED IN FETAL LIVER, SIGNAL = 1.6; SWISSPROT HIT: Q9Y6J0, EVALUE 4.00e-47
FDSWAGMALARASRIQDKLNSNELKSDGPIWKHATPVLNCFRRALEIDSSNLSLWIEYGTMSYALHSFASRQLKQWRGELPPELVQQVRR

SEQ ID NO: 43432 - protein, 27 aa, Homo sapiens
  MAP TO AC006427.13; EXPRESSED IN PLACENTA, SIGNAL = 1.5; EXPRESSED IN HELA, SIGNAL = 1.5; EXPRESSED IN LUNG, SIGNAL = 1.7; EXPRESSED IN BONE MARROW, SIGNAL = 1.8; EXPRESSED IN ADULT LIVER, SIGNAL = 1.6; EXPRESSED IN BRAIN, SIGNAL = 1.4; SWISSPROT HIT: P77468, EVALUE 5.00e+00
RGDLCQEWASGCNTRCRGHHRQPCTHL

SEQ ID NO: 43433 - protein, 42 aa, Homo sapiens
  MAP TO AP000123.1; EXPRESSED IN PLACENTA, SIGNAL = 1.2; EXPRESSED IN BRAIN, SIGNAL = 1.5
TKLKMLRISGTAPKAASWVHFIPSHKCNTECSVLPLHNHPFH

SEQ ID NO: 43434 - protein, 42 aa, Homo sapiens
  MAP TO AP000356.1; EXPRESSED IN FETAL LIVER, SIGNAL = 2.3; EXPRESSED IN ADULT LIVER, SIGNAL = 1.4; EXPRESSED IN BRAIN, SIGNAL =   2; EXPRESSED IN BONE MARROW, SIGNAL = 1.7; SWISSPROT HIT: P19440, EVALUE 2.00e-18
SRESVESPEQKGLTYHRIVEAFRFAYAKRTLLGDPKFVDVTE

SEQ ID NO: 43435 - protein, 29 aa, Homo sapiens
  MAP TO AC007567.1; EXPRESSED IN BONE MARROW, SIGNAL = 1.4; EXPRESSED IN FETAL LIVER, SIGNAL = 1.2; EXPRESSED IN PLACENTA, SIGNAL = 1.3; EXPRESSED IN HELA, SIGNAL = 1.2; EXPRESSED IN BRAIN, SIGNAL = 1.8
GSEKALESADCHQLATVASKLCSTAGPWQ

SEQ ID NO: 43436 - protein, 74 aa, Homo sapiens
  MAP TO AL022238.1; EXPRESSED IN FETAL LIVER, SIGNAL = 1.3; EXPRESSED IN PLACENTA, SIGNAL =   2; EXPRESSED IN BRAIN, SIGNAL = 1.6; EXPRESSED IN HELA, SIGNAL = 1.7; EXPRESSED IN BONE MARROW, SIGNAL = 1.4; EXPRESSED IN LUNG, SIGNAL = 1.4; SWISSPROT HIT: Q16706, EVALUE 8.70e+00
KFPDYKSTWSPDPIGHNPTHLSNKMWKNHISSRNTTPLPRPPPGLTNPKPSSPWSSTAPRSVRGWGTQDSRLAS

SEQ ID NO: 43437 - protein, 43 aa, Homo sapiens
  MAP TO AC004909.2; EXPRESSED IN LUNG, SIGNAL = 1.4; EXPRESSED IN FETAL LIVER, SIGNAL = 2.2; EXPRESSED IN ADULT LIVER, SIGNAL = 1.8; EXPRESSED IN PLACENTA, SIGNAL = 4.7; EXPRESSED IN HELA, SIGNAL = 1.5; EXPRESSED IN BRAIN, SIGNAL = 1.5; SWISSPROT HIT: P20806, EVALUE 2.10e+00
PKMVAGHFQNGSGLLPIRWQALCSLTWGSWPHGFQGMESWAMW

SEQ ID NO: 43438 - protein, 86 aa, Homo sapiens
  MAP TO AP000111.1; EXPRESSED IN LUNG, SIGNAL = 1.4; EXPRESSED IN ADULT LIVER, SIGNAL = 1.6; EXPRESSED IN FETAL LIVER, SIGNAL = 1.5; EXPRESSED IN PLACENTA, SIGNAL =   2; EXPRESSED IN BRAIN, SIGNAL = 1.7; SWISSPROT HIT: P23578, EVALUE 2.10e-01
WLSQQQRGCCVTSVQWMAAEGPNRRQYHQRTVHPRMPIPTLHRETLQWHPLPQIRLPFASQGLPSQTSRLSTGIPLRHLTGTSEST

SEQ ID NO: 43439 - protein, 29 aa, Homo sapiens
  MAP TO AC007092.4; EXPRESSED IN BONE MARROW, SIGNAL =   3; EXPRESSED IN LUNG, SIGNAL =   2; EXPRESSED IN FETAL LIVER, SIGNAL = 2.1; EXPRESSED IN ADULT LIVER, SIGNAL = 3.2; EXPRESSED IN HELA, SIGNAL = 1.6; EXPRESSED IN PLACENTA, SIGNAL = 2.4; EXPRESSED IN BRAIN, SIGNAL = 2.5
GSLFKSFRAGTRGRKVHLEDDQADILEDK

SEQ ID NO: 43440 - protein, 53 aa, Homo sapiens
  MAP TO AC006548.19; EXPRESSED IN PLACENTA, SIGNAL = 1.4; EXPRESSED IN BONE MARROW, SIGNAL = 1.6; EXPRESSED IN ADULT LIVER, SIGNAL = 1.9; EXPRESSED IN FETAL LIVER, SIGNAL = 1.4; EXPRESSED IN HELA, SIGNAL = 1.3; EXPRESSED IN BRAIN, SIGNAL = 1.7
AARRGCPASTWALVLLKKVEEVSGTWLLRCLPSSCSSGLPSRALLIQLELART

SEQ ID NO: 43441 - protein, 52 aa, Homo sapiens
  MAP TO AC006548.19; EXPRESSED IN PLACENTA, SIGNAL = 1.4; EXPRESSED IN BONE MARROW, SIGNAL = 1.6; EXPRESSED IN ADULT LIVER, SIGNAL = 1.9; EXPRESSED IN FETAL LIVER, SIGNAL = 1.4; EXPRESSED IN HELA, SIGNAL = 1.3; EXPRESSED IN BRAIN, SIGNAL = 1.7; EST_HUMAN HIT: BE889595.1, EVALUE 7.50e-01; SWISSPROT HIT: P40477, EVALUE 3.60e+00
SQKGLSSQHLGFGAPQEGGGSFRHLAPQVSAIQLLFRPAQQSSLDPARTGQN

SEQ ID NO: 43442 - protein, 34 aa, Homo sapiens
  MAP TO AC009313.2; EXPRESSED IN PLACENTA, SIGNAL = 1.7; EXPRESSED IN LUNG, SIGNAL = 1.4; EXPRESSED IN BONE MARROW, SIGNAL = 1.5; EXPRESSED IN FETAL LIVER, SIGNAL = 1.9; EXPRESSED IN BRAIN, SIGNAL = 1.7; EXPRESSED IN HELA, SIGNAL = 1.5
GSQNFQQEYAIQPANAAELLHHLEFSQEADIFKY

SEQ ID NO: 43443 - protein, 47 aa, Homo sapiens; identical to SEQ ID NO: 39612
  MAP TO AC000025.2; EXPRESSED IN ADULT LIVER, SIGNAL = 0.58; EXPRESSED IN PLACENTA, SIGNAL = 0.68; EXPRESSED IN LUNG, SIGNAL = 0.68; EXPRESSED IN BRAIN, SIGNAL = 0.56; EXPRESSED IN FETAL LIVER, SIGNAL = 0.71; EXPRESSED IN BONE MARROW, SIGNAL = 0.65; SWISSPROT HIT: P34492, EVALUE 1.00e-02; EST_HUMAN HIT: BE867931.1, EVALUE 3.00e-21

SEQ ID NO: 43444 - protein, 32 aa, Homo sapiens
  MAP TO AC000025.2; EXPRESSED IN ADULT LIVER, SIGNAL = 0.58; EXPRESSED IN PLACENTA, SIGNAL = 0.68; EXPRESSED IN LUNG, SIGNAL = 0.68; EXPRESSED IN BRAIN, SIGNAL = 0.56; EXPRESSED IN FETAL LIVER, SIGNAL = 0.71; EXPRESSED IN BONE MARROW, SIGNAL = 0.65; SWISSPROT HIT: P03177, EVALUE 8.50e+00; EST_HUMAN HIT: BF528091.1, EVALUE 7.00e-09
TMPTGVPGVPKGAEPDAAVQEKPAAPRVQLLE

SEQ ID NO: 43445 - protein, 111 aa, Homo sapiens [sequence omitted]

SEQ ID NO: 43446 - protein, 25 aa, Homo sapiens
  MAP TO AC005367.1; EXPRESSED IN PLACENTA, SIGNAL = 1.3; EXPRESSED IN LUNG, SIGNAL = 1.3; EXPRESSED IN FETAL LIVER, SIGNAL = 1.5; EXPRESSED IN ADULT LIVER, SIGNAL = 1.2; EXPRESSED IN BRAIN, SIGNAL = 1.1; EXPRESSED IN BONE MARROW, SIGNAL = 1.3
KGVLQVLMLEQNQHCQVGDGAKLAE

SEQ ID NO: 43447 - protein, 37 aa, Homo sapiens
  MAP TO AC005572.1; EXPRESSED IN BONE MARROW, SIGNAL =   1; EXPRESSED IN PLACENTA, SIGNAL = 0.95; EXPRESSED IN LUNG, SIGNAL = 0.94; EXPRESSED IN FETAL LIVER, SIGNAL = 1.2; EXPRESSED IN ADULT LIVER, SIGNAL = 1.1; EXPRESSED IN BRAIN, SIGNAL =   1; EST_HUMAN HIT: AW297896.1, EVALUE 5.00e-13; SWISSPROT HIT: P30999, EVALUE 1.70e-02
ELQFERLTRELEAERQIVASQLERCKLGSETGSMSSM

SEQ ID NO: 43448 - protein, 27 aa, Homo sapiens
  MAP TO AC006249.1; EXPRESSED IN BONE MARROW, SIGNAL = 0.64; EXPRESSED IN PLACENTA, SIGNAL = 0.68; EXPRESSED IN LUNG, SIGNAL = 0.83; EXPRESSED IN FETAL LIVER, SIGNAL = 0.7; EXPRESSED IN ADULT LIVER, SIGNAL = 0.78; EXPRESSED IN BRAIN, SIGNAL = 0.59; EST_HUMAN HIT: AU140267.1, EVALUE 7.00e-05
SPEAKQTLVSCFLYSLQNHGLSKPLFF

SEQ ID NO: 43449 - protein, 20 aa, Homo sapiens
  MAP TO AC006249.1; EXPRESSED IN BONE MARROW, SIGNAL = 0.64; EXPRESSED IN PLACENTA, SIGNAL = 0.68; EXPRESSED IN LUNG, SIGNAL = 0.83; EXPRESSED IN FETAL LIVER, SIGNAL = 0.7; EXPRESSED IN ADULT LIVER, SIGNAL = 0.78; EXPRESSED IN BRAIN, SIGNAL = 0.59; EST_HUMAN HIT: AA134017.1, EVALUE 2.20e-02
HQKLSRRWCHASCTACRTMG

SEQ ID NO: 43450 - protein, 44 aa, Homo sapiens
  MAP TO AC006285.9; EXPRESSED IN LUNG, SIGNAL = 0.44; EXPRESSED IN BRAIN, SIGNAL = 0.59; EXPRESSED IN ADULT LIVER, SIGNAL = 0.43; EXPRESSED IN BONE MARROW, SIGNAL = 0.61; EST_HUMAN HIT: BE292983.1, EVALUE 5.30e+00
SLKELKFPSCWQVTFLPRCELGPSYSSQEAETSQALTPRSPQFL

SEQ ID NO: 43451 - protein, 62 aa, Homo sapiens
  MAP TO AC006254.10; EXPRESSED IN PLACENTA, SIGNAL = 0.75; EXPRESSED IN LUNG, SIGNAL = 0.66; EXPRESSED IN FETAL LIVER, SIGNAL =   7; EXPRESSED IN BRAIN, SIGNAL = 0.7; EXPRESSED IN BONE MARROW, SIGNAL = 0.64; EXPRESSED IN ADULT LIVER, SIGNAL =  15; EST_HUMAN HIT: AV656958.1, EVALUE 8.00e-15; SWISSPROT HIT: P19827, EVALUE 1.00e-30
GFYSQVAKPLLVDVDLQYPQDAVLALTQNHHKQYYEGSEIVVAGRIADNKQSSFKADVQAHG

SEQ ID NO: 43452 - protein, 25 aa, Homo sapiens
  MAP TO AC005533.2; EXPRESSED IN PLACENTA, SIGNAL = 1.3; EXPRESSED IN LUNG, SIGNAL = 1.3; EXPRESSED IN FETAL LIVER, SIGNAL = 1.4; EXPRESSED IN ADULT LIVER, SIGNAL = 1.3; EXPRESSED IN BRAIN, SIGNAL = 1.1; EXPRESSED IN BONE MARROW, SIGNAL = 1.4
CSQAYQAYQAYQASWAIAPLSTAQV

SEQ ID NO: 43453 - protein, 51 aa, Homo sapiens
  MAP TO AC004817.1; EXPRESSED IN PLACENTA, SIGNAL = 0.95; EXPRESSED IN ADULT LIVER, SIGNAL = 0.85; EXPRESSED IN LUNG, SIGNAL = 0.98; EXPRESSED IN FETAL LIVER, SIGNAL = 0.87; EXPRESSED IN BRAIN, SIGNAL = 0.84; EXPRESSED IN BONE MARROW, SIGNAL = 0.76; SWISSPROT HIT: Q57865, EVALUE 3.60e+00
VEGYGCTGERQQKAKGSYSLRGQSVEVQQASLVAYKEILIFFNQRAEAAEA

SEQ ID NO: 43454 - protein, 32 aa, Homo sapiens
  MAP TO AC004817.1; EXPRESSED IN PLACENTA, SIGNAL = 0.95; EXPRESSED IN ADULT LIVER, SIGNAL = 0.85; EXPRESSED IN LUNG, SIGNAL = 0.98; EXPRESSED IN FETAL LIVER, SIGNAL = 0.87; EXPRESSED IN BRAIN, SIGNAL = 0.84; EXPRESSED IN BONE MARROW, SIGNAL = 0.76
LRAMVALEKDSKRPRAVTLCEDKVLKSNRPPW

SEQ ID NO: 43455 - protein, 73 aa, Homo sapiens
  MAP TO AC005326.1; EXPRESSED IN PLACENTA, SIGNAL = 0.73; EXPRESSED IN LUNG, SIGNAL = 0.56; EXPRESSED IN FETAL LIVER, SIGNAL = 0.69; EXPRESSED IN ADULT LIVER, SIGNAL = 0.53; EXPRESSED IN BRAIN, SIGNAL = 0.85; EXPRESSED IN BONE MARROW, SIGNAL = 0.58; EST_HUMAN HIT: BF038279.1, EVALUE 1.00e-36; SWISSPROT HIT: P08243, EVALUE 1.00e-37
FEYQTKVDGEIILHLYDKGGIEQTICMLDGVFAFVLLDTANKKVFLGRDTYGVRPLFKAMTEDGFLAVCSEAK

SEQ ID NO: 43456 - protein, 107 aa, Homo sapiens
  MAP TO AC004682.1; EXPRESSED IN LUNG, SIGNAL = 1.2; EXPRESSED IN FETAL LIVER, SIGNAL = 1.5; EXPRESSED IN BRAIN, SIGNAL = 1.2; EXPRESSED IN BONE MARROW, SIGNAL = 1.2; EXPRESSED IN PLACENTA, SIGNAL = 1.3; EXPRESSED IN ADULT LIVER, SIGNAL = 1.1; EST_HUMAN HIT: BF182859.1, EVALUE 1.00e-34; SWISSPROT HIT: Q92620, EVALUE 1.00e-35
MGDTSEDASIHRLEGTDLDCQVGGLICKSKSAASEQHVFKAPAPRPSLLGLDLLASLKRREREEKDDGEDKKKSKVSSYKDWEESKDDQKDAEEEGGDQAGQNIRKD

SEQ ID NO: 43457 - protein, 59 aa, Homo sapiens
  MAP TO AC006120.1; EXPRESSED IN PLACENTA, SIGNAL = 0.92; EXPRESSED IN LUNG, SIGNAL = 0.81; EXPRESSED IN FETAL LIVER, SIGNAL =  17; EXPRESSED IN BRAIN, SIGNAL = 0.61; EXPRESSED IN BONE MARROW, SIGNAL = 0.66; EXPRESSED IN ADULT LIVER, SIGNAL =  42; EST_HUMAN HIT: AV718708.1, EVALUE 1.00e-29; SWISSPROT HIT: P02749, EVALUE 9.00e-31
KKATVVYQGERVKIQEKFKNGMLHGDKVSFFCKNKEKKCSYTEDAQCIDGTIEVPKCFK

SEQ ID NO: 43458 - protein, 34 aa, Homo sapiens
  MAP TO AC000403.1; EXPRESSED IN LUNG, SIGNAL = 1.4; EXPRESSED IN BRAIN, SIGNAL = 1.1; EXPRESSED IN BONE MARROW, SIGNAL = 1.2; EXPRESSED IN PLACENTA, SIGNAL = 1.2; EXPRESSED IN FETAL LIVER, SIGNAL = 1.3; EXPRESSED IN ADULT LIVER, SIGNAL = 1.4
FQWIKSEIRFKERGPQKGINTRRHGYWITVFGDM

SEQ ID NO: 43459 - protein, 27 aa, Homo sapiens
  MAP TO AC000403.1; EXPRESSED IN LUNG, SIGNAL = 1.4; EXPRESSED IN BRAIN, SIGNAL = 1.1; EXPRESSED IN BONE MARROW, SIGNAL = 1.2; EXPRESSED IN PLACENTA, SIGNAL = 1.2; EXPRESSED IN FETAL LIVER, SIGNAL = 1.3; EXPRESSED IN ADULT LIVER, SIGNAL = 1.4
FNGSKVRFDSRRGDPKRASIPGGMDIG

SEQ ID NO: 43460 - protein, 59 aa, Homo sapiens
  MAP TO AC005538.2; EXPRESSED IN LUNG, SIGNAL = 1.7; EXPRESSED IN BONE MARROW, SIGNAL = 1.1; EXPRESSED IN PLACENTA, SIGNAL = 0.97; EXPRESSED IN FETAL LIVER, SIGNAL = 1.1; EXPRESSED IN BRAIN, SIGNAL = 1.1; EXPRESSED IN ADULT LIVER, SIGNAL = 0.92; SWISSPROT HIT: O94759, EVALUE 6.00e-15; EST_HUMAN HIT: BE390627.1, EVALUE 6.00e-28
YIRLSCDTDAEILYELLTQHWHLKTPNLVISVTGGAKNFALKPRMRKIFSRLIYIAQSK

SEQ ID NO: 43461 - protein, 17 aa, Homo sapiens
  MAP TO AC005538.2; EXPRESSED IN LUNG, SIGNAL = 1.7; EXPRESSED IN BONE MARROW, SIGNAL = 1.1; EXPRESSED IN PLACENTA, SIGNAL = 0.97; EXPRESSED IN FETAL LIVER, SIGNAL = 1.1; EXPRESSED IN BRAIN, SIGNAL = 1.1; EXPRESSED IN ADULT LIVER, SIGNAL = 0.92; EST_HUMAN HIT: BE274448.1, EVALUE 7.00e-03
SIYVCPATRTRKSFTSC

SEQ ID NO: 43462 - protein, 32 aa, Homo sapiens
  MAP TO AC005477.1; EXPRESSED IN LUNG, SIGNAL = 0.99; EXPRESSED IN FETAL LIVER, SIGNAL = 0.92; EXPRESSED IN BRAIN, SIGNAL = 0.83; EXPRESSED IN BONE MARROW, SIGNAL = 0.93; EXPRESSED IN ADULT LIVER, SIGNAL = 0.9; EXPRESSED IN PLACENTA, SIGNAL = 0.95
IVQNAFIRPPETSYETTVPLGKYKVKNSRIKT

SEQ ID NO: 43463 - protein, 43 aa, Homo sapiens
  MAP TO AC005495.1; EXPRESSED IN PLACENTA, SIGNAL = 0.8; EXPRESSED IN ADULT LIVER, SIGNAL = 0.67; EXPRESSED IN LUNG, SIGNAL = 0.77; EXPRESSED IN FETAL LIVER, SIGNAL = 0.91; EXPRESSED IN BRAIN, SIGNAL = 0.68; EXPRESSED IN BONE MARROW, SIGNAL = 0.81; EST_HUMAN HIT: AA027211.1, EVALUE 4.00e-13; SWISSPROT HIT: Q99758, EVALUE 1.30e-02
NEMCDTEKITSLIKQHIPDAKLTTESEEKLVYSLPLEKTNKFP

SEQ ID NO: 43464 - protein, 21 aa, Homo sapiens
  MAP TO AC005495.1; EXPRESSED IN PLACENTA, SIGNAL = 0.8; EXPRESSED IN ADULT LIVER, SIGNAL = 0.67; EXPRESSED IN LUNG, SIGNAL = 0.77; EXPRESSED IN FETAL LIVER, SIGNAL = 0.91; EXPRESSED IN BRAIN, SIGNAL = 0.68; EXPRESSED IN BONE MARROW, SIGNAL = 0.81; EST_HUMAN HIT: BF127211.1, EVALUE 2.10e+00
MKCVTQKKSHPLLSSTFLMPS

SEQ ID NO: 43465 - protein, 42 aa, Homo sapiens
  MAP TO AC002299.1; EXPRESSED IN LUNG, SIGNAL = 0.71; EXPRESSED IN BRAIN, SIGNAL = 0.73; EXPRESSED IN BONE MARROW, SIGNAL = 0.79; EXPRESSED IN ADULT LIVER, SIGNAL = 0.77; EXPRESSED IN PLACENTA, SIGNAL = 0.65; EST_HUMAN HIT: AW578266.1, EVALUE 8.00e-20; SWISSPROT HIT: P04411, EVALUE 6.00e-21
DNVMLDSEGHIKIADFGMCKENIWDGVTTKTFCGTPDYIAPE

SEQ ID NO: 43466 - protein, 46 aa, Homo sapiens
  MAP TO AC004796.2; EXPRESSED IN BONE MARROW, SIGNAL = 0.79; EXPRESSED IN PLACENTA, SIGNAL = 0.98; EXPRESSED IN LUNG, SIGNAL = 0.78; EXPRESSED IN FETAL LIVER, SIGNAL = 0.76; EXPRESSED IN ADULT LIVER, SIGNAL = 0.94; EXPRESSED IN BRAIN, SIGNAL =   1; EST_HUMAN HIT: AW754118.1, EVALUE 9.00e-21; SWISSPROT HIT: P31271, EVALUE 2.80e+00
LKTKFPYTNHRTNPGYLLSPVTAQRNICGENASVKVSIDIEGFQLP

SEQ ID NO: 43467 - protein, 25 aa, Homo sapiens
  MAP TO AC006425.9; EXPRESSED IN LUNG, SIGNAL = 0.51; EXPRESSED IN BRAIN, SIGNAL = 0.58; EXPRESSED IN ADULT LIVER, SIGNAL = 0.59; EXPRESSED IN BONE MARROW, SIGNAL = 0.7; EST_HUMAN HIT: R12719.1, EVALUE 8.00e-09
MKWSQLTKTGSLWKHLYPVHWARGR

SEQ ID NO: 43468 - protein, 71 aa, Homo sapiens
  MAP TO AC004381.1; EXPRESSED IN BRAIN, SIGNAL = 0.63; EXPRESSED IN PLACENTA, SIGNAL = 0.86; EXPRESSED IN LUNG, SIGNAL =   1; EXPRESSED IN BONE MARROW, SIGNAL = 0.68; EXPRESSED IN ADULT LIVER, SIGNAL = 0.75; EST_HUMAN HIT: AA326624.1, EVALUE 7.00e-36; SWISSPROT HIT: P87151, EVALUE 2.40e-02
ILQDMYKTKKKKTRVILRMLPISGTCKAFLEDMKKYAETFLEPWFKAPNKGTFQIVYKSRNNSHVNREEVI

SEQ ID NO: 43469 - protein, 45 aa, Homo sapiens
  MAP TO AC004381.1; EXPRESSED IN BRAIN, SIGNAL = 0.63; EXPRESSED IN PLACENTA, SIGNAL = 0.86; EXPRESSED IN LUNG, SIGNAL =   1; EXPRESSED IN BONE MARROW, SIGNAL = 0.68; EXPRESSED IN ADULT LIVER, SIGNAL = 0.75; EST_HUMAN HIT: AA326624.1, EVALUE 7.00e-21
YSPGYVQNQEKEDSSYFANVTHLRHMQGFFRRYEKICRNIFGTLV

SEQ ID NO: 43470 - protein, 27 aa, Homo sapiens
  MAP TO AC004886.1; EXPRESSED IN BONE MARROW, SIGNAL = 0.74; EXPRESSED IN ADULT LIVER, SIGNAL = 0.75; EXPRESSED IN PLACENTA, SIGNAL = 0.92; EXPRESSED IN LUNG, SIGNAL = 0.8; EXPRESSED IN FETAL LIVER, SIGNAL = 0.7; EXPRESSED IN BRAIN, SIGNAL = 0.62
TYLNTSKTILIANYADYLRKVETIIAK

SEQ ID NO: 43471 - protein, 31 aa, Homo sapiens
  MAP TO AC003104.1; EXPRESSED IN ADULT LIVER, SIGNAL = 1.1; EXPRESSED IN PLACENTA, SIGNAL = 1.1; EXPRESSED IN LUNG, SIGNAL = 0.92; EXPRESSED IN FETAL LIVER, SIGNAL = 1.5; EXPRESSED IN BRAIN, SIGNAL = 0.87; EXPRESSED IN BONE MARROW, SIGNAL = 1.4; EST_HUMAN HIT: AU118523.1, EVALUE 5.90e+00; SWISSPROT HIT: P51827, EVALUE 3.80e+00
APASAPVQWSLHVACIWSSSGHGPGEGDSGK

SEQ ID NO: 43472 - protein, 69 aa, Homo sapiens
  MAP TO AC000085.4; EXPRESSED IN PLACENTA, SIGNAL = 0.9; EXPRESSED IN ADULT LIVER, SIGNAL = 1.2; EXPRESSED IN LUNG, SIGNAL = 1.2; EXPRESSED IN FETAL LIVER, SIGNAL = 1.3; EXPRESSED IN BRAIN, SIGNAL = 0.97; EXPRESSED IN BONE MARROW, SIGNAL =   1; EST_HUMAN HIT: AW367472.1, EVALUE 4.00e-29; SWISSPROT HIT: P53675, EVALUE 3.00e-33
LQNLGINPANIGFSTLTMESDKFICIREKVGEQAQVTIIDMSDPMAPIRRPISAESAIMNPASKVIALK

SEQ ID NO: 43473 - protein, 72 aa, Homo sapiens
  MAP TO AC004988.2; EXPRESSED IN PLACENTA, SIGNAL = 0.7; EXPRESSED IN LUNG, SIGNAL = 0.6; EXPRESSED IN BRAIN, SIGNAL = 0.73; EXPRESSED IN BONE MARROW, SIGNAL = 0.65; EXPRESSED IN ADULT LIVER, SIGNAL = 0.67; SWISSPROT HIT: P44132, EVALUE 3.10e-01; EST_HUMAN HIT: AV731463.1, EVALUE 5.00e-03
TVEESYRHQLNQVIIHPESELPYHVPLGIMYNLNFLPEMHGFNLIVGKHLANLNLGTIVPKLTSILQKHQGY

SEQ ID NO: 43474 - protein, 45 aa, Homo sapiens
  MAP TO AC005541.1; EXPRESSED IN PLACENTA, SIGNAL = 0.75; EXPRESSED IN LUNG, SIGNAL = 0.9; EXPRESSED IN FETAL LIVER, SIGNAL = 0.75; EXPRESSED IN ADULT LIVER, SIGNAL = 0.85; EXPRESSED IN BRAIN, SIGNAL = 0.67; EXPRESSED IN BONE MARROW, SIGNAL = 0.87; EST_HUMAN HIT: AV693085.1, EVALUE 2.30e+00; SWISSPROT HIT: O08429, EVALUE 9.40e-01
INDSVTEPFPGNNILTKHNLYLQGPLIIQWSKDTGKWGIFMQSLE

SEQ ID NO: 43475 - protein, 27 aa, Homo sapiens
  MAP TO AC004768.1; EXPRESSED IN BONE MARROW, SIGNAL = 0.85; EXPRESSED IN PLACENTA, SIGNAL = 0.74; EXPRESSED IN LUNG, SIGNAL = 0.83; EXPRESSED IN FETAL LIVER, SIGNAL = 1.5; EXPRESSED IN BRAIN, SIGNAL = 0.68; EXPRESSED IN ADULT LIVER, SIGNAL = 0.73
RILHTWVGKLLCCTVNGHPPENKKSGI

SEQ ID NO: 43476 - protein, 20 aa, Homo sapiens
  MAP TO AC004768.1; EXPRESSED IN BONE MARROW, SIGNAL = 0.85; EXPRESSED IN PLACENTA, SIGNAL = 0.74; EXPRESSED IN LUNG, SIGNAL = 0.83; EXPRESSED IN FETAL LIVER, SIGNAL = 1.5; EXPRESSED IN BRAIN, SIGNAL = 0.68; EXPRESSED IN ADULT LIVER, SIGNAL = 0.73
ENTAHLGWQAALLYCQWASS

SEQ ID NO: 43477 - protein, 44 aa, Homo sapiens
  MAP TO AC005042.1; EXPRESSED IN PLACENTA, SIGNAL = 0.59; EXPRESSED IN LUNG, SIGNAL = 0.65; EXPRESSED IN ADULT LIVER, SIGNAL = 0.57; EXPRESSED IN BRAIN, SIGNAL = 0.65; EXPRESSED IN BONE MARROW, SIGNAL = 0.63; EST_HUMAN HIT: BE177290.1, EVALUE 2.00e-20; SWISSPROT HIT: P30999, EVALUE 3.00e-09
EFAWRDPELPEVIHMLQHQFPSVQANAAAYLQHLCFGDNKVKME

SEQ ID NO: 43478 - protein, 39 aa, Homo sapiens
  MAP TO AC005042.1; EXPRESSED IN PLACENTA, SIGNAL = 0.59; EXPRESSED IN LUNG, SIGNAL = 0.65; EXPRESSED IN ADULT LIVER, SIGNAL = 0.57; EXPRESSED IN BRAIN, SIGNAL = 0.65; EXPRESSED IN BONE MARROW, SIGNAL = 0.63; EST_HUMAN HIT: AU128040.1, EVALUE 2.00e-16
LPGVILSCLRSFTCFSTSSHLFRQMQRPTCSTCALVTTK

SEQ ID NO: 43479 - protein, 34 aa, Homo sapiens
  MAP TO AC004992.1; EXPRESSED IN BRAIN, SIGNAL = 0.92; EXPRESSED IN BONE MARROW, SIGNAL = 0.81; EXPRESSED IN ADULT LIVER, SIGNAL = 0.86; EXPRESSED IN PLACENTA, SIGNAL =   1; EXPRESSED IN LUNG, SIGNAL = 0.91; EXPRESSED IN FETAL LIVER, SIGNAL = 0.8; EST_HUMAN HIT: AW977258.1, EVALUE 2.00e-06; SWISSPROT HIT: P03080, EVALUE 8.50e+00
ASKLILQSQYYPDTKARQKCVKKRKIQANVPDEH

SEQ ID NO: 43480 - protein, 65 aa, Homo sapiens
  MAP TO AC005729.1; EXPRESSED IN PLACENTA, SIGNAL = 0.64; EXPRESSED IN BRAIN, SIGNAL = 0.66; EXPRESSED IN BONE MARROW, SIGNAL = 0.56; EXPRESSED IN ADULT LIVER, SIGNAL = 0.96; EXPRESSED IN LUNG, SIGNAL = 0.64; EST_HUMAN HIT: AW969038.1, EVALUE 1.00e-31; SWISSPROT HIT: P26009, EVALUE 4.50e+00
LIESSLGSIATKFNFFIHNLAQLRFSGLPSNDEPILSFSPKTYSFRQDGRIKEVSVFTYHKKYNP

SEQ ID NO: 43481 - protein, 35 aa, Homo sapiens
  MAP TO AC006285.9; EXPRESSED IN BONE MARROW, SIGNAL = 1.1; EXPRESSED IN PLACENTA, SIGNAL =   1; EXPRESSED IN LUNG, SIGNAL = 0.95; EXPRESSED IN FETAL LIVER, SIGNAL = 0.91; EXPRESSED IN BRAIN, SIGNAL = 0.82; EXPRESSED IN ADULT LIVER, SIGNAL = 1.2; EST_HUMAN HIT: BE894378.1, EVALUE 2.00e-12
MLLELTRRGQEPLSALLQFGVTYLEDYSAEYIIQQ

SEQ ID NO: 43482 - protein, 92 aa, Homo sapiens
  MAP TO AC004935.1; EXPRESSED IN BONE MARROW, SIGNAL = 0.95; EXPRESSED IN PLACENTA, SIGNAL = 0.83; EXPRESSED IN LUNG, SIGNAL =   1; EXPRESSED IN FETAL LIVER, SIGNAL =  14; EXPRESSED IN ADULT LIVER, SIGNAL =   1; EXPRESSED IN BRAIN, SIGNAL = 0.99; EST_HUMAN HIT: AU119681.1, EVALUE 4.00e+00
NGEMSLKQCLGILMASSTYTRKEERSDFRDLSIHFTQLEKKRKKKKPQDSGVERERGHGSFRELLLVFLITASWSRDGYTVSSFTSMFQKKG

SEQ ID NO: 43483 - protein, 71 aa, Homo sapiens
  MAP TO AC006316.2; EXPRESSED IN LUNG, SIGNAL = 0.85; EXPRESSED IN BRAIN, SIGNAL = 0.94; EXPRESSED IN ADULT LIVER, SIGNAL = 0.62; EXPRESSED IN PLACENTA, SIGNAL = 0.79; EXPRESSED IN FETAL LIVER, SIGNAL =   1; EXPRESSED IN BONE MARROW, SIGNAL = 0.66; SWISSPROT HIT: Q90404, EVALUE 1.50e+00; EST_HUMAN HIT: H57421.1, EVALUE 1.80e+00
CDPGFSGPACEMASQTFPMFISESFGSSRLSSYHNFYSIRGAEVSFGCGVLASGKALVFNKDGRRQLITSF

SEQ ID NO: 43484 - protein, 66 aa, Homo sapiens
  MAP TO AC006316.2; EXPRESSED IN LUNG, SIGNAL = 0.85; EXPRESSED IN BRAIN, SIGNAL = 0.94; EXPRESSED IN ADULT LIVER, SIGNAL = 0.62; EXPRESSED IN PLACENTA, SIGNAL = 0.79; EXPRESSED IN FETAL LIVER, SIGNAL =   1; EXPRESSED IN BONE MARROW, SIGNAL = 0.66; SWISSPROT HIT: P75389, EVALUE 8.30e+00; EST_HUMAN HIT: H46376.1, EVALUE 8.80e+00
VTLDFLAQLVRWHPRHSQCLFLKALAVPGSPLTITFTLSVVLKSALVVVSWPVVRPWFSTKMGGVS

SEQ ID NO: 43485 - protein, 68 aa, Homo sapiens
  MAP TO AC005696.1; EXPRESSED IN BRAIN, SIGNAL = 1.1; EXPRESSED IN PLACENTA, SIGNAL = 0.88; EXPRESSED IN LUNG, SIGNAL = 1.3; EXPRESSED IN FETAL LIVER, SIGNAL = 0.91; EXPRESSED IN BONE MARROW, SIGNAL = 0.89; EXPRESSED IN ADULT LIVER, SIGNAL = 0.73; SWISSPROT HIT: P43035, EVALUE 7.00e-35; EST_HUMAN HIT: AL133739.1, EVALUE 7.00e-34
MELESKLNEAKEEFTSGGPLGQKRDPKEWIPRPPEKYALSGHRSPVTRVIFHPVFSVMVSASEDATIK

SEQ ID NO: 43486 - protein, 36 aa, Homo sapiens
  MAP TO AC006299.1; EXPRESSED IN PLACENTA, SIGNAL = 0.8; EXPRESSED IN LUNG, SIGNAL = 0.7; EXPRESSED IN BRAIN, SIGNAL = 0.67; EXPRESSED IN BONE MARROW, SIGNAL = 0.7; EXPRESSED IN ADULT LIVER, SIGNAL = 0.66; EST_HUMAN HIT: AA649141.1, EVALUE 9.00e-05; SWISSPROT HIT: P70700, EVALUE 3.70e+00
LSWKVRGQGFSRFGVWRRSISWPVDSAFLLCLHIVE

SEQ ID NO: 43487 - protein, 29 aa, Homo sapiens
  MAP TO AC006299.1; EXPRESSED IN PLACENTA, SIGNAL = 0.8; EXPRESSED IN LUNG, SIGNAL = 0.7; EXPRESSED IN BRAIN, SIGNAL = 0.67; EXPRESSED IN BONE MARROW, SIGNAL = 0.7; EXPRESSED IN ADULT LIVER, SIGNAL = 0.66; EST_HUMAN HIT: AV703706.1, EVALUE 6.00e+00
PSTMWRHNKKALSTGQEIDLLQTPNLLKP

SEQ ID NO: 43488 - protein, 24 aa, Homo sapiens
  MAP TO AC006457.2; EXPRESSED IN BONE MARROW, SIGNAL = 0.59; EXPRESSED IN LUNG, SIGNAL = 0.55; EXPRESSED IN BRAIN, SIGNAL = 0.58; EXPRESSED IN ADULT LIVER, SIGNAL = 0.41
TLTGCSLSKSTLQTTKGIIWPRKR

SEQ ID NO: 43489 - protein, 64 aa, Homo sapiens
  MAP TO AC005831.1; EXPRESSED IN BONE MARROW, SIGNAL = 1.2; EXPRESSED IN PLACENTA, SIGNAL = 0.85; EXPRESSED IN LUNG, SIGNAL = 0.82; EXPRESSED IN FETAL LIVER, SIGNAL = 0.87; EXPRESSED IN ADULT LIVER, SIGNAL = 0.9; EXPRESSED IN BRAIN, SIGNAL = 1.2; EST_HUMAN HIT: BE729066.1, EVALUE 8.80e-01; SWISSPROT HIT: P30124, EVALUE 2.00e-02
IISVEEDPLPQLLDGGFEQPLSKCSEEEEVSDQGVQGQIPEAPPLKLTPTSPRGQPVGKEALCK

SEQ ID NO: 43490 - protein, 22 aa, Homo sapiens
  MAP TO AC006425.9; EXPRESSED IN LUNG, SIGNAL = 0.71; EXPRESSED IN FETAL LIVER, SIGNAL = 0.86; EXPRESSED IN PLACENTA, SIGNAL = 0.84; EXPRESSED IN BRAIN, SIGNAL = 0.62; EXPRESSED IN BONE MARROW, SIGNAL = 0.72; EXPRESSED IN ADULT LIVER, SIGNAL =   1
PPPKKKKEEEKPLMDLLTLKLT

SEQ ID NO: 43491 - protein, 35 aa, Homo sapiens
  MAP TO AC005038.1; EXPRESSED IN LUNG, SIGNAL = 0.68; EXPRESSED IN FETAL LIVER, SIGNAL = 0.85; EXPRESSED IN BRAIN, SIGNAL = 0.74; EXPRESSED IN BONE MARROW, SIGNAL = 0.82; EXPRESSED IN ADULT LIVER, SIGNAL = 0.65; SWISSPROT HIT: Q11203, EVALUE 1.00e-15
MQRPEQYERDSLFVLAGFKWQDFKWLKYIVYKERV

SEQ ID NO: 43492 - protein, 25 aa, Homo sapiens
  MAP TO AC006324.2; EXPRESSED IN PLACENTA, SIGNAL = 0.6; EXPRESSED IN LUNG, SIGNAL = 0.72; EXPRESSED IN FETAL LIVER, SIGNAL = 0.8; EXPRESSED IN BRAIN, SIGNAL = 1.1; EXPRESSED IN BONE MARROW, SIGNAL = 0.75; EXPRESSED IN ADULT LIVER, SIGNAL = 0.61
KDGMKVSWQEEGMQGDEPDHNHGGD

SEQ ID NO: 43493 - protein, 60 aa, Homo sapiens
  MAP TO AC004860.1; EXPRESSED IN LUNG, SIGNAL = 1.1; EXPRESSED IN BRAIN, SIGNAL = 0.82; EXPRESSED IN BONE MARROW, SIGNAL = 1.1; EXPRESSED IN PLACENTA, SIGNAL = 1.1; EXPRESSED IN FETAL LIVER, SIGNAL = 0.98; EXPRESSED IN ADULT LIVER, SIGNAL = 0.94; SWISSPROT HIT: P16666, EVALUE 2.70e+00
IMSNLCNRKKCNKNSYYKKVTSGPSYVVNLLTLGKAAPWCDPVHRLAAVGQERRDDEKEG

SEQ ID NO: 43494 - protein, 20 aa, Homo sapiens
  MAP TO AC004860.1; EXPRESSED IN LUNG, SIGNAL = 1.1; EXPRESSED IN BRAIN, SIGNAL = 0.82; EXPRESSED IN BONE MARROW, SIGNAL = 1.1; EXPRESSED IN PLACENTA, SIGNAL = 1.1; EXPRESSED IN FETAL LIVER, SIGNAL = 0.98; EXPRESSED IN ADULT LIVER, SIGNAL = 0.94
GSCPTYATEKNAIKILITKK

SEQ ID NO: 43495 - protein, 47 aa, Homo sapiens
  MAP TO AC005414.2; EXPRESSED IN PLACENTA, SIGNAL = 0.77; EXPRESSED IN LUNG, SIGNAL = 0.79; EXPRESSED IN FETAL LIVER, SIGNAL = 0.8; EXPRESSED IN BONE MARROW, SIGNAL = 0.81; EXPRESSED IN BRAIN, SIGNAL = 0.74; EXPRESSED IN ADULT LIVER, SIGNAL = 0.69
LLENRAPILQEQALKTADLVLGRVLAEFLQKTEQKCSHKEMETVKIP

SEQ ID NO: 43496 - protein, 41 aa, Homo sapiens
  MAP TO AC004808.1; EXPRESSED IN PLACENTA, SIGNAL = 0.68; EXPRESSED IN LUNG, SIGNAL = 0.54; EXPRESSED IN BRAIN, SIGNAL = 1.3; EXPRESSED IN ADULT LIVER, SIGNAL = 0.47; SWISSPROT HIT: Q62696, EVALUE 4.30e-01; EST_HUMAN HIT: AI130725.1, EVALUE 2.00e-13
DFDYFTVDMEKGAKGFGFSIRGGREYKMDLYVLRLAEDGPA

SEQ ID NO: 43497 - protein, 66 aa, Homo sapiens
  MAP TO AC005230.1; EXPRESSED IN LUNG, SIGNAL = 0.73; EXPRESSED IN PLACENTA, SIGNAL = 0.75; EXPRESSED IN FETAL LIVER, SIGNAL = 0.76; EXPRESSED IN BRAIN, SIGNAL = 0.65; EXPRESSED IN BONE MARROW, SIGNAL = 0.7; EXPRESSED IN ADULT LIVER, SIGNAL = 0.58; SWISSPROT HIT: O34685, EVALUE 1.40e+00; EST_HUMAN HIT: U74313.1, EVALUE 2.00e-28
IRLNRLLTIDTDLLEQQDIDLSPDLAATYGPTEEAAQKVKHYYRFWILPQLWIGINFDRLTLLALF

SEQ ID NO: 43498 - protein, 31 aa, Homo sapiens
  MAP TO AC004999.1; EXPRESSED IN BRAIN, SIGNAL = 0.61; EXPRESSED IN ADULT LIVER, SIGNAL = 0.63; EXPRESSED IN BONE MARROW, SIGNAL = 0.7; EXPRESSED IN PLACENTA, SIGNAL =   1; EXPRESSED IN LUNG, SIGNAL = 0.72; EXPRESSED IN FETAL LIVER, SIGNAL = 0.72; EST_HUMAN HIT: AW974163.1, EVALUE 1.00e-10
TRERALRNTPSQEMALAPFLPLMKPQGTFMQ

SEQ ID NO: 43499 - protein, 51 aa, Homo sapiens
  MAP TO AC005553.1; EXPRESSED IN BONE MARROW, SIGNAL =   1; EXPRESSED IN PLACENTA, SIGNAL = 0.92; EXPRESSED IN LUNG, SIGNAL = 1.1; EXPRESSED IN FETAL LIVER, SIGNAL = 0.97; EXPRESSED IN ADULT LIVER, SIGNAL = 0.92; EXPRESSED IN BRAIN, SIGNAL = 0.87
MSPPLPSCSSVFQTAGCNPFLDCTTYLMWPITSIFYNKTEEKISEHIMCNK

SEQ ID NO: 43500 - protein, 53 aa, Homo sapiens
  MAP TO AC002302.1; EXPRESSED IN LUNG, SIGNAL = 0.79; EXPRESSED IN BRAIN, SIGNAL = 0.74; EXPRESSED IN PLACENTA, SIGNAL = 0.83; EXPRESSED IN FETAL LIVER, SIGNAL = 0.81; EXPRESSED IN BONE MARROW, SIGNAL = 0.91; EXPRESSED IN ADULT LIVER, SIGNAL = 0.79; EXPRESSED IN HELA, SIGNAL = 1.9; SWISSPROT HIT: O01670, EVALUE 2.70e+00
DLPIGALSDLTGHWVSVAMIITLFLDVTLLSLTRMPVFLRLAVSKDRELASHF

SEQ ID NO: 43501 - protein, 54 aa, Homo sapiens
  MAP TO AC002093.1; EXPRESSED IN LUNG, SIGNAL = 1.1; EXPRESSED IN FETAL LIVER, SIGNAL = 1.1; EXPRESSED IN BRAIN, SIGNAL =   1; EXPRESSED IN BONE MARROW, SIGNAL = 1.1; EXPRESSED IN PLACENTA, SIGNAL = 0.99; EXPRESSED IN ADULT LIVER, SIGNAL = 1.4; EST_HUMAN HIT: BF311377.1, EVALUE 4.00e-06; SWISSPROT HIT: Q06805, EVALUE 2.00e-03
  unsure 11
  unsure 35
  unsure 45
MSRALQTQAAXESCEPGWNGTQCQQPCLPGTFGEXWRTAVALTAXHGEACEPDT

SEQ ID NO: 43502 - protein, 20 aa, Homo sapiens
  MAP TO AC002093.1; EXPRESSED IN LUNG, SIGNAL = 1.1; EXPRESSED IN FETAL LIVER, SIGNAL = 1.1; EXPRESSED IN BRAIN, SIGNAL =   1; EXPRESSED IN BONE MARROW, SIGNAL = 1.1; EXPRESSED IN PLACENTA, SIGNAL = 0.99; EXPRESSED IN ADULT LIVER, SIGNAL = 1.4
STPTVPTKPFSSQLWPLQTQ

SEQ ID NO: 43503 - protein, 35 aa, Homo sapiens
  MAP TO AC004662.1; EXPRESSED IN ADULT LIVER, SIGNAL = 0.88; EXPRESSED IN PLACENTA, SIGNAL = 0.88; EXPRESSED IN LUNG, SIGNAL = 0.83; EXPRESSED IN BRAIN, SIGNAL = 0.85; EXPRESSED IN BONE MARROW, SIGNAL = 0.81; EXPRESSED IN FETAL LIVER, SIGNAL = 0.82; SWISSPROT HIT: O02667, EVALUE 8.40e+00
SFLVSCLLTIFLHSLILTKLAIMRDCQPDISCSFL

SEQ ID NO: 43504 - protein, 35 aa, Homo sapiens
  MAP TO AC005699.9; EXPRESSED IN LUNG, SIGNAL = 0.69; EXPRESSED IN BONE MARROW, SIGNAL = 0.71; EXPRESSED IN PLACENTA, SIGNAL = 0.73; EXPRESSED IN BRAIN, SIGNAL = 0.75; EXPRESSED IN ADULT LIVER, SIGNAL = 0.7
TLCLLSLSSIISKSVEGRRIIRATSWTCHRNKMRL

SEQ ID NO: 43505 - protein, 84 aa, Homo sapiens
  MAP TO AC004587.1; EXPRESSED IN PLACENTA, SIGNAL = 1.2; EXPRESSED IN BONE MARROW, SIGNAL =   1; EXPRESSED IN ADULT LIVER, SIGNAL = 0.83; EXPRESSED IN LUNG, SIGNAL = 0.96; EXPRESSED IN FETAL LIVER, SIGNAL = 1.1; EXPRESSED IN BRAIN, SIGNAL = 0.92; SWISSPROT HIT: P46940, EVALUE 1.00e-36; EST_HUMAN HIT: BE084636.1, EVALUE 9.00e-36
SKVDQIQEIVTGNPTVIKMVVSFNRGARGQNALRQILAPVVKEIMDDKSLNIKTDPVDIYKSWVNQMESQTGEARYVNHNDTFL

SEQ ID NO: 43506 - protein, 72 aa, Homo sapiens
  MAP TO AC006463.3; EXPRESSED IN PLACENTA, SIGNAL = 0.94; EXPRESSED IN LUNG, SIGNAL = 0.6; EXPRESSED IN BRAIN, SIGNAL = 0.83; EXPRESSED IN FETAL LIVER, SIGNAL = 0.72; EXPRESSED IN BONE MARROW, SIGNAL = 0.54; EXPRESSED IN ADULT LIVER, SIGNAL = 0.7; EST_HUMAN HIT: BF447281.1, EVALUE 1.00e-30; SWISSPROT HIT: Q09094, EVALUE 3.40e+00
EILLPMMTDQLKYHLERQENLEACCQLLSHILEVLYRKDMGPTQRQIQIIMEKLLQTVNQTIISMGQDSELT

SEQ ID NO: 43507 - protein, 80 aa, Homo sapiens
  MAP TO AC005866.3; EXPRESSED IN PLACENTA, SIGNAL = 1.1; EXPRESSED IN BONE MARROW, SIGNAL = 1.2; EXPRESSED IN ADULT LIVER, SIGNAL = 1.3; EXPRESSED IN FETAL LIVER, SIGNAL = 1.3; EXPRESSED IN LUNG, SIGNAL = 1.3; EXPRESSED IN BRAIN, SIGNAL = 1.2; SWISSPROT HIT: Q01815, EVALUE 9.00e-15; EST_HUMAN HIT: AI693324.1, EVALUE 8.10e+00
YWNSLSNLVASLLNSVRSIASLLLLLFLFIIIFSLLGMQLFGGKFNFDEMQTRRSTFDNFPQSLLTVFQVWTLLCWDSDS

SEQ ID NO: 43508 - protein, 43 aa, Homo sapiens
  MAP TO AC006453.3; EXPRESSED IN PLACENTA, SIGNAL = 0.83; EXPRESSED IN ADULT LIVER, SIGNAL = 0.87; EXPRESSED IN LUNG, SIGNAL = 0.94; EXPRESSED IN FETAL LIVER, SIGNAL =   1; EXPRESSED IN BRAIN, SIGNAL = 0.99; EXPRESSED IN BONE MARROW, SIGNAL =   1; SWISSPROT HIT: O49858, EVALUE 4.20e-01; EST_HUMAN HIT: AA297847.1, EVALUE 4.00e-14
FGVIHLVFTNLLLWANGVLNESKHQLNEHKEWLITLGFGNITT

SEQ ID NO: 43509 - protein, 31 aa, Homo sapiens
  MAP TO AC005702.1; EXPRESSED IN BONE MARROW, SIGNAL = 0.84; EXPRESSED IN PLACENTA, SIGNAL = 1.1; EXPRESSED IN LUNG, SIGNAL = 0.89; EXPRESSED IN FETAL LIVER, SIGNAL = 0.83; EXPRESSED IN ADULT LIVER, SIGNAL = 0.74; EXPRESSED IN BRAIN, SIGNAL = 0.86; EST_HUMAN HIT: AW964389.1, EVALUE 1.00e-10
EAEQRHRELAAKAGGFNDFATLAVIFEQCKS

SEQ ID NO: 43510 - protein, 22 aa, Homo sapiens
  MAP TO AC005702.1; EXPRESSED IN BONE MARROW, SIGNAL = 0.84; EXPRESSED IN PLACENTA, SIGNAL = 1.1; EXPRESSED IN LUNG, SIGNAL = 0.89; EXPRESSED IN FETAL LIVER, SIGNAL = 0.83; EXPRESSED IN ADULT LIVER, SIGNAL = 0.74; EXPRESSED IN BRAIN, SIGNAL = 0.86; EST_HUMAN HIT: AA304597.1, EVALUE 2.00e-05
RKQNRDIENWQLKLEDLMTLQL

SEQ ID NO: 43511 - protein, 40 aa, Homo sapiens
  MAP TO AC005007.1; EXPRESSED IN PLACENTA, SIGNAL = 1.1; EXPRESSED IN LUNG, SIGNAL = 0.85; EXPRESSED IN FETAL LIVER, SIGNAL = 0.89; EXPRESSED IN BRAIN, SIGNAL = 0.79; EXPRESSED IN BONE MARROW, SIGNAL = 0.74; EXPRESSED IN ADULT LIVER, SIGNAL = 0.87; SWISSPROT HIT: P25491, EVALUE 8.30e+00; EST_HUMAN HIT: AW008890.1, EVALUE 1.00e-16
ERVPRERRQRQSVLQKKPKAEDLRTECATCKGTGDNENLV

SEQ ID NO: 43512 - protein, 106 aa, Homo sapiens
  MAP TO AC000134.14; EXPRESSED IN PLACENTA, SIGNAL = 0.59; EXPRESSED IN BONE MARROW, SIGNAL = 0.64; EXPRESSED IN ADULT LIVER, SIGNAL = 0.58; EXPRESSED IN BRAIN, SIGNAL = 2.7; EXPRESSED IN LUNG, SIGNAL = 0.59; SWISSPROT HIT: Q21313, EVALUE 1.00e-09; EST_HUMAN HIT: BE348399.1, EVALUE 6.00e-21
TPRHPGKEEFVATFKGNEFFCYDLSHNPIQSSTDEITLAFRTLQRNGLMLHTGKSADYVNLSLKSGAVWLVINLGSGAFEALVEPVNGKFNDNAWHDVRVTRNLRQ

SEQ ID NO: 43513 - protein, 48 aa, Homo sapiens
  MAP TO AC000134.14; EXPRESSED IN PLACENTA, SIGNAL = 0.59; EXPRESSED IN BONE MARROW, SIGNAL = 0.64; EXPRESSED IN ADULT LIVER, SIGNAL = 0.58; EXPRESSED IN BRAIN, SIGNAL = 2.7; EXPRESSED IN LUNG, SIGNAL = 0.59; EST_HUMAN HIT: BE348399.1, EVALUE 6.00e-03
PHHGIQARRSLWRPSKAMSSSATTCHTTPSRAALMRSHWPSAPCNATA

SEQ ID NO: 43514 - protein, 80 aa, Homo sapiens
  MAP TO AC005630.1; EXPRESSED IN PLACENTA, SIGNAL = 1.1; EXPRESSED IN LUNG, SIGNAL = 0.91; EXPRESSED IN FETAL LIVER, SIGNAL = 1.1; EXPRESSED IN BONE MARROW, SIGNAL = 1.1; EXPRESSED IN BRAIN, SIGNAL = 1.3; EXPRESSED IN ADULT LIVER, SIGNAL = 1.2; EST_HUMAN HIT: AI928799.1, EVALUE 1.00e-29; SWISSPROT HIT: P21575, EVALUE 1.00e-21
TPEFIISEPLASMYSCGNQNTLMEELAEQAQQHDEMLHMHHALKEALSIIGDINRTTVTMPMPPPVDDTWLQVQSIPDAH

SEQ ID NO: 43515 - protein, 20 aa, Homo sapiens [sequence omitted]

SEQ ID NO: 43516 - protein, 56 aa, Homo sapiens
  MAP TO AC004802.1; EXPRESSED IN LUNG, SIGNAL = 1.2; EXPRESSED IN FETAL LIVER, SIGNAL = 1.1; EXPRESSED IN BRAIN, SIGNAL = 1.3; EXPRESSED IN BONE MARROW, SIGNAL = 1.3; EXPRESSED IN PLACENTA, SIGNAL = 1.3; EXPRESSED IN ADULT LIVER, SIGNAL = 1.1; SWISSPROT HIT: P11516, EVALUE 3.60e-02; EST_HUMAN HIT: AW996723.1, EVALUE 2.00e-17
VDALRLRLEEKETMLNKKTKQIQDMAEEKGTQAGEIHDLKDMLDVKERKVNVLQKK

SEQ ID NO: 43517 - protein, 19 aa, Homo sapiens
  MAP TO AC002088.1; EXPRESSED IN PLACENTA, SIGNAL = 1.1; EXPRESSED IN LUNG, SIGNAL = 0.78; EXPRESSED IN FETAL LIVER, SIGNAL = 1.1; EXPRESSED IN BRAIN, SIGNAL =   1; EXPRESSED IN BONE MARROW, SIGNAL = 0.97; EXPRESSED IN ADULT LIVER, SIGNAL = 0.58; EST_HUMAN HIT: H56539.1, EVALUE 6.00e-03
CLKKLPQPLQPSVTTTLIS

SEQ ID NO: 43518 - protein, 58 aa, Homo sapiens
  MAP TO AC003669.1; EXPRESSED IN BONE MARROW, SIGNAL = 1.2; EXPRESSED IN ADULT LIVER, SIGNAL = 1.2; EXPRESSED IN PLACENTA, SIGNAL = 1.2; EXPRESSED IN LUNG, SIGNAL = 1.3; EXPRESSED IN FETAL LIVER, SIGNAL = 1.2; EXPRESSED IN BRAIN, SIGNAL = 1.3; SWISSPROT HIT: Q10715, EVALUE 5.00e-18; EST_HUMAN HIT: AW016672.1, EVALUE 9.00e-25
ILMCTKVTMDDFLTAHHEMGHIQYDMAYAAQPFLLRNGANEGFHEAVGEIMSLSAATP

SEQ ID NO: 43519 - protein, 17 aa, Homo sapiens
  MAP TO AC003669.1; EXPRESSED IN BONE MARROW, SIGNAL = 1.2; EXPRESSED IN ADULT LIVER, SIGNAL = 1.2; EXPRESSED IN PLACENTA, SIGNAL = 1.2; EXPRESSED IN LUNG, SIGNAL = 1.3; EXPRESSED IN FETAL LIVER, SIGNAL = 1.2; EXPRESSED IN BRAIN, SIGNAL = 1.3; EST_HUMAN HIT: AW003460.1, EVALUE 3.00e-03
DPYVHKGDNGRLPDSSS

SEQ ID NO: 43520 - protein, 46 aa, Homo sapiens
  MAP TO AC005495.1; EXPRESSED IN ADULT LIVER, SIGNAL = 0.95; EXPRESSED IN LUNG, SIGNAL = 5.2; EXPRESSED IN PLACENTA, SIGNAL = 0.72; EXPRESSED IN FETAL LIVER, SIGNAL = 0.82; EXPRESSED IN BRAIN, SIGNAL = 0.76; EXPRESSED IN BONE MARROW, SIGNAL = 0.78; EST_HUMAN HIT: AI372047.1, EVALUE 7.00e-11
DYRFSVACNTKKLNCFPVLMGIVSNALMGIFNFTELIQMESTSFSR

SEQ ID NO: 43521 - protein, 27 aa, Homo sapiens
  MAP TO AC004704.2; EXPRESSED IN LUNG, SIGNAL = 0.81; EXPRESSED IN FETAL LIVER, SIGNAL = 0.73; EXPRESSED IN BONE MARROW, SIGNAL = 0.79; EXPRESSED IN PLACENTA, SIGNAL = 0.85; EXPRESSED IN BRAIN, SIGNAL = 0.71; EXPRESSED IN ADULT LIVER, SIGNAL = 0.71; EST_HUMAN HIT: AI733823.1, EVALUE 1.80e-01
PPCSSSSLSIITGQRLCQAHTNVSSVF

SEQ ID NO: 43522 - protein, 111 aa, Homo sapiens
  MAP TO AC003042.1; EXPRESSED IN PLACENTA, SIGNAL = 0.68; EXPRESSED IN ADULT LIVER, SIGNAL = 0.69; EXPRESSED IN LUNG, SIGNAL = 0.72; EXPRESSED IN BRAIN, SIGNAL = 0.68; EXPRESSED IN BONE MARROW, SIGNAL = 0.71; SWISSPROT HIT: P49335, EVALUE 1.20e-01; EST_HUMAN HIT: T66998.1, EVALUE 2.00e-23
VIVGQNEMMPAETPVLQDGPPANLGWDISPGALSLSLGGWDGECKHLQVSFSPFWGKEKRPGVSFLRILQPLQLLEVSGLRHHGNVAQPPAGPVLCQPPLTSLRMITFRQI

SEQ ID NO: 43523 - protein, 76 aa, Homo sapiens
  MAP TO AC002117.1; EXPRESSED IN HELA, SIGNAL =   2; EXPRESSED IN FETAL LIVER, SIGNAL = 2.4; EXPRESSED IN BRAIN, SIGNAL = 1.4; EXPRESSED IN BONE MARROW, SIGNAL = 1.5; EXPRESSED IN ADULT LIVER, SIGNAL = 2.3; EXPRESSED IN PLACENTA, SIGNAL = 1.6; EXPRESSED IN LUNG, SIGNAL = 2.3; SWISSPROT HIT: P10895, EVALUE 1.00e-05; EST_HUMAN HIT: W03547.1, EVALUE 3.00e-27
ECDHSNNDRLEGAEIEEFLRRLLKRPELEEIFHQYSGEDRVLSAPELLEFLEDQGEEGATLARAQQLIQTYELNET

SEQ ID NO: 43524 - protein, 47 aa, Homo sapiens
  MAP TO AC004053.1; EXPRESSED IN PLACENTA, SIGNAL = 0.58; EXPRESSED IN BONE MARROW, SIGNAL = 0.52; EXPRESSED IN ADULT LIVER, SIGNAL = 0.42; EXPRESSED IN LUNG, SIGNAL = 0.43; EXPRESSED IN BRAIN, SIGNAL = 0.6; SWISSPROT HIT: Q09818, EVALUE 2.10e+00; EST_HUMAN HIT: BF000660.1, EVALUE 4.00e+00
TEEEATCTALQFVKNTKILHLEKGSLIAGSSLWSTLCPRVLRGRKRW

SEQ ID NO: 43525 - protein, 49 aa, Homo sapiens
  MAP TO AC006460.3; EXPRESSED IN PLACENTA, SIGNAL = 0.79; EXPRESSED IN BRAIN, SIGNAL = 0.74; EXPRESSED IN FETAL LIVER, SIGNAL = 0.69; EXPRESSED IN LUNG, SIGNAL = 0.61; EXPRESSED IN BONE MARROW, SIGNAL = 0.61; EXPRESSED IN ADULT LIVER, SIGNAL = 0.49; EST_HUMAN HIT: AW796111.1, EVALUE 5.90e-01; SWISSPROT HIT: Q01336, EVALUE 2.10e+00
EIKRKSSTSFQEFFPTGVTQDMCDNMYEMLSIGEAQPRLYAQGFYSGLP

SEQ ID NO: 43526 - protein, 22 aa, Homo sapiens
  MAP TO AC006460.3; EXPRESSED IN PLACENTA, SIGNAL = 0.79; EXPRESSED IN BRAIN, SIGNAL = 0.74; EXPRESSED IN FETAL LIVER, SIGNAL = 0.69; EXPRESSED IN LUNG, SIGNAL = 0.61; EXPRESSED IN BONE MARROW, SIGNAL = 0.61; EXPRESSED IN ADULT LIVER, SIGNAL = 0.49; EST_HUMAN HIT: W90797.1, EVALUE 1.60e+00
NQEEIKHKLPRVLSHWGHPGHV

SEQ ID NO: 43527 - protein, 38 aa, Homo sapiens
  MAP TO AC004125.1; EXPRESSED IN PLACENTA, SIGNAL = 0.72; EXPRESSED IN FETAL LIVER, SIGNAL = 0.7; EXPRESSED IN BRAIN, SIGNAL = 0.61; EXPRESSED IN BONE MARROW, SIGNAL = 0.65; EXPRESSED IN LUNG, SIGNAL = 0.62; EXPRESSED IN ADULT LIVER, SIGNAL = 0.58
DMSRAQEKNLNAGTLSEEKVPLSPSQKGSVGQENPVLK

SEQ ID NO: 43528 - protein, 26 aa, Homo sapiens
  MAP TO AC004167.1; EXPRESSED IN LUNG, SIGNAL = 0.57; EXPRESSED IN BONE MARROW, SIGNAL = 0.58; EXPRESSED IN ADULT LIVER, SIGNAL = 0.56; EXPRESSED IN BRAIN, SIGNAL = 0.62
DRASYKSVQPVRSRRAPIQKGPTLDL

SEQ ID NO: 43529 - protein, 68 aa, Homo sapiens
  MAP TO AC006324.2; EXPRESSED IN ADULT LIVER, SIGNAL = 0.42; EXPRESSED IN LUNG, SIGNAL = 0.45; EXPRESSED IN BRAIN, SIGNAL = 0.59; EXPRESSED IN BONE MARROW, SIGNAL = 0.52; SWISSPROT HIT: P55487, EVALUE 1.30e-01; EST_HUMAN HIT: BE715181.1, EVALUE 3.30e+00
KQHYWKMKKDLLAGLNIKHHFPDCLSDSPIPNYSASHQQGTFSTEPLSSEADKRLRLKESKTKTSCCR

SEQ ID NO: 43530 - protein, 27 aa, Homo sapiens
  MAP TO AC004057.1; EXPRESSED IN PLACENTA, SIGNAL = 0.75; EXPRESSED IN BRAIN, SIGNAL = 0.69; EXPRESSED IN ADULT LIVER, SIGNAL = 0.64; EXPRESSED IN LUNG, SIGNAL = 0.53; EXPRESSED IN BONE MARROW, SIGNAL = 0.61; SWISSPROT HIT: Q01484, EVALUE 2.00e-08; EST_HUMAN HIT: BE714736.1, EVALUE 6.00e-04
NGNTALAIAKRLGYISVVDTLKVVTEE

SEQ ID NO: 43531 - protein, 20 aa, Homo sapiens
  MAP TO AC004057.1; EXPRESSED IN PLACENTA, SIGNAL = 0.75; EXPRESSED IN BRAIN, SIGNAL = 0.69; EXPRESSED IN ADULT LIVER, SIGNAL = 0.64; EXPRESSED IN LUNG, SIGNAL = 0.53; EXPRESSED IN BONE MARROW, SIGNAL = 0.61
MATLPWRLLSVWATSPWSTP

SEQ ID NO: 43532 - protein, 40 aa, Homo sapiens
  MAP TO AC006464.3; EXPRESSED IN LUNG, SIGNAL = 0.61; EXPRESSED IN BRAIN, SIGNAL = 0.55; EXPRESSED IN BONE MARROW, SIGNAL = 0.69; EXPRESSED IN ADULT LIVER, SIGNAL = 0.61; EXPRESSED IN PLACENTA, SIGNAL = 0.67
LNELCHGESESPANLLGLIYDEETKRRLRKEDEEEDFLDD

SEQ ID NO: 43533 - protein, 55 aa, Homo sapiens
  MAP TO AC005019.1; EXPRESSED IN LUNG, SIGNAL = 0.76; EXPRESSED IN BRAIN, SIGNAL = 0.75; EXPRESSED IN BONE MARROW, SIGNAL = 0.68; EXPRESSED IN ADULT LIVER, SIGNAL = 0.88; EXPRESSED IN PLACENTA, SIGNAL = 0.6; EXPRESSED IN FETAL LIVER, SIGNAL = 0.85; EST_HUMAN HIT: AI740546.1, EVALUE 6.00e-11
HQHLLLVRASGCFHSWQKVKGNHVQRLHGEGVSKREEEGKCQALCNNQLSQERTE

SEQ ID NO: 43534 - protein, 147 aa, Homo sapiens
  MAP TO AC006475.3; EXPRESSED IN PLACENTA, SIGNAL =   1; EXPRESSED IN LUNG, SIGNAL =   1; EXPRESSED IN FETAL LIVER, SIGNAL =   1; EXPRESSED IN BONE MARROW, SIGNAL = 1.1; EXPRESSED IN ADULT LIVER, SIGNAL = 0.77; EXPRESSED IN BRAIN, SIGNAL =   1; SWISSPROT HIT: P25386, EVALUE 9.00e-04; EST_HUMAN HIT: BE748456.1, EVALUE 2.00e-29
ISETDEKEDLLHENLLMQDEIAWLRLEKDTIRNQNLENKYLKDFEIVKRKREDLLKALKRNGETLAKMIACYSGQLAALTDENTTLHSKLEKQRESRQRLETEMQSCGCRLNAALCDHDQSHSSERDQELAFQGTVDKWCHLQENLN

SEQ ID NO: 43535 - protein, 48 aa, Homo sapiens
  MAP TO AC005881.2; EXPRESSED IN BONE MARROW, SIGNAL = 0.85; EXPRESSED IN PLACENTA, SIGNAL = 0.72; EXPRESSED IN LUNG, SIGNAL = 0.77; EXPRESSED IN FETAL LIVER, SIGNAL = 0.89; EXPRESSED IN BRAIN, SIGNAL = 0.97; EXPRESSED IN ADULT LIVER, SIGNAL = 0.88; EST_HUMAN HIT: AA248629.1, EVALUE 3.90e+00
RPVCRSCTTTCPVARWRYIQDVQENRGRIPVHPDWIWGQGRLYKASDI

SEQ ID NO: 43536 - protein, 63 aa, Homo sapiens
  MAP TO AC004127.1; EXPRESSED IN BONE MARROW, SIGNAL = 0.78; EXPRESSED IN PLACENTA, SIGNAL = 0.78; EXPRESSED IN LUNG, SIGNAL = 0.8; EXPRESSED IN FETAL LIVER, SIGNAL = 0.7; EXPRESSED IN ADULT LIVER, SIGNAL = 0.72; EXPRESSED IN BRAIN, SIGNAL = 0.8; SWISSPROT HIT: O57971, EVALUE 4.00e-07; EST_HUMAN HIT: BE621069.1, EVALUE 7.00e-30
MNPIVVVHGGGAGPISKDRKERVHQGMVRAATVGYGILREGGSAVDAVEGAVVALEDDPEFNA

SEQ ID NO: 43537 - protein, 49 aa, Homo sapiens
  MAP TO AC005669.1; EXPRESSED IN PLACENTA, SIGNAL = 0.9; EXPRESSED IN LUNG, SIGNAL = 0.79; EXPRESSED IN FETAL LIVER, SIGNAL = 0.9; EXPRESSED IN BRAIN, SIGNAL = 0.8; EXPRESSED IN BONE MARROW, SIGNAL = 0.88; EXPRESSED IN ADULT LIVER, SIGNAL = 0.76; SWISSPROT HIT: P48067, EVALUE 5.40e-01; EST_HUMAN HIT: AI733761.1, EVALUE 8.00e-20
GQLVTKDYPAYALAVIGLLVASSTMCIPLAALGTFVQRRLKRGDADPVA

SEQ ID NO: 43538 - protein, 34 aa, Homo sapiens
  MAP TO AC003090.1; EXPRESSED IN PLACENTA, SIGNAL = 1.1; EXPRESSED IN LUNG, SIGNAL = 1.2; EXPRESSED IN FETAL LIVER, SIGNAL = 2.1; EXPRESSED IN BRAIN, SIGNAL = 0.86; EXPRESSED IN BONE MARROW, SIGNAL = 1.1; EXPRESSED IN ADULT LIVER, SIGNAL = 2.4; EST_HUMAN HIT: AI208794.1, EVALUE 5.00e-14
GFRAWGTGLLGSRRVSDAGRCCVSALHVPSWILR

SEQ ID NO: 43539 - protein, 38 aa, Homo sapiens
  MAP TO AC005703.1; EXPRESSED IN PLACENTA, SIGNAL = 0.71; EXPRESSED IN LUNG, SIGNAL = 0.81; EXPRESSED IN FETAL LIVER, SIGNAL = 0.94; EXPRESSED IN BONE MARROW, SIGNAL = 0.82; EXPRESSED IN BRAIN, SIGNAL = 0.83; EXPRESSED IN ADULT LIVER, SIGNAL = 1.1
DHQAHAIRPHTASQISANAIRIAPQNEMLPLEQCGLMR

SEQ ID NO: 43540 - protein, 30 aa, Homo sapiens
  MAP TO AC005703.1; EXPRESSED IN PLACENTA, SIGNAL = 0.71; EXPRESSED IN LUNG, SIGNAL = 0.81; EXPRESSED IN FETAL LIVER, SIGNAL = 0.94; EXPRESSED IN BONE MARROW, SIGNAL = 0.82; EXPRESSED IN BRAIN, SIGNAL = 0.83; EXPRESSED IN ADULT LIVER, SIGNAL = 1.1
TTRLMPSVPTLLAKSQPMPSELHPKMKCFH

SEQ ID NO: 43541 - protein, 58 aa, Homo sapiens
  MAP TO AC005840.1; EXPRESSED IN ADULT LIVER, SIGNAL = 1.2; EXPRESSED IN PLACENTA, SIGNAL =   1; EXPRESSED IN LUNG, SIGNAL = 1.1; EXPRESSED IN FETAL LIVER, SIGNAL = 1.2; EXPRESSED IN BONE MARROW, SIGNAL = 1.1; EXPRESSED IN BRAIN, SIGNAL =   1; EST_HUMAN HIT: AW302431.1, EVALUE 4.70e+00
MSILPVWSQYRLQDTSTEHRPRRGELLSTRKSWQKTNKDSLLMVVFKRCNRMQWQLTM

SEQ ID NO: 43542 - protein, 161 aa, Homo sapiens
  MAP TO AC004816.1; EXPRESSED IN PLACENTA, SIGNAL = 0.92; EXPRESSED IN BRAIN, SIGNAL = 1.1; EXPRESSED IN BONE MARROW, SIGNAL =   1; EXPRESSED IN ADULT LIVER, SIGNAL =   1; EXPRESSED IN LUNG, SIGNAL = 0.88; EXPRESSED IN FETAL LIVER, SIGNAL = 1.1; SWISSPROT HIT: P80192, EVALUE 7.00e-73; EST_HUMAN HIT: AW452931.1, EVALUE 4.00e-53
LEIDFAELTLEEIIGIGGFGKVYRAFWIGDEVAVKAARHDPDEDISQTIENVRQEAKLFAMLKHPNIIALRGVCLKEPNLCLVMEFARGGPLNRVLSGKRIPPDILVNWAVQIARGMNYLHDEAIVPIIHRDLKSSNSEYEEMGLEGLRAVAVVSHDVSRS

SEQ ID NO: 43543 - protein, 98 aa, Homo sapiens
  MAP TO AC004843.1; EXPRESSED IN LUNG, SIGNAL = 1.6; EXPRESSED IN FETAL LIVER, SIGNAL = 1.4; EXPRESSED IN PLACENTA, SIGNAL = 1.6; EXPRESSED IN BRAIN, SIGNAL = 1.6; EXPRESSED IN BONE MARROW, SIGNAL = 1.4; EXPRESSED IN ADULT LIVER, SIGNAL = 1.5; SWISSPROT HIT: Q59699, EVALUE 3.20e-01; EST_HUMAN HIT: BF366231.1, EVALUE 1.30e+00
HLKEEMQEDEQSAVQEVGDKEKVMSQKPTGTWSLLQGTHYTKVSMHVTEGALERGHSLPKRVITKGHVTEGDLWFGLEGLFRILLDKARWKEDVMRPC

SEQ ID NO: 43544 - protein, 28 aa, Homo sapiens
  MAP TO AC006199.1; EXPRESSED IN BONE MARROW, SIGNAL = 0.65; EXPRESSED IN LUNG, SIGNAL = 0.45; EXPRESSED IN FETAL LIVER, SIGNAL = 0.84; EXPRESSED IN BRAIN, SIGNAL = 0.6; EXPRESSED IN ADULT LIVER, SIGNAL = 1.1
TLSIPISISISISISISISMYIYMPYFS

SEQ ID NO: 43545 - protein, 76 aa, Homo sapiens
  MAP TO AC005683.2; EXPRESSED IN LUNG, SIGNAL = 0.83; EXPRESSED IN BRAIN, SIGNAL = 2.4; EXPRESSED IN BONE MARROW, SIGNAL = 2.1; EXPRESSED IN PLACENTA, SIGNAL = 0.91; EXPRESSED IN FETAL LIVER, SIGNAL = 0.86; EXPRESSED IN ADULT LIVER, SIGNAL = 0.64; SWISSPROT HIT: P35331, EVALUE 4.00e-40; EST_HUMAN HIT: AU130055.1, EVALUE 5.00e-39
DAEDHKPLKKGSRTPSDRTVKKEDSDDSLVDYGEGVNGQFNEDGSFIGQYSGKKEKEPAEGNESSEAPSPVNAMNS

SEQ ID NO: 43546 - protein, 63 aa, Homo sapiens
  MAP TO AC003098.1; EXPRESSED IN BONE MARROW, SIGNAL = 0.67; EXPRESSED IN LUNG, SIGNAL = 0.84; EXPRESSED IN ADULT LIVER, SIGNAL = 0.67; EXPRESSED IN PLACENTA, SIGNAL = 0.63; EXPRESSED IN BRAIN, SIGNAL = 0.7; SWISSPROT HIT: Q13368, EVALUE 2.00e-28; EST_HUMAN HIT: AI223415.1, EVALUE 2.00e-27
PLSLQDEQQQEMAASAAFIDRHYGHLVDAVLVKEDLQGAYSQLKVVLEKLSKDTHWVPVSWVR

SEQ ID NO: 43547 - protein, 62 aa, Homo sapiens
  MAP TO AC005771.1; EXPRESSED IN PLACENTA, SIGNAL = 1.3; EXPRESSED IN LUNG, SIGNAL = 1.5; EXPRESSED IN FETAL LIVER, SIGNAL = 1.2; EXPRESSED IN BRAIN, SIGNAL = 1.2; EXPRESSED IN BONE MARROW, SIGNAL = 1.2; EXPRESSED IN ADULT LIVER, SIGNAL = 1.3; SWISSPROT HIT: Q06649, EVALUE 7.80e+00; EST_HUMAN HIT: AV762100.1, EVALUE 5.90e+00
KIIFNFMKDFKAVRLFPHITSDMEYEHFQILPSHQDCLEFTTSKRHKASYNKNPQNTSGMQM

SEQ ID NO: 43548 - protein, 60 aa, Homo sapiens
  MAP TO AC005518.2; EXPRESSED IN BRAIN, SIGNAL = 0.68; EXPRESSED IN LUNG, SIGNAL = 0.68; EXPRESSED IN BONE MARROW, SIGNAL = 0.59; EXPRESSED IN ADULT LIVER, SIGNAL = 0.49; SWISSPROT HIT: O51634, EVALUE 2.00e+00
DKVWTIVSHDLQMQTPVVGYNPEKYSVTQLVYSASMDQISAITDSAEYCEQYVSYFCKMS

SEQ ID NO: 43549 - protein, 82 aa, Homo sapiens
  MAP TO AC005023.1; EXPRESSED IN PLACENTA, SIGNAL = 0.66; EXPRESSED IN BRAIN, SIGNAL = 0.57; EXPRESSED IN ADULT LIVER, SIGNAL = 0.67; EXPRESSED IN LUNG, SIGNAL = 0.7; EXPRESSED IN FETAL LIVER, SIGNAL = 0.7; EXPRESSED IN BONE MARROW, SIGNAL = 0.82; EST_HUMAN HIT: AI632198.1, EVALUE 1.00e-03; SWISSPROT HIT: O54889, EVALUE 4.20e-01
AKDIETSVTEAGGDDEKKIRTKPEQGAGAGKESHVYAGAADPMIHENQKGGGGHQEPWQQQPEELAQDSSAEDPQPQDQERL

SEQ ID NO: 43550 - protein, 49 aa, Homo sapiens
  MAP TO AC006480.2; EXPRESSED IN PLACENTA, SIGNAL = 0.93; EXPRESSED IN FETAL LIVER, SIGNAL =   1; EXPRESSED IN ADULT LIVER, SIGNAL = 0.94; EXPRESSED IN LUNG, SIGNAL = 0.96; EXPRESSED IN BRAIN, SIGNAL = 0.93; EXPRESSED IN BONE MARROW, SIGNAL = 0.95; EST_HUMAN HIT: AW958605.1, EVALUE 1.00e-23; SWISSPROT HIT: O43184, EVALUE 2.70e+00
SFCEFVGTLVCRCQYILLHDDFPMDNLISLLTGFSDSQVCAFCHTSTLA

SEQ ID NO: 43551 - protein, 50 aa, Homo sapiens
  MAP TO AC006480.2; EXPRESSED IN PLACENTA, SIGNAL = 0.93; EXPRESSED IN FETAL LIVER, SIGNAL =   1; EXPRESSED IN ADULT LIVER, SIGNAL = 0.94; EXPRESSED IN LUNG, SIGNAL = 0.96; EXPRESSED IN BRAIN, SIGNAL = 0.93; EXPRESSED IN BONE MARROW, SIGNAL = 0.95; EST_HUMAN HIT: BE796279.1, EVALUE 6.00e-14
AASVSLWGHWSVGASTSSSMMTSLWTTSSPCSLASQTHKSAPSVTLAPWL

SEQ ID NO: 43552 - protein, 26 aa, Homo sapiens
  MAP TO AC004074.1; EXPRESSED IN PLACENTA, SIGNAL = 0.93; EXPRESSED IN LUNG, SIGNAL = 0.81; EXPRESSED IN FETAL LIVER, SIGNAL = 0.87; EXPRESSED IN BONE MARROW, SIGNAL = 1.2; EXPRESSED IN ADULT LIVER, SIGNAL = 0.96; EXPRESSED IN BRAIN, SIGNAL = 0.96; EST_HUMAN HIT: AA296652.1, EVALUE 2.10e-02
VLLCCLNSRALVPCTPASPVMTKGGQ

SEQ ID NO: 43553 - protein, 26 aa, Homo sapiens
  MAP TO AC004220.1; EXPRESSED IN BRAIN, SIGNAL = 0.76; EXPRESSED IN ADULT LIVER, SIGNAL = 3.2; EXPRESSED IN PLACENTA, SIGNAL = 1.3; EXPRESSED IN LUNG, SIGNAL = 0.61; EXPRESSED IN BONE MARROW, SIGNAL = 0.81; EXPRESSED IN FETAL LIVER, SIGNAL = 0.78
LPLSAQALSHGKSPNQISANKKVWKM

SEQ ID NO: 43554 - protein, 46 aa, Homo sapiens
  MAP TO AC003684.1; EXPRESSED IN LUNG, SIGNAL = 1.1; EXPRESSED IN BRAIN, SIGNAL = 0.79; EXPRESSED IN BONE MARROW, SIGNAL = 1.1; EXPRESSED IN ADULT LIVER, SIGNAL =   1; EXPRESSED IN PLACENTA, SIGNAL =   1; EXPRESSED IN FETAL LIVER, SIGNAL = 1.1
YLMIYLSHAFKQCLGIPGNRCSMNTCSINMLSVLKAFHFYCTDFLV

SEQ ID NO: 43555 - protein, 72 aa, Homo sapiens
  MAP TO AC005846.1; EXPRESSED IN PLACENTA, SIGNAL = 1.1; EXPRESSED IN LUNG, SIGNAL = 0.68; EXPRESSED IN BRAIN, SIGNAL = 0.65; EXPRESSED IN BONE MARROW, SIGNAL = 0.59; EXPRESSED IN ADULT LIVER, SIGNAL = 0.63; EST_HUMAN HIT: AI914718.1, EVALUE 7.00e-03; SWISSPROT HIT: Q92570, EVALUE 2.10e-01
MKASAWRAPSVPACIPESATLPAPPSLETATPGNGGCAACSGRPAWGTGEGSWVSRGGGRWKRTWTVPRKKR

SEQ ID NO: 43556 - protein, 57 aa, Homo sapiens
  MAP TO AC005068.1; EXPRESSED IN BRAIN, SIGNAL = 0.64; EXPRESSED IN LUNG, SIGNAL = 0.65; EXPRESSED IN BONE MARROW, SIGNAL = 0.53; EXPRESSED IN ADULT LIVER, SIGNAL = 0.73; EXPRESSED IN PLACENTA, SIGNAL = 0.64; EST_HUMAN HIT: T68053.1, EVALUE 1.60e+00; SWISSPROT HIT: P08183, EVALUE 3.00e-27
DVSKINEGIGDKIGMFFQSMATFFTGFIVGFTRGWKLTLVILAISPVLGLSAAVWAK

SEQ ID NO: 43557 - protein, 44 aa, Homo sapiens
  MAP TO AC003103.1; EXPRESSED IN BONE MARROW, SIGNAL = 1.4; EXPRESSED IN ADULT LIVER, SIGNAL = 1.6; EXPRESSED IN PLACENTA, SIGNAL = 1.5; EXPRESSED IN LUNG, SIGNAL = 1.7; EXPRESSED IN FETAL LIVER, SIGNAL = 1.6; EXPRESSED IN BRAIN, SIGNAL = 1.4; EST_HUMAN HIT: BE561063.1, EVALUE 1.00e-19; SWISSPROT HIT: Q28559, EVALUE 1.00e-20
DILDWKTSRTFFYWRLRRLLLEDLVKKKIHNANPELTDGQIQAM

SEQ ID NO: 43558 - protein, 51 aa, Homo sapiens
  MAP TO AC005863.1; EXPRESSED IN BONE MARROW, SIGNAL = 1.2; EXPRESSED IN ADULT LIVER, SIGNAL = 1.2; EXPRESSED IN PLACENTA, SIGNAL = 1.3; EXPRESSED IN LUNG, SIGNAL = 1.3; EXPRESSED IN FETAL LIVER, SIGNAL = 1.3; EXPRESSED IN BRAIN, SIGNAL = 1.2; EST_HUMAN HIT: AA985031.1, EVALUE 3.00e-03; SWISSPROT HIT: Q39799, EVALUE 4.70e+00
RQQGALFKGQVEGSCWPRGCCCAWQGTWFPGCRSHCSSRALGAACTAKRRR

SEQ ID NO: 43559 - protein, 58 aa, Homo sapiens
  MAP TO AC006518.17; EXPRESSED IN ADULT LIVER, SIGNAL = 0.94; EXPRESSED IN LUNG, SIGNAL = 1.1; EXPRESSED IN FETAL LIVER, SIGNAL = 0.99; EXPRESSED IN BRAIN, SIGNAL = 0.96; EXPRESSED IN BONE MARROW, SIGNAL =   1; EXPRESSED IN PLACENTA, SIGNAL = 1.2; EST_HUMAN HIT: BE781612.1, EVALUE 8.00e-11; SWISSPROT HIT: O14207, EVALUE 9.10e-01
TSTVFIFIPFTLSLAMFLLLIFSMWKHRKKMQHTVKISGDASTKAHRGVKSVITFFLL

SEQ ID NO: 43560 - protein, 49 aa, Homo sapiens
  MAP TO AC005070.1; EXPRESSED IN LUNG, SIGNAL = 1.2; EXPRESSED IN PLACENTA, SIGNAL = 1.2; EXPRESSED IN FETAL LIVER, SIGNAL = 0.97; EXPRESSED IN BRAIN, SIGNAL = 1.4; EXPRESSED IN BONE MARROW, SIGNAL = 1.1; EXPRESSED IN ADULT LIVER, SIGNAL =   1; EST_HUMAN HIT: AI808450.1, EVALUE 7.00e-23; SWISSPROT HIT: P36616, EVALUE 5.00e-08
VLQGLDYLHSKCKIIHTDIKPENILMCVDDAYVRRMAAEATEWQKAGAP

SEQ ID NO: 43561 - protein, 72 aa, Homo sapiens
  MAP TO AC000111.1; EXPRESSED IN PLACENTA, SIGNAL = 0.86; EXPRESSED IN LUNG, SIGNAL =   1; EXPRESSED IN BONE MARROW, SIGNAL = 1.4; EXPRESSED IN FETAL LIVER, SIGNAL = 0.92; EXPRESSED IN BRAIN, SIGNAL = 1.2; EXPRESSED IN ADULT LIVER, SIGNAL = 1.1; EST_HUMAN HIT: BE537805.1, EVALUE 3.10e+00; SWISSPROT HIT: P13569, EVALUE 1.00e-35
EVTKAVQPLLLGRIIASYDPDNKEERSIAIYLGIGLCLLFIVRTLLLHPAIFGLHHIGMQMRIAMFSLIYKK

SEQ ID NO: 43562 - protein, 61 aa, Homo sapiens
  MAP TO AC004460.1; EXPRESSED IN FETAL LIVER, SIGNAL = 1.6; EXPRESSED IN HELA, SIGNAL =   2; EXPRESSED IN PLACENTA, SIGNAL = 0.87; EXPRESSED IN LUNG, SIGNAL = 0.97; EXPRESSED IN BRAIN, SIGNAL = 0.58; EXPRESSED IN BONE MARROW, SIGNAL = 0.95; EXPRESSED IN ADULT LIVER, SIGNAL = 0.81; EST_HUMAN HIT: AA169255.1, EVALUE 6.00e-04; SWISSPROT HIT: P70091, EVALUE 4.50e+00
LLIYFPVLARYLEMPLKELKISFYFHAWGQVPGKPLRGVSAPSHLHISPLHVPEVVLQNKF

SEQ ID NO: 43563 - protein, 34 aa, Homo sapiens
  MAP TO AC005833.1; EXPRESSED IN PLACENTA, SIGNAL = 0.64; EXPRESSED IN BONE MARROW, SIGNAL = 0.68; EXPRESSED IN ADULT LIVER, SIGNAL = 0.67; EXPRESSED IN LUNG, SIGNAL = 0.71; EXPRESSED IN FETAL LIVER, SIGNAL = 0.69; EXPRESSED IN BRAIN, SIGNAL = 0.73; SWISSPROT HIT: P48569, EVALUE 9.80e-01
LGLGMEGYAEGTVFAKTWTAWCALGLKIVQIAGA

SEQ ID NO: 43564 - protein, 44 aa, Homo sapiens
  MAP TO AC005702.1; EXPRESSED IN PLACENTA, SIGNAL = 0.67; EXPRESSED IN LUNG, SIGNAL = 0.89; EXPRESSED IN BONE MARROW, SIGNAL = 0.64; EXPRESSED IN ADULT LIVER, SIGNAL = 0.6; EXPRESSED IN FETAL LIVER, SIGNAL = 0.68; EXPRESSED IN BRAIN, SIGNAL = 0.77; EST_HUMAN HIT: AV729437.1, EVALUE 3.00e-18; SWISSPROT HIT: P04008, EVALUE 6.30e+00
RCGPWARFWNRFVDAWARDDDTVLKHLRASMKKLTRKQGDLPPP

SEQ ID NO: 43565 - protein, 31 aa, Homo sapiens
  MAP TO AC005702.1; EXPRESSED IN PLACENTA, SIGNAL = 0.67; EXPRESSED IN LUNG, SIGNAL = 0.89; EXPRESSED IN BONE MARROW, SIGNAL = 0.64; EXPRESSED IN ADULT LIVER, SIGNAL = 0.6; EXPRESSED IN FETAL LIVER, SIGNAL = 0.68; EXPRESSED IN BRAIN, SIGNAL = 0.77; EST_HUMAN HIT: AV729437.1, EVALUE 8.00e-10
PGVARGHVFGTGSLMPGPGMMTLCSSILGPL

SEQ ID NO: 43566 - protein, 28 aa, Homo sapiens
  MAP TO AC004875.1; EXPRESSED IN PLACENTA, SIGNAL = 0.82; EXPRESSED IN FETAL LIVER, SIGNAL = 0.8; EXPRESSED IN BRAIN, SIGNAL = 0.91; EXPRESSED IN ADULT LIVER, SIGNAL = 0.79; EXPRESSED IN LUNG, SIGNAL = 0.71; EXPRESSED IN BONE MARROW, SIGNAL = 0.8
VLSMYFSIIQSQSHWHMSCSSPYIRMYQ

SEQ ID NO: 43567 - protein, 32 aa, Homo sapiens
  MAP TO AC005533.2; EXPRESSED IN BONE MARROW, SIGNAL = 1.2; EXPRESSED IN PLACENTA, SIGNAL = 0.8; EXPRESSED IN LUNG, SIGNAL = 0.98; EXPRESSED IN FETAL LIVER, SIGNAL = 0.93; EXPRESSED IN ADULT LIVER, SIGNAL = 0.84; EXPRESSED IN BRAIN, SIGNAL = 1.1; EST_HUMAN HIT: AI187394.1, EVALUE 6.00e-08; SWISSPROT HIT: P49758, EVALUE 7.00e-12
SVYGVTEESQAQSPVHVLSQPIRKTTKEDIRK

SEQ ID NO: 43568 - protein, 34 aa, Homo sapiens
  MAP TO AC006501.5; EXPRESSED IN LUNG, SIGNAL = 0.71; EXPRESSED IN BRAIN, SIGNAL = 0.74; EXPRESSED IN BONE MARROW, SIGNAL = 0.61; EXPRESSED IN ADULT LIVER, SIGNAL = 0.64; EXPRESSED IN PLACENTA, SIGNAL = 0.68; EST_HUMAN HIT: AU119728.1, EVALUE 3.00e-11
HALLAFMFSRQEGKLNRQQTMELGHHILKAHIFK

SEQ ID NO: 43569 - protein, 62 aa, Homo sapiens
  MAP TO AC004583.1; EXPRESSED IN PLACENTA, SIGNAL = 0.81; EXPRESSED IN LUNG, SIGNAL = 0.83; EXPRESSED IN FETAL LIVER, SIGNAL = 0.75; EXPRESSED IN BRAIN, SIGNAL = 0.81; EXPRESSED IN ADULT LIVER, SIGNAL = 0.66; EXPRESSED IN BONE MARROW, SIGNAL = 0.98; SWISSPROT HIT: Q04859, EVALUE 1.50e+00; EST_HUMAN HIT: AU124754.1, EVALUE 1.00e-29
PSCDNVEEDMNASAQGASATVLEETRKETAPVQLPVSGPELAAMMKIGTRVMRGVDWKWGDQ

SEQ ID NO: 43570 - protein, 57 aa, Homo sapiens
  MAP TO AC002288.1; EXPRESSED IN ADULT LIVER, SIGNAL =   1; EXPRESSED IN PLACENTA, SIGNAL = 1.1; EXPRESSED IN LUNG, SIGNAL = 1.2; EXPRESSED IN FETAL LIVER, SIGNAL = 0.93; EXPRESSED IN BRAIN, SIGNAL =   1; EXPRESSED IN BONE MARROW, SIGNAL = 0.9; EST_HUMAN HIT: AA071547.1, EVALUE 3.00e-24; SWISSPROT HIT: P00008, EVALUE 7.00e-26
EKSKKIFVQKCAQCHTVEKGGKHKTGPNLFGWKTGQAIGFSYTDTSKNKGITWGEDT

SEQ ID NO: 43571 - protein, 44 aa, Homo sapiens
  MAP TO AC005872.2; EXPRESSED IN BONE MARROW, SIGNAL = 0.81; EXPRESSED IN ADULT LIVER, SIGNAL = 0.94; EXPRESSED IN PLACENTA, SIGNAL = 0.93; EXPRESSED IN LUNG, SIGNAL = 0.91; EXPRESSED IN FETAL LIVER, SIGNAL = 0.94; EXPRESSED IN BRAIN, SIGNAL =   1; SWISSPROT HIT: P38857, EVALUE 1.60e+00
QRKQQVQRPWGQRMIGISKKKQPITKVHTPINLTVLRKVSYWTM

SEQ ID NO: 43572 - protein, 91 aa, Homo sapiens
  MAP TO AC005538.2; EXPRESSED IN BRAIN, SIGNAL = 1.2; EXPRESSED IN PLACENTA, SIGNAL = 1.2; EXPRESSED IN LUNG, SIGNAL = 2.1; EXPRESSED IN FETAL LIVER, SIGNAL = 1.1; EXPRESSED IN BONE MARROW, SIGNAL = 1.3; EXPRESSED IN ADULT LIVER, SIGNAL = 1.2; SWISSPROT HIT: O94759, EVALUE 2.00e-05; EST_HUMAN HIT: BE791173.1, EVALUE 1.00e-21
EVMFTALIKDRPKFVRLFLENGLNLRKFLTHDVLTELFSNHFSTLVYRNLQIAKNSYNDALLTFVWKLVANFRRGFRKEDRNGRDEMDIEL

SEQ ID NO: 43573 - protein, 37 aa, Homo sapiens
  MAP TO AC003071.1; EXPRESSED IN PLACENTA, SIGNAL = 0.71; EXPRESSED IN BRAIN, SIGNAL = 0.87; EXPRESSED IN ADULT LIVER, SIGNAL = 0.51; EXPRESSED IN LUNG, SIGNAL = 0.58; EXPRESSED IN BONE MARROW, SIGNAL = 0.51; EST_HUMAN HIT: BF213628.1, EVALUE 4.00e-09; SWISSPROT HIT: P28280, EVALUE 1.70e+00
GQGRGLSPWQRLSSWWPGHCAAPPTSSWCGCVFPPFS

SEQ ID NO: 43574 - protein, 77 aa, Homo sapiens
  MAP TO AC004977.1; EXPRESSED IN PLACENTA, SIGNAL = 0.82; EXPRESSED IN LUNG, SIGNAL = 0.94; EXPRESSED IN FETAL LIVER, SIGNAL = 0.8; EXPRESSED IN ADULT LIVER, SIGNAL = 0.76; EXPRESSED IN BRAIN, SIGNAL = 1.3; EXPRESSED IN BONE MARROW, SIGNAL = 0.82; EST_HUMAN HIT: AA740742.1, EVALUE 3.00e-22; SWISSPROT HIT: P19474, EVALUE 1.00e-03
DKIKSQRMRISTEFSKLHNFLVEEEDLFLQRLNKEEEETKKKLNENTLKLNQTIASLKKLILEVGEKSQAPTLELLQ

SEQ ID NO: 43575 - protein, 17 aa, Homo sapiens
  MAP TO AC004977.1; EXPRESSED IN PLACENTA, SIGNAL = 0.82; EXPRESSED IN LUNG, SIGNAL = 0.94; EXPRESSED IN FETAL LIVER, SIGNAL = 0.8; EXPRESSED IN ADULT LIVER, SIGNAL = 0.76; EXPRESSED IN BRAIN, SIGNAL = 1.3; EXPRESSED IN BONE MARROW, SIGNAL = 0.82; EST_HUMAN HIT: AA765844.1, EVALUE 1.00e-03
QSCTTSWLKKRTCFFRD

SEQ ID NO: 43576 - protein, 61 aa, Homo sapiens
  MAP TO AC003104.1; EXPRESSED IN PLACENTA, SIGNAL =   1; EXPRESSED IN LUNG, SIGNAL = 1.1; EXPRESSED IN FETAL LIVER, SIGNAL = 0.93; EXPRESSED IN BONE MARROW, SIGNAL = 0.84; EXPRESSED IN ADULT LIVER, SIGNAL = 0.99; EXPRESSED IN BRAIN, SIGNAL = 0.88; EST_HUMAN HIT: AI905004.1, EVALUE 1.00e-29; SWISSPROT HIT: P10448, EVALUE 1.50e+00
VWGLQMIYKSVKLPVLKVRSMLLETPQGRIQAKKWSRVPFSVPDFDFLQHCAENLSDLSLD

SEQ ID NO: 43577 - protein, 37 aa, Homo sapiens
  MAP TO AC003104.1; EXPRESSED IN PLACENTA, SIGNAL =   1; EXPRESSED IN LUNG, SIGNAL = 1.1; EXPRESSED IN FETAL LIVER, SIGNAL = 0.93; EXPRESSED IN BONE MARROW, SIGNAL = 0.84; EXPRESSED IN ADULT LIVER, SIGNAL = 0.99; EXPRESSED IN BRAIN, SIGNAL = 0.88; EST_HUMAN HIT: AI905004.1, EVALUE 1.00e-13; SWISSPROT HIT: Q00175, EVALUE 6.40e+00
DLQVSEAASAQSPQHAAGDPSGADPGQKVVPRALLRA

SEQ ID NO: 43578 - protein, 90 aa, Homo sapiens
  MAP TO AC004147.1; EXPRESSED IN LUNG, SIGNAL = 1.1; EXPRESSED IN BRAIN, SIGNAL = 1.1; EXPRESSED IN PLACENTA, SIGNAL = 1.1; EXPRESSED IN FETAL LIVER, SIGNAL = 1.3; EXPRESSED IN BONE MARROW, SIGNAL = 1.1; EXPRESSED IN ADULT LIVER, SIGNAL = 1.3; SWISSPROT HIT: Q62962, EVALUE 6.00e-35; EST_HUMAN HIT: AI277385.1, EVALUE 2.00e-16
VPMDLKESPSEGSLQPSSIQIFANTSTLHGIRHIFVYGPLTIRRVLWAVAFVGSLGLLLVESSERVSYYFSYQHVTKVDEVVAQSLVFPA

SEQ ID NO: 43579 - protein, 92 aa, Homo sapiens
  MAP TO AC005541.1; EXPRESSED IN LUNG, SIGNAL = 0.83; EXPRESSED IN BONE MARROW, SIGNAL = 1.1; EXPRESSED IN PLACENTA, SIGNAL = 0.78; EXPRESSED IN FETAL LIVER, SIGNAL = 0.86; EXPRESSED IN BRAIN, SIGNAL = 0.99; EXPRESSED IN ADULT LIVER, SIGNAL = 0.89; EST_HUMAN HIT: AA354238.1, EVALUE 9.00e-19
SKNFVVEPLGFSKYKNVSSAKWGQFDLLFSNLDALYFSFLIALARTSSTMLIKTGKSRHLSLVPVLRKKAFSSFPFSTMLAVGLSYMAFIML

SEQ ID NO: 43580 - protein, 40 aa, Homo sapiens
  MAP TO AC003078.1; EXPRESSED IN LUNG, SIGNAL = 0.66; EXPRESSED IN PLACENTA, SIGNAL = 0.74; EXPRESSED IN BRAIN, SIGNAL = 0.62; EXPRESSED IN BONE MARROW, SIGNAL = 0.71; EXPRESSED IN ADULT LIVER, SIGNAL = 0.75; SWISSPROT HIT: P30988, EVALUE 2.00e-12; EST_HUMAN HIT: AA330431.1, EVALUE 1.90e+00
RAAAAAAEAGDIPIYICHQELRNEPANNQGEESAEIIPLN

SEQ ID NO: 43581 - protein, 21 aa, Homo sapiens
  MAP TO AC003078.1; EXPRESSED IN LUNG, SIGNAL = 0.66; EXPRESSED IN PLACENTA, SIGNAL = 0.74; EXPRESSED IN BRAIN, SIGNAL = 0.62; EXPRESSED IN BONE MARROW, SIGNAL = 0.71; EXPRESSED IN ADULT LIVER, SIGNAL = 0.75
LALQPLLRRLATSQFTSAIRS

SEQ ID NO: 43582 - protein, 52 aa, Homo sapiens
  MAP TO AC004123.1; EXPRESSED IN PLACENTA, SIGNAL = 0.78; EXPRESSED IN LUNG, SIGNAL = 0.77; EXPRESSED IN FETAL LIVER, SIGNAL = 0.8; EXPRESSED IN BRAIN, SIGNAL = 0.63; EXPRESSED IN ADULT LIVER, SIGNAL = 0.75; EXPRESSED IN BONE MARROW, SIGNAL = 0.77
EEEEEEEEEEEEEEQKEEEEKEEEEDTLTMRFLCDPRILSACERLASHCLLP

SEQ ID NO: 43583 - protein, 29 aa, Homo sapiens
  MAP TO AC003664.1; EXPRESSED IN BRAIN, SIGNAL = 0.93; EXPRESSED IN BONE MARROW, SIGNAL = 0.99; EXPRESSED IN ADULT LIVER, SIGNAL = 0.87; EXPRESSED IN PLACENTA, SIGNAL =   1; EXPRESSED IN LUNG, SIGNAL = 0.98; EXPRESSED IN FETAL LIVER, SIGNAL = 0.87; EST_HUMAN HIT: AA527986.1, EVALUE 7.00e-05
LESGSPRQRCWQIQCLVRACFLVHEQLFS

SEQ ID NO: 43584 - protein, 55 aa, Homo sapiens
  MAP TO AC005722.1; EXPRESSED IN BONE MARROW, SIGNAL = 0.99; EXPRESSED IN ADULT LIVER, SIGNAL = 0.86; EXPRESSED IN PLACENTA, SIGNAL = 0.9; EXPRESSED IN LUNG, SIGNAL = 1.1; EXPRESSED IN FETAL LIVER, SIGNAL = 0.95; EXPRESSED IN BRAIN, SIGNAL = 0.96; EST_HUMAN HIT: T16293.1, EVALUE 2.00e-25; SWISSPROT HIT: P33261, EVALUE 4.60e+00
PKTQASSNLLALVTRHGPAEEQSKDGNEPRECAHCLLVQGSERQRAEQQSKAVFG

SEQ ID NO: 43585 - protein, 62 aa, Homo sapiens
  MAP TO AC006254.10; EXPRESSED IN PLACENTA, SIGNAL = 0.85; EXPRESSED IN BRAIN, SIGNAL = 0.8; EXPRESSED IN BONE MARROW, SIGNAL = 0.9; EXPRESSED IN ADULT LIVER, SIGNAL = 6.5; EXPRESSED IN LUNG, SIGNAL = 0.91; EXPRESSED IN FETAL LIVER, SIGNAL =  10; EST_HUMAN HIT: T68764.1, EVALUE 3.00e-17; SWISSPROT HIT: Q06033, EVALUE 1.00e-31
GFYEEVANPLLTGVEMEYPENAILDLTQNTYQHFYDGSEIVVAGRLVDEDMNSFKADVKGHG

SEQ ID NO: 43586 - protein, 30 aa, Homo sapiens
  MAP TO AC005079.1; EXPRESSED IN LUNG, SIGNAL = 0.83; EXPRESSED IN BONE MARROW, SIGNAL = 0.71; EXPRESSED IN ADULT LIVER, SIGNAL = 0.63; EXPRESSED IN PLACENTA, SIGNAL = 1.1; EXPRESSED IN FETAL LIVER, SIGNAL = 0.73; EXPRESSED IN BRAIN, SIGNAL = 0.7
VVLHSSSQLSYEIVDLKHYIELGAASDLKK

SEQ ID NO: 43587 - protein, 31 aa, Homo sapiens
  MAP TO AC005746.1; EXPRESSED IN LUNG, SIGNAL = 0.83; EXPRESSED IN PLACENTA, SIGNAL = 0.82; EXPRESSED IN FETAL LIVER, SIGNAL = 0.69; EXPRESSED IN BRAIN, SIGNAL = 0.76; EXPRESSED IN ADULT LIVER, SIGNAL = 0.78; EXPRESSED IN BONE MARROW, SIGNAL = 0.69
SKAKMVNHVVFDVTISTISSVQIDGCIYRNW

SEQ ID NO: 43588 - protein, 27 aa, Homo sapiens
  MAP TO AC005844.7; EXPRESSED IN LUNG, SIGNAL = 1.4; EXPRESSED IN PLACENTA, SIGNAL = 1.4; EXPRESSED IN FETAL LIVER, SIGNAL = 1.2; EXPRESSED IN BRAIN, SIGNAL = 1.3; EXPRESSED IN BONE MARROW, SIGNAL = 1.2; EXPRESSED IN ADULT LIVER, SIGNAL = 1.2; EST_HUMAN HIT: AW852797.1, EVALUE 2.00e-09
CHGKGRKKWRTKDSSRWPGGHNSNARS

SEQ ID NO: 43589 - protein, 51 aa, Homo sapiens
  MAP TO AC003117.1; EXPRESSED IN BRAIN, SIGNAL = 0.85; EXPRESSED IN BONE MARROW, SIGNAL = 0.54; EXPRESSED IN PLACENTA, SIGNAL = 0.67; EXPRESSED IN LUNG, SIGNAL = 0.88; EXPRESSED IN ADULT LIVER, SIGNAL = 0.69; EST_HUMAN HIT: AV742621.1, EVALUE 1.00e-03
NTESKKLSPPVVETLPTVDLHEESSNAVVDSETVENISSSSTSEITPISKL

SEQ ID NO: 43590 - protein, 85 aa, Homo sapiens
  MAP TO AC005988.1; EXPRESSED IN LUNG, SIGNAL = 1.1; EXPRESSED IN FETAL LIVER, SIGNAL = 0.88; EXPRESSED IN BRAIN, SIGNAL =   1; EXPRESSED IN BONE MARROW, SIGNAL = 0.97; EXPRESSED IN PLACENTA, SIGNAL = 0.92; EXPRESSED IN ADULT LIVER, SIGNAL =   1; SWISSPROT HIT: Q9ZMM2, EVALUE 5.10e+00; EST_HUMAN HIT: H12168.1, EVALUE 6.00e-04
SAGVMSVYLFMKRYTAEDMYRPHPGFYRPRLSNCSDYSGQFLHPDAWVRGRSPSDISSEASLQMNSNYPALLKCPDYDQMSSSPC

SEQ ID NO: 43591 - protein, 31 aa, Homo sapiens
  MAP TO AC000056.1; EXPRESSED IN BONE MARROW, SIGNAL = 0.71; EXPRESSED IN PLACENTA, SIGNAL = 1.5; EXPRESSED IN LUNG, SIGNAL = 1.2; EXPRESSED IN ADULT LIVER, SIGNAL = 1.5; EXPRESSED IN BRAIN, SIGNAL = 0.91
GIRFNLSVKTDFSPVMFLNICDQPSLLREGE

SEQ ID NO: 43592 - protein, 53 aa, Homo sapiens
  MAP TO AC004050.1; EXPRESSED IN LUNG, SIGNAL = 1.6; EXPRESSED IN BRAIN, SIGNAL =   1; EXPRESSED IN PLACENTA, SIGNAL = 1.9; EXPRESSED IN FETAL LIVER, SIGNAL = 0.95; EXPRESSED IN BONE MARROW, SIGNAL = 1.8; EXPRESSED IN ADULT LIVER, SIGNAL =   1; EST_HUMAN HIT: W68010.1, EVALUE 8.40e+00; SWISSPROT HIT: Q61982, EVALUE 3.60e+00
KVCSKQHLLPLLRLFTLGRKISALKHGNPAGMLRGFRGPELSKPSPNECKECE

SEQ ID NO: 43593 - protein, 53 aa, Homo sapiens
  MAP TO AC004050.1; EXPRESSED IN LUNG, SIGNAL = 1.6; EXPRESSED IN BRAIN, SIGNAL =   1; EXPRESSED IN PLACENTA, SIGNAL = 1.9; EXPRESSED IN FETAL LIVER, SIGNAL = 0.95; EXPRESSED IN BONE MARROW, SIGNAL = 1.8; EXPRESSED IN ADULT LIVER, SIGNAL =   1; SWISSPROT HIT: P14646, EVALUE 2.70e+00; EST_HUMAN HIT: AA593534.1, EVALUE 1.70e-02
YSHSLHSFGLGLLNSGPLKPRSMPAGFPCFRAEIFLPSVKSLKRGRRCCLLHT

SEQ ID NO: 43594 - protein, 65 aa, Homo sapiens
  MAP TO AC004492.1; EXPRESSED IN PLACENTA, SIGNAL = 0.95; EXPRESSED IN LUNG, SIGNAL =   1; EXPRESSED IN BRAIN, SIGNAL = 0.58; EXPRESSED IN FETAL LIVER, SIGNAL = 0.67; EXPRESSED IN BONE MARROW, SIGNAL = 0.82; EXPRESSED IN ADULT LIVER, SIGNAL = 0.72; SWISSPROT HIT: Q92459, EVALUE 2.00e+00; EST_HUMAN HIT: AU130113.1, EVALUE 2.00e-31
YMKELQGFIARVMSDYFKHFECLDFVFDNTEAIAQRAVELFIRHASLIRPLGEGGKMRLAADFAQ

SEQ ID NO: 43595 - protein, 17 aa, Homo sapiens
  MAP TO AC004492.1; EXPRESSED IN PLACENTA, SIGNAL = 0.95; EXPRESSED IN LUNG, SIGNAL =   1; EXPRESSED IN BRAIN, SIGNAL = 0.58; EXPRESSED IN FETAL LIVER, SIGNAL = 0.67; EXPRESSED IN BONE MARROW, SIGNAL = 0.82; EXPRESSED IN ADULT LIVER, SIGNAL = 0.72; EST_HUMAN HIT: AV761652.1, EVALUE 3.70e-02
VQNQQQVAFSHLHQEVL

SEQ ID NO: 43596 - protein, 25 aa, Homo sapiens
  MAP TO AC006531.1; EXPRESSED IN LUNG, SIGNAL = 0.57; EXPRESSED IN BRAIN, SIGNAL = 0.95; EXPRESSED IN BONE MARROW, SIGNAL = 0.52; EXPRESSED IN ADULT LIVER, SIGNAL = 0.53; SWISSPROT HIT: Q00959, EVALUE 9.00e-08; EST_HUMAN HIT: AW950843.1, EVALUE 1.00e-04
YTANLAAFMIQEEFVDQVTGLSDKK

SEQ ID NO: 43597 - protein, 43 aa, Homo sapiens
  MAP TO AC006531.1; EXPRESSED IN LUNG, SIGNAL = 0.57; EXPRESSED IN BRAIN, SIGNAL = 0.95; EXPRESSED IN BONE MARROW, SIGNAL = 0.52; EXPRESSED IN ADULT LIVER, SIGNAL = 0.53; EST_HUMAN HIT: AW950843.1, EVALUE 6.00e-06
AWCSITPCLSRILKGPPARSWYLYGPSSLSYSWLATQPIWLPS

SEQ ID NO: 43598 - protein, 58 aa, Homo sapiens
  MAP TO AC004992.1; EXPRESSED IN LUNG, SIGNAL = 0.59; EXPRESSED IN BRAIN, SIGNAL = 0.95; EXPRESSED IN BONE MARROW, SIGNAL = 0.71; EXPRESSED IN PLACENTA, SIGNAL = 0.65; EXPRESSED IN FETAL LIVER, SIGNAL = 0.68; EXPRESSED IN ADULT LIVER, SIGNAL = 0.53
KTLDEITEEESVKRKEEDQVLIPGGTPMFRNCSDEKKPTKETEAAARERRKTRTVWFL

SEQ ID NO: 43599 - protein, 105 aa, Homo sapiens
  MAP TO AC002073.1; EXPRESSED IN LUNG, SIGNAL = 0.78; EXPRESSED IN BONE MARROW, SIGNAL = 1.1; EXPRESSED IN PLACENTA, SIGNAL = 1.1; EXPRESSED IN FETAL LIVER, SIGNAL = 1.2; EXPRESSED IN BRAIN, SIGNAL = 0.88; EXPRESSED IN ADULT LIVER, SIGNAL = 0.91; SWISSPROT HIT: P44516, EVALUE 2.80e-01; EST_HUMAN HIT: AI074033.1, EVALUE 8.00e-50
GEGPGCADDEGPVRRQGKVTIKYDPKELRKHLNLEEWILEQLTRLYDCQEEEISELEIDVDELLDMESDDAWASRVKELLVDCYKPTEAFISGLLDKIRAMQKLS

SEQ ID NO: 43600 - protein, 102 aa, Homo sapiens
  MAP TO AC004166.4; EXPRESSED IN LUNG, SIGNAL = 0.43; EXPRESSED IN BRAIN, SIGNAL = 0.64; EXPRESSED IN ADULT LIVER, SIGNAL = 0.46; EXPRESSED IN PLACENTA, SIGNAL = 0.62; EST_HUMAN HIT: AA861773.1, EVALUE 2.00e-08
TLELQVIKMPNSHQLTDSPALGLFSIPKERGMQPSVTFLGHGSLPHLTSSLIAPLSLGGMLLIYPQNKTIYSPKTGTRTLTLLASVLGMVLVPRSVSRWPSG

SEQ ID NO: 43601 - protein, 70 aa, Homo sapiens
  MAP TO AC005901.1; EXPRESSED IN PLACENTA, SIGNAL = 1.2; EXPRESSED IN LUNG, SIGNAL = 0.84; EXPRESSED IN FETAL LIVER, SIGNAL = 1.2; EXPRESSED IN BRAIN, SIGNAL = 0.83; EXPRESSED IN ADULT LIVER, SIGNAL = 0.95; EXPRESSED IN BONE MARROW, SIGNAL = 0.95; EST_HUMAN HIT: BE910741.1, EVALUE 2.40e+00; SWISSPROT HIT: P57082, EVALUE 5.00e-35
KEYPVISKSIMRQRLISPQLSATPDVGPLLGTHQALQHYQHENGAHSQLAEPQDLPLSTFPTQRDSSLFY

SEQ ID NO: 43602 - protein, 76 aa, Homo sapiens
  MAP TO AC005901.1; EXPRESSED IN PLACENTA, SIGNAL = 1.2; EXPRESSED IN LUNG, SIGNAL = 0.84; EXPRESSED IN FETAL LIVER, SIGNAL = 1.2; EXPRESSED IN BRAIN, SIGNAL = 0.83; EXPRESSED IN ADULT LIVER, SIGNAL = 0.95; EXPRESSED IN BONE MARROW, SIGNAL = 0.95; EST_HUMAN HIT: BE897864.1, EVALUE 7.00e-03; SWISSPROT HIT: Q05623, EVALUE 2.40e-02
SPPLQQRIPRDFQKHHEAEAHLPPALSHTGRGPPARHPPGTPALPARERGTLTARGAAGPAPQHLSHPEGLKPLLS

SEQ ID NO: 43603 - protein, 64 aa, Homo sapiens
  MAP TO AC004898.1; EXPRESSED IN PLACENTA, SIGNAL = 0.7; EXPRESSED IN LUNG, SIGNAL = 0.63; EXPRESSED IN BRAIN, SIGNAL = 0.92; EXPRESSED IN BONE MARROW, SIGNAL = 0.73; EXPRESSED IN ADULT LIVER, SIGNAL = 0.65; EST_HUMAN HIT: AL138274.1, EVALUE 3.00e-10; SWISSPROT HIT: P42722, EVALUE 2.60e+00
AFYLKNQHCFISMTLLLPHLSDTTLERFSAGLMIKLVPLHNLGLSPRLEIHSNLNYICKISFTI

SEQ ID NO: 43604 - protein, 81 aa, Homo sapiens
  MAP TO AC006262.1; EXPRESSED IN PLACENTA, SIGNAL = 0.99; EXPRESSED IN BRAIN, SIGNAL = 1.2; EXPRESSED IN ADULT LIVER, SIGNAL = 0.95; EXPRESSED IN LUNG, SIGNAL = 0.91; EXPRESSED IN FETAL LIVER, SIGNAL = 1.1; EXPRESSED IN BONE MARROW, SIGNAL = 1.1; EST_HUMAN HIT: AI806131.1, EVALUE 4.00e-46; SWISSPROT HIT: Q09023, EVALUE 4.20e+00
LCQPAPRCGDKIYNPLEQCCYNDAIVSLSETRQCGPPCTFWPCFELCCLDSFGLTNDFVVKLKVQGVNSQCHSSPISSKCE

SEQ ID NO: 43605 - protein, 64 aa, Homo sapiens
  MAP TO AC004578.3; EXPRESSED IN ADULT LIVER, SIGNAL = 0.92; EXPRESSED IN PLACENTA, SIGNAL = 0.83; EXPRESSED IN BONE MARROW, SIGNAL = 0.79; EXPRESSED IN LUNG, SIGNAL = 0.94; EXPRESSED IN FETAL LIVER, SIGNAL = 0.83; EXPRESSED IN BRAIN, SIGNAL = 0.93; EST_HUMAN HIT: T51067.1, EVALUE 2.00e+00
AHNLSSAWISSCGSSSVSHFSSVNTGVLSQPSSKASWCHLNCRLASPSQTNRPLCTGPRTWLRH

SEQ ID NO: 43606 - protein, 46 aa, Homo sapiens
  MAP TO AC006337.2; EXPRESSED IN PLACENTA, SIGNAL = 0.77; EXPRESSED IN LUNG, SIGNAL =   1; EXPRESSED IN FETAL LIVER, SIGNAL = 0.72; EXPRESSED IN BRAIN, SIGNAL = 0.83; EXPRESSED IN BONE MARROW, SIGNAL = 0.78; EXPRESSED IN ADULT LIVER, SIGNAL = 0.82
VMSVTDIMWHLHQCDVIDIKIRVISIMNNLRYCKFYASLLSALIIE

SEQ ID NO: 43607 - protein, 38 aa, Homo sapiens
  MAP TO AC004504.1; EXPRESSED IN LUNG, SIGNAL = 0.57; EXPRESSED IN BRAIN, SIGNAL = 0.65; EXPRESSED IN BONE MARROW, SIGNAL = 1.2; EXPRESSED IN ADULT LIVER, SIGNAL = 0.47
RLSQLIIQVITLMMRFWKNKLHCQYFTLQAGEHSSAYL

SEQ ID NO: 43608 - protein, 92 aa, Homo sapiens
  MAP TO AC006538.1; EXPRESSED IN PLACENTA, SIGNAL = 0.8; EXPRESSED IN BRAIN, SIGNAL = 0.88; EXPRESSED IN ADULT LIVER, SIGNAL = 0.85; EXPRESSED IN LUNG, SIGNAL = 0.78; EXPRESSED IN FETAL LIVER, SIGNAL = 0.97; EXPRESSED IN BONE MARROW, SIGNAL = 0.87; EST_HUMAN HIT: BF369299.1, EVALUE 3.00e-03; SWISSPROT HIT: P55315, EVALUE 5.80e-01
PAISQYHHLQHRHLPIPTSPNTHISRYRYLSIPPPPNTAISRYPHLPILLPLNTTTSNTTISNTATSNTTISNTATSNTAVSRYLHLRTPPP

SEQ ID NO: 43609 - protein, 40 aa, Homo sapiens; identical to SEQ ID NO: 40029
  MAP TO AC004999.1; EXPRESSED IN PLACENTA, SIGNAL = 1.3; EXPRESSED IN LUNG, SIGNAL = 1.1; EXPRESSED IN FETAL LIVER, SIGNAL = 1.2; EXPRESSED IN BRAIN, SIGNAL = 1.3; EXPRESSED IN ADULT LIVER, SIGNAL = 1.5; EXPRESSED IN BONE MARROW, SIGNAL =   1; EST_HUMAN HIT: W02108.1, EVALUE 1.40e+00; SWISSPROT HIT: Q16637, EVALUE 1.10e-01

SEQ ID NO: 43610 - protein, 43 aa, Homo sapiens
  MAP TO AC003678.1; EXPRESSED IN PLACENTA, SIGNAL = 1.3; EXPRESSED IN LUNG, SIGNAL = 1.2; EXPRESSED IN FETAL LIVER, SIGNAL = 1.3; EXPRESSED IN BONE MARROW, SIGNAL = 1.5; EXPRESSED IN BRAIN, SIGNAL = 1.6; EXPRESSED IN ADULT LIVER, SIGNAL = 1.1; SWISSPROT HIT: P30731, EVALUE 6.30e+00
RWLHSERDCEAVVPLLPDLLPRPWSPLQSPLPNHHLPSHTLGL

SEQ ID NO: 43611 - protein, 38 aa, Homo sapiens
  MAP TO AC005237.2; EXPRESSED IN LUNG, SIGNAL = 1.2; EXPRESSED IN PLACENTA, SIGNAL = 1.2; EXPRESSED IN FETAL LIVER, SIGNAL = 1.2; EXPRESSED IN BRAIN, SIGNAL = 0.91; EXPRESSED IN BONE MARROW, SIGNAL =   1; EXPRESSED IN ADULT LIVER, SIGNAL = 0.98
DDDDEEDNDEDDNDEDDDDEDDDEAEDNDEDEDDDEEE

SEQ ID NO: 43612 - protein, 29 aa, Homo sapiens
  MAP TO AC006021.2; EXPRESSED IN LUNG, SIGNAL = 1.4; EXPRESSED IN BRAIN, SIGNAL = 0.72; EXPRESSED IN BONE MARROW, SIGNAL = 0.9; EXPRESSED IN PLACENTA, SIGNAL = 0.94; EXPRESSED IN ADULT LIVER, SIGNAL = 0.79; EST_HUMAN HIT: AU138332.1, EVALUE 5.30e-01; SWISSPROT HIT: P24557, EVALUE 3.90e-02
MEALGFLKLEVNGPMVTVALSVALLALLK

SEQ ID NO: 43613 - protein, 19 aa, Homo sapiens
  MAP TO AC003683.1; EXPRESSED IN BRAIN, SIGNAL = 0.7; EXPRESSED IN BONE MARROW, SIGNAL = 0.73; EXPRESSED IN PLACENTA, SIGNAL = 0.59; EXPRESSED IN LUNG, SIGNAL = 0.68; EXPRESSED IN FETAL LIVER, SIGNAL = 0.87; EXPRESSED IN ADULT LIVER, SIGNAL = 0.6
YEYWENPLCSFQVYTSYYD

SEQ ID NO: 43614 - protein, 65 aa, Homo sapiens
  MAP TO AC005737.1; EXPRESSED IN BRAIN, SIGNAL = 0.59; EXPRESSED IN BONE MARROW, SIGNAL = 0.51; EXPRESSED IN ADULT LIVER, SIGNAL = 0.46; EXPRESSED IN LUNG, SIGNAL = 0.56; EXPRESSED IN FETAL LIVER, SIGNAL = 0.75; SWISSPROT HIT: P75155, EVALUE 5.90e+00; EST_HUMAN HIT: AA486710.1, EVALUE 5.80e+00
DHSGCQELTEGRGEMESSRSFFGSHCNKSDLSSGISITDAHMRQDFAGGGILQVERYNWVVDWMH

SEQ ID NO: 43615 - protein, 26 aa, Homo sapiens
  MAP TO AC004584.1; EXPRESSED IN BONE MARROW, SIGNAL = 1.3; EXPRESSED IN ADULT LIVER, SIGNAL = 1.1; EXPRESSED IN PLACENTA, SIGNAL = 1.2; EXPRESSED IN LUNG, SIGNAL = 1.2; EXPRESSED IN FETAL LIVER, SIGNAL = 0.97; EXPRESSED IN BRAIN, SIGNAL = 1.3
LTVMYSQINGASRALDDVRNRQQDVR

SEQ ID NO: 43616 - protein, 42 aa, Homo sapiens
  MAP TO AC005740.1; EXPRESSED IN BRAIN, SIGNAL = 0.86; EXPRESSED IN ADULT LIVER, SIGNAL = 0.68; EXPRESSED IN LUNG, SIGNAL = 0.75; EXPRESSED IN BONE MARROW, SIGNAL = 0.68; EXPRESSED IN PLACENTA, SIGNAL = 0.69; EXPRESSED IN FETAL LIVER, SIGNAL = 0.7; SWISSPROT HIT: O95255, EVALUE 2.80e+00
DNGLPAGRQELKQGTHEETTALAQVRAEGLPVLVWMETEDLQ

SEQ ID NO: 43617 - protein, 65 aa, Homo sapiens
  MAP TO AC002036.1; EXPRESSED IN PLACENTA, SIGNAL = 0.61; EXPRESSED IN BRAIN, SIGNAL = 0.58; EXPRESSED IN LUNG, SIGNAL = 0.64; EXPRESSED IN BONE MARROW, SIGNAL = 0.56; EXPRESSED IN ADULT LIVER, SIGNAL = 0.48; EST_HUMAN HIT: AA434168.1, EVALUE 2.00e-32; SWISSPROT HIT: P57080, EVALUE 2.00e-13
ELNAKAASLFETNDDHSVTEGINVMNELIIPCIHLIINNDISKDDLDAIEVMRNHWCSYLGQDIA

SEQ ID NO: 43618 - protein, 72 aa, Homo sapiens
  MAP TO AC005919.1; EXPRESSED IN LUNG, SIGNAL =   1; EXPRESSED IN BRAIN, SIGNAL = 0.64; EXPRESSED IN ADULT LIVER, SIGNAL =   1; EXPRESSED IN PLACENTA, SIGNAL = 0.97; EXPRESSED IN FETAL LIVER, SIGNAL = 0.96; EXPRESSED IN BONE MARROW, SIGNAL = 1.1; EST_HUMAN HIT: AA234932.1, EVALUE 2.00e-16
KAPQKEPWLTQKLATWLSCQKLRCISASWRSRSARSGARLNTRTQSMHNCRTSRHAWRWRSRPTTACSVERE

SEQ ID NO: 43619 - protein, 68 aa, Homo sapiens
  MAP TO AC003685.1; EXPRESSED IN LUNG, SIGNAL = 0.57; EXPRESSED IN PLACENTA, SIGNAL = 0.64; EXPRESSED IN FETAL LIVER, SIGNAL = 0.89; EXPRESSED IN BRAIN, SIGNAL = 0.61; EXPRESSED IN BONE MARROW, SIGNAL = 0.66; EXPRESSED IN ADULT LIVER, SIGNAL = 0.49; EST_HUMAN HIT: BF032752.1, EVALUE 1.90e+00; SWISSPROT HIT: Q60553, EVALUE 3.90e-01
PENQQLIGTSCEHDTDPSNQTCSVEFSIFFPICPSSGCYNPGETIPTYSRVDSQTPFLSVPRPKSTEA

SEQ ID NO: 43620 - protein, 162 aa, Homo sapiens
  MAP TO AC006070.1; EXPRESSED IN PLACENTA, SIGNAL =   1; EXPRESSED IN LUNG, SIGNAL = 1.4; EXPRESSED IN BRAIN, SIGNAL =   1; EXPRESSED IN BONE MARROW, SIGNAL = 1.1; EXPRESSED IN FETAL LIVER, SIGNAL = 1.2; EXPRESSED IN ADULT LIVER, SIGNAL = 1.3
AVIKASAKRPAAAPAAARPPVAAPAVLYPAAAAHPALRLPAARPLAVAPAAATQSVVRPPAAPAVVCPAAAAHSAVRPPATPAVVCPAAAVHSVVRPPAAPAVVCPAAAVHSAVRPPAAVQLAAAPAAVDPLVEPHIGLSTMSQSPSHDMKVSFISTCPCVK

SEQ ID NO: 43621 - protein, 102 aa, Homo sapiens
  MAP TO AC006070.1; EXPRESSED IN PLACENTA, SIGNAL =   1; EXPRESSED IN LUNG, SIGNAL = 1.4; EXPRESSED IN BRAIN, SIGNAL =   1; EXPRESSED IN BONE MARROW, SIGNAL = 1.1; EXPRESSED IN FETAL LIVER, SIGNAL = 1.2; EXPRESSED IN ADULT LIVER, SIGNAL = 1.3; EST_HUMAN HIT: BE250684.1, EVALUE 2.00e-12; SWISSPROT HIT: O75690, EVALUE 3.00e-10
CRPSCSQTTCCQTTCCRPSCCHPVCCQTTCRPSCGVSSCCRPLCCQTTCHPSCGMSSCCRPLCCQTTCRPSCGVSSCCRPLCCQTTCCRATCCRPSCCGSSC

SEQ ID NO: 43622 - protein, 53 aa, Homo sapiens
  MAP TO AC006487.7; EXPRESSED IN BRAIN, SIGNAL = 0.98; EXPRESSED IN BONE MARROW, SIGNAL = 0.86; EXPRESSED IN PLACENTA, SIGNAL = 0.88; EXPRESSED IN LUNG, SIGNAL = 0.97; EXPRESSED IN FETAL LIVER, SIGNAL = 0.81; EXPRESSED IN ADULT LIVER, SIGNAL = 0.69; SWISSPROT HIT: O43791, EVALUE 2.00e-26; EST_HUMAN HIT: AU119138.1, EVALUE 2.00e-25
VSVVQDSVNISGQNTMNMVKVPECRLADELGGLWENSRFTDCCLCVAGQEFQA

SEQ ID NO: 43623 - protein, 58 aa, Homo sapiens
  MAP TO AC005185.1; EXPRESSED IN PLACENTA, SIGNAL = 0.58; EXPRESSED IN BRAIN, SIGNAL = 0.55; EXPRESSED IN BONE MARROW, SIGNAL = 0.61; EXPRESSED IN ADULT LIVER, SIGNAL = 0.45; EXPRESSED IN LUNG, SIGNAL = 0.56; SWISSPROT HIT: P22380, EVALUE 2.70e+00; EST_HUMAN HIT: BF061751.1, EVALUE 4.00e-26
SISSIISSMLTVPMMGLKNSSAMTLALMNLSRKRVLLSSMNLSWGPWCVILVCSLSIC

SEQ ID NO: 43624 - protein, 18 aa, Homo sapiens
  MAP TO AC005185.1; EXPRESSED IN PLACENTA, SIGNAL = 0.58; EXPRESSED IN BRAIN, SIGNAL = 0.55; EXPRESSED IN BONE MARROW, SIGNAL = 0.61; EXPRESSED IN ADULT LIVER, SIGNAL = 0.45; EXPRESSED IN LUNG, SIGNAL = 0.56; EST_HUMAN HIT: AI207147.1, EVALUE 1.00e-04
PHDFISLYRAFPASYHPC

SEQ ID NO: 43625 - protein, 43 aa, Homo sapiens
  MAP TO AC006360.2; EXPRESSED IN ADULT LIVER, SIGNAL = 0.46; EXPRESSED IN LUNG, SIGNAL = 0.53; EXPRESSED IN BRAIN, SIGNAL = 0.57; EXPRESSED IN BONE MARROW, SIGNAL = 0.52
VNHGAHCNMAPNATFQSSVTSNSKTWRIKGIKAPGTTEETGQK

SEQ ID NO: 43626 - protein, 19 aa, Homo sapiens
  MAP TO AC006360.2; EXPRESSED IN ADULT LIVER, SIGNAL = 0.46; EXPRESSED IN LUNG, SIGNAL = 0.53; EXPRESSED IN BRAIN, SIGNAL = 0.57; EXPRESSED IN BONE MARROW, SIGNAL = 0.52
ELIMVPIATWHPMPLSRVV

SEQ ID NO: 43627 - protein, 66 aa, Homo sapiens
  MAP TO AC004592.1; EXPRESSED IN PLACENTA, SIGNAL = 0.95; EXPRESSED IN LUNG, SIGNAL = 0.95; EXPRESSED IN FETAL LIVER, SIGNAL =   1; EXPRESSED IN BRAIN, SIGNAL = 0.68; EXPRESSED IN BONE MARROW, SIGNAL = 0.92; EXPRESSED IN ADULT LIVER, SIGNAL = 0.88; SWISSPROT HIT: P14349, EVALUE 5.90e+00; EST_HUMAN HIT: AI932780.1, EVALUE 1.10e+00
MNRTEMLLPLNKGVLLELLDSVQEGAQNSKPPVAGKALCPNKRVFPSSHPKAVRTAFESKPPQSQA

SEQ ID NO: 43628 - protein, 105 aa, Homo sapiens
  MAP TO AC006211.1; EXPRESSED IN PLACENTA, SIGNAL = 0.8; EXPRESSED IN LUNG, SIGNAL = 0.73; EXPRESSED IN FETAL LIVER, SIGNAL = 0.9; EXPRESSED IN BONE MARROW, SIGNAL = 0.8; EXPRESSED IN BRAIN, SIGNAL = 1.1; EXPRESSED IN ADULT LIVER, SIGNAL = 0.78; SWISSPROT HIT: Q12923, EVALUE 4.00e+00; EST_HUMAN HIT: AW276760.1, EVALUE 2.00e-31
SSCITTYKKTPPPVPPRTTTKPFISITAQSSTESAQDAYMDGQGQRGDIISQSGLSNSTESLDSMKALTAAIEAANAQIHGPASQHMGNNTATVTTTTTIATVTT

SEQ ID NO: 43629 - protein, 69 aa, Homo sapiens
  MAP TO AC004500.1; EXPRESSED IN BRAIN, SIGNAL = 0.64; EXPRESSED IN ADULT LIVER, SIGNAL =   1; EXPRESSED IN BONE MARROW, SIGNAL = 0.83; EXPRESSED IN PLACENTA, SIGNAL = 1.2; EXPRESSED IN LUNG, SIGNAL =   1; EXPRESSED IN FETAL LIVER, SIGNAL =   1; EST_HUMAN HIT: BF379688.1, EVALUE 5.00e-34; SWISSPROT HIT: P10258, EVALUE 1.00e-01
KPYKETEPPKGEKKNVPEKHTREAQKQASEKVSNKGKRKHKVCEGFLLFVLKHQNLKCGGNLSKPQSNK

SEQ ID NO: 43630 - protein, 39 aa, Homo sapiens
  MAP TO AC005841.3; EXPRESSED IN LUNG, SIGNAL = 1.2; EXPRESSED IN FETAL LIVER, SIGNAL = 0.88; EXPRESSED IN BRAIN, SIGNAL = 1.2; EXPRESSED IN BONE MARROW, SIGNAL = 0.77; EXPRESSED IN ADULT LIVER, SIGNAL = 0.88; EXPRESSED IN PLACENTA, SIGNAL = 0.83; SWISSPROT HIT: Q27969, EVALUE 2.00e-08; EST_HUMAN HIT: BE314018.1, EVALUE 3.00e-07
ESSPQLLYVPFVSVLFQGNGHEEVVACAWDGQTYIIDHN

SEQ ID NO: 43631 - protein, 63 aa, Homo sapiens
  MAP TO AC004228.2; EXPRESSED IN PLACENTA, SIGNAL = 0.9; EXPRESSED IN ADULT LIVER, SIGNAL = 0.81; EXPRESSED IN LUNG, SIGNAL = 1.1; EXPRESSED IN FETAL LIVER, SIGNAL = 0.73; EXPRESSED IN BRAIN, SIGNAL = 0.96; EXPRESSED IN BONE MARROW, SIGNAL = 0.96; EST_HUMAN HIT: BF569527.1, EVALUE 6.00e-21
TTSLTSSAPGSAVRTLDMCSSHPCPVICCSSPTTNPTTGPSLGPSFNPGHVLSPSPSPSTNRS

SEQ ID NO: 43632 - protein, 41 aa, Homo sapiens
  MAP TO AC004629.1; EXPRESSED IN LUNG, SIGNAL = 0.48; EXPRESSED IN BONE MARROW, SIGNAL = 0.64; EXPRESSED IN BRAIN, SIGNAL = 0.56; EXPRESSED IN ADULT LIVER, SIGNAL = 0.55
VMVFSSNMWIIYCKTLKITQALKATFSPKRNITCQEKKTCF

SEQ ID NO: 43633 - protein, 41 aa, Homo sapiens
  MAP TO AC004629.1; EXPRESSED IN LUNG, SIGNAL = 0.48; EXPRESSED IN BONE MARROW, SIGNAL = 0.64; EXPRESSED IN BRAIN, SIGNAL = 0.56; EXPRESSED IN ADULT LIVER, SIGNAL = 0.55; SWISSPROT HIT: O09185, EVALUE 3.70e+00
SNGILIQYVDYLLQNSEDNASSKSYLLPKKEHNVSRKKNLF

SEQ ID NO: 43634 - protein, 51 aa, Homo sapiens
  MAP TO AC003103.1; EXPRESSED IN PLACENTA, SIGNAL =   1; EXPRESSED IN FETAL LIVER, SIGNAL = 0.9; EXPRESSED IN ADULT LIVER, SIGNAL = 0.89; EXPRESSED IN LUNG, SIGNAL = 1.2; EXPRESSED IN BRAIN, SIGNAL = 1.6; EXPRESSED IN BONE MARROW, SIGNAL = 1.1; SWISSPROT HIT: P56524, EVALUE 2.70e+00; EST_HUMAN HIT: AI831975.1, EVALUE 5.00e-22
GGQSIEEQLLVFAAFHIPYKRQKAQPPLPSEKQKGERNRTVSPGCRQPRVL

SEQ ID NO: 43635 - protein, 29 aa, Homo sapiens
  MAP TO AC002087.1; EXPRESSED IN PLACENTA, SIGNAL = 0.92; EXPRESSED IN LUNG, SIGNAL =   1; EXPRESSED IN BRAIN, SIGNAL = 0.81; EXPRESSED IN FETAL LIVER, SIGNAL = 1.1; EXPRESSED IN BONE MARROW, SIGNAL = 0.88; EXPRESSED IN ADULT LIVER, SIGNAL = 0.78
KQQPSWTWCAVADATGKGEREIQPTDHGN

SEQ ID NO: 43636 - protein, 126 aa, Homo sapiens
  MAP TO AC005880.2; EXPRESSED IN LUNG, SIGNAL = 0.76; EXPRESSED IN FETAL LIVER, SIGNAL =   1; EXPRESSED IN BRAIN, SIGNAL = 0.58; EXPRESSED IN BONE MARROW, SIGNAL = 1.3; EXPRESSED IN PLACENTA, SIGNAL = 0.65; EXPRESSED IN ADULT LIVER, SIGNAL = 1.5; SWISSPROT HIT: P05130, EVALUE 1.00e-06; EST_HUMAN HIT: AW470846.1, EVALUE 2.00e-70
FKYLKEGESDHHVVTNVEKEKEPHLVEEVSVLPKEEQFVGQMGLTENKHSFQDTQFQNPTWCDYCKKKVWTKAASQCMFCAYVCHKKCQEKCLAETSVCGATDRQIDRTLKNLRLEGQETLLGLPP

SEQ ID NO: 43637 - protein, 54 aa, Homo sapiens
  MAP TO AC004648.1; EXPRESSED IN PLACENTA, SIGNAL = 1.3; EXPRESSED IN BRAIN, SIGNAL = 0.9; EXPRESSED IN BONE MARROW, SIGNAL = 1.3; EXPRESSED IN ADULT LIVER, SIGNAL =   1; EXPRESSED IN LUNG, SIGNAL = 0.93; EXPRESSED IN FETAL LIVER, SIGNAL = 0.94; SWISSPROT HIT: Q43908, EVALUE 2.70e+00
RDTDIQMIAVANANLEVDISTYHHDMNQMESKGKVVASLFATSCNPQPTASRCM

SEQ ID NO: 43638 - protein, 69 aa, Homo sapiens
  MAP TO AC005068.1; EXPRESSED IN BRAIN, SIGNAL = 1.5; EXPRESSED IN BONE MARROW, SIGNAL = 0.97; EXPRESSED IN ADULT LIVER, SIGNAL = 2.5; EXPRESSED IN PLACENTA, SIGNAL =   1; EXPRESSED IN LUNG, SIGNAL =   1; EXPRESSED IN FETAL LIVER, SIGNAL =   1; SWISSPROT HIT: P08183, EVALUE 4.00e-34; EST_HUMAN HIT: BF313560.1, EVALUE 5.00e-33
LLDGKEIKRLNVQWLRAHLGIVSQEPILFDCSIAENIAYGDNSRVVSQEEIVRAAKEANIHAFIESLPN

SEQ ID NO: 43639 - protein, 33 aa, Homo sapiens
  MAP TO AC006221.1; EXPRESSED IN ADULT LIVER, SIGNAL = 0.55; EXPRESSED IN LUNG, SIGNAL = 0.6; EXPRESSED IN BRAIN, SIGNAL = 0.81; EXPRESSED IN BONE MARROW, SIGNAL = 0.54
NGELCHQKSETQSALKQVMTQLVGEKFNTQDNN

SEQ ID NO: 43640 - protein, 39 aa, Homo sapiens
  MAP TO AC004600.2; EXPRESSED IN BRAIN, SIGNAL = 1.5; EXPRESSED IN LUNG, SIGNAL = 1.6; EXPRESSED IN BONE MARROW, SIGNAL = 1.4; EXPRESSED IN ADULT LIVER, SIGNAL = 1.2; EXPRESSED IN PLACENTA, SIGNAL = 1.7; EXPRESSED IN FETAL LIVER, SIGNAL = 1.2
RTTFIGLYHESPSFYGSVEQLRILSDNKYVYYNSHSGSE

SEQ ID NO: 43641 - protein, 47 aa, Homo sapiens
  MAP TO AC005096.1; EXPRESSED IN PLACENTA, SIGNAL = 1.1; EXPRESSED IN LUNG, SIGNAL = 1.4; EXPRESSED IN BRAIN, SIGNAL = 1.1; EXPRESSED IN FETAL LIVER, SIGNAL = 1.2; EXPRESSED IN BONE MARROW, SIGNAL = 1.4; EXPRESSED IN ADULT LIVER, SIGNAL = 1.2
GIILVFQGEVKSLAQVLKLASVARSDPEVLPGFLSLQPGIVNSGETD

SEQ ID NO: 43642 - protein, 94 aa, Homo sapiens
  MAP TO AC005726.1; EXPRESSED IN LUNG, SIGNAL = 1.6; EXPRESSED IN FETAL LIVER, SIGNAL = 1.4; EXPRESSED IN BRAIN, SIGNAL = 1.9; EXPRESSED IN BONE MARROW, SIGNAL = 1.5; EXPRESSED IN PLACENTA, SIGNAL = 1.4; EXPRESSED IN ADULT LIVER, SIGNAL = 1.3; SWISSPROT HIT: Q13183, EVALUE 5.00e-21; EST_HUMAN HIT: BE895402.1, EVALUE 5.00e-10
IIQRPFPSSFESPGECQSVGMSVTASHNLGGTVGDSRVFPPLSHVSTCQVAVEYLKDSNLLFFGGLLVAIAVEHWNLHKRIALRVLLIVGVRPA

SEQ ID NO: 43643 - protein, 38 aa, Homo sapiens
  MAP TO AC000005.1; EXPRESSED IN PLACENTA, SIGNAL = 0.6; EXPRESSED IN LUNG, SIGNAL = 0.67; EXPRESSED IN BRAIN, SIGNAL = 0.73; EXPRESSED IN BONE MARROW, SIGNAL = 0.64; EXPRESSED IN ADULT LIVER, SIGNAL = 0.59
TQAKKSRTVEAAVSTLLLTPETTQPSQTIWPLVFLMYE

SEQ ID NO: 43644 - protein, 132 aa, Homo sapiens
  MAP TO AC006518.17; EXPRESSED IN PLACENTA, SIGNAL = 1.1; EXPRESSED IN LUNG, SIGNAL = 1.1; EXPRESSED IN FETAL LIVER, SIGNAL = 1.1; EXPRESSED IN BONE MARROW, SIGNAL = 0.95; EXPRESSED IN ADULT LIVER, SIGNAL =   1; EXPRESSED IN BRAIN, SIGNAL = 0.77; EST_HUMAN HIT: BF088785.1, EVALUE 1.00e-01; SWISSPROT HIT: P02810, EVALUE 7.40e-02
GGDSEQFIDEERQGPPLGGQQSQPSAGDGNQNDGPQQGPPQQGGQQQQGPPPPQGKPQGPPQQGGHPPPPQGRPQGPPQQGGHPRPPRGRPQGPPQQGGHQQGPPPPPPGKPQGPPPQGGRPQGPPQGQSPQ

SEQ ID NO: 43645 - protein, 115 aa, Homo sapiens
  MAP TO AC006518.17; EXPRESSED IN PLACENTA, SIGNAL = 1.1; EXPRESSED IN LUNG, SIGNAL = 1.1; EXPRESSED IN FETAL LIVER, SIGNAL = 1.1; EXPRESSED IN BONE MARROW, SIGNAL = 0.95; EXPRESSED IN ADULT LIVER, SIGNAL =   1; EXPRESSED IN BRAIN, SIGNAL = 0.77; EST_HUMAN HIT: AI910818.1, EVALUE 4.00e-62; SWISSPROT HIT: P42182, EVALUE 1.10e-01
VMGTRMMALSRDHPNKEASSNKVHHLLRESHKDHPNREAIPLLLKEGHKDHPNREAIPVLLEEGHKDHPNREAISKVLPHLLLESPRDHLPKGAAHKDLHRGSLLSNLGFNDRYD

SEQ ID NO: 43646 - protein, 43 aa, Homo sapiens
  MAP TO AC003037.1; EXPRESSED IN LUNG, SIGNAL = 0.66; EXPRESSED IN BRAIN, SIGNAL = 0.7; EXPRESSED IN ADULT LIVER, SIGNAL = 0.61; EXPRESSED IN PLACENTA, SIGNAL = 0.69; EXPRESSED IN FETAL LIVER, SIGNAL = 0.76; EXPRESSED IN BONE MARROW, SIGNAL = 0.67; SWISSPROT HIT: P38334, EVALUE 5.50e-01; EST_HUMAN HIT: BF196043.1, EVALUE 8.00e-20
DDHRHLNQFIAHAALDLVDENMWLSNNMYLKTVDKFNEWFVSA

SEQ ID NO: 43647 - protein, 52 aa, Homo sapiens
  MAP TO AC003108.1; EXPRESSED IN BONE MARROW, SIGNAL = 1.2; EXPRESSED IN PLACENTA, SIGNAL = 1.2; EXPRESSED IN LUNG, SIGNAL = 1.4; EXPRESSED IN FETAL LIVER, SIGNAL = 1.3; EXPRESSED IN BRAIN, SIGNAL = 1.3; EXPRESSED IN ADULT LIVER, SIGNAL = 1.2; EST_HUMAN HIT: AA521148.1, EVALUE 1.10e-01
KTKKVNRKGSTSSTSSSSSSSVVDPLSSVLDGTDPLSMFAATADPAALAAAM

SEQ ID NO: 43648 - protein, 27 aa, Homo sapiens
  MAP TO AC004706.1; EXPRESSED IN PLACENTA, SIGNAL = 0.91; EXPRESSED IN LUNG, SIGNAL = 0.97; EXPRESSED IN BRAIN, SIGNAL = 0.76; EXPRESSED IN BONE MARROW, SIGNAL = 0.86; EXPRESSED IN FETAL LIVER, SIGNAL = 1.4; EXPRESSED IN ADULT LIVER, SIGNAL = 2.2; SWISSPROT HIT: Q13183, EVALUE 2.00e-05; EST_HUMAN HIT: C15976.1, EVALUE 1.00e-04
MAIYWCTEVIPLAVTSLMPVLLFPLFQ

SEQ ID NO: 43649 - protein, 26 aa, Homo sapiens
  MAP TO AC004706.1; EXPRESSED IN PLACENTA, SIGNAL = 0.91; EXPRESSED IN LUNG, SIGNAL = 0.97; EXPRESSED IN BRAIN, SIGNAL = 0.76; EXPRESSED IN BONE MARROW, SIGNAL = 0.86; EXPRESSED IN FETAL LIVER, SIGNAL = 1.4; EXPRESSED IN ADULT LIVER, SIGNAL = 2.2
WPFTGAQKSSLWLSPLSCLSCFSHSS

SEQ ID NO: 43650 - protein, 93 aa, Homo sapiens
  MAP TO AC002094.1; EXPRESSED IN PLACENTA, SIGNAL = 0.7; EXPRESSED IN ADULT LIVER, SIGNAL = 0.81; EXPRESSED IN LUNG, SIGNAL = 0.67; EXPRESSED IN FETAL LIVER, SIGNAL = 0.71; EXPRESSED IN BRAIN, SIGNAL = 0.83; EXPRESSED IN BONE MARROW, SIGNAL = 0.73; SWISSPROT HIT: Q44091, EVALUE 5.00e+00; EST_HUMAN HIT: R37742.1, EVALUE 3.80e-01
YSSSAHDGAGTQDGTQDGTETGAGPGVQRPAGSQPGRGPSSRAASAAGKTSASAGHTASGWPHPVLGPPQRPILGMASRPPTPSGWRGQEEGD

SEQ ID NO: 43651 - protein, 75 aa, Homo sapiens
  MAP TO AC004839.1; EXPRESSED IN PLACENTA, SIGNAL = 0.85; EXPRESSED IN ADULT LIVER, SIGNAL = 0.85; EXPRESSED IN LUNG, SIGNAL = 0.82; EXPRESSED IN FETAL LIVER, SIGNAL = 0.75; EXPRESSED IN BRAIN, SIGNAL = 0.74; EXPRESSED IN BONE MARROW, SIGNAL = 0.6; SWISSPROT HIT: Q09504, EVALUE 5.00e-16; EST_HUMAN HIT: BF110724.1, EVALUE 1.00e-38
IHDDLKRTVDLCQKAEATGVSWITVHGRTAEERHQPVHYDSIKIIKENMSIPVIANGDIRSLKEAENVWRITGTD

SEQ ID NO: 43652 - protein, 59 aa, Homo sapiens
  MAP TO AC006377.3; EXPRESSED IN BONE MARROW, SIGNAL = 0.51; EXPRESSED IN ADULT LIVER, SIGNAL = 0.52; EXPRESSED IN BRAIN, SIGNAL = 0.64; SWISSPROT HIT: Q99808, EVALUE 2.70e+00; EST_HUMAN HIT: AU127629.1, EVALUE 8.00e+00
MGVGPVLAFTLCHYLSDIKLIFLTTEKARAILIELKVKGVPFFIYKEREVVLASEMGLH

SEQ ID NO: 43653 - protein, 77 aa, Homo sapiens
  MAP TO AC003043.1; EXPRESSED IN BRAIN, SIGNAL = 0.65; EST_HUMAN HIT: BF344549.1, EVALUE 8.00e-46; SWISSPROT HIT: P28799, EVALUE 8.00e-47
AVCCEDRQHCCPAGYTCNVKARSCEKEVVSAQPATFLARSPHVGVKDVECGEGHFCHDNQTCCRDNRQGWACCPYRQ

SEQ ID NO: 43654 - protein, 48 aa, Homo sapiens
  MAP TO AC003043.1; EXPRESSED IN BRAIN, SIGNAL = 0.65; EST_HUMAN HIT: BE742164.1, EVALUE 6.00e-20
LAVGTAGPALSVVSAAGLVIMAEVSFPTLHVLHTHVRATGQEGGRLGR

SEQ ID NO: 43655 - protein, 33 aa, Homo sapiens
  MAP TO AC005079.1; EXPRESSED IN PLACENTA, SIGNAL =   1; EXPRESSED IN FETAL LIVER, SIGNAL = 0.89; EXPRESSED IN BRAIN, SIGNAL = 1.2; EXPRESSED IN BONE MARROW, SIGNAL =   1; EXPRESSED IN LUNG, SIGNAL = 0.88; EXPRESSED IN ADULT LIVER, SIGNAL = 1.2; EST_HUMAN HIT: AW511225.1, EVALUE 6.00e-13
FPLMNVATCTVNLKEKKNGKMVSSFYCNLCLSF

SEQ ID NO: 43656 - protein, 49 aa, Homo sapiens
  MAP TO AC006481.3; EXPRESSED IN BONE MARROW, SIGNAL = 0.58; EXPRESSED IN ADULT LIVER, SIGNAL = 0.68; EXPRESSED IN PLACENTA, SIGNAL = 0.58; EXPRESSED IN LUNG, SIGNAL = 0.59; EXPRESSED IN BRAIN, SIGNAL = 0.57; EST_HUMAN HIT: BE409340.1, EVALUE 3.00e+00
IKEEIYFTFGYRVQYSWLFYCWLHKSLGCWHKKHQIRIKKEKKEAWAVV

SEQ ID NO: 43657 - protein, 35 aa, Homo sapiens
  MAP TO AC006481.3; EXPRESSED IN BONE MARROW, SIGNAL = 0.58; EXPRESSED IN ADULT LIVER, SIGNAL = 0.68; EXPRESSED IN PLACENTA, SIGNAL = 0.58; EXPRESSED IN LUNG, SIGNAL = 0.59; EXPRESSED IN BRAIN, SIGNAL = 0.57; SWISSPROT HIT: O50274, EVALUE 6.40e+00
LKRKYTSHLATGSSTLGFSIAGFISHWGVGTRSTR

SEQ ID NO: 43658 - protein, 63 aa, Homo sapiens
  MAP TO AC005261.1; EXPRESSED IN ADULT LIVER, SIGNAL =   1; EXPRESSED IN PLACENTA, SIGNAL = 0.93; EXPRESSED IN LUNG, SIGNAL = 1.1; EXPRESSED IN BRAIN, SIGNAL = 1.1; EXPRESSED IN BONE MARROW, SIGNAL = 0.99; EXPRESSED IN FETAL LIVER, SIGNAL = 0.98; EST_HUMAN HIT: BF219967.1, EVALUE 1.00e-26; SWISSPROT HIT: P38991, EVALUE 6.00e-13
RRLTVDDFEIGRPLGKGKFGNVYLARLKESHFIVALKVLFKSQIEKEGLEHQLRREIEIQAHL

SEQ ID NO: 43659 - protein, 24 aa, Homo sapiens
  MAP TO AC005915.1; EXPRESSED IN PLACENTA, SIGNAL = 0.85; EXPRESSED IN ADULT LIVER, SIGNAL = 0.63; EXPRESSED IN LUNG, SIGNAL = 0.68; EXPRESSED IN BRAIN, SIGNAL = 0.82; EXPRESSED IN BONE MARROW, SIGNAL = 0.55
VACSQRTIKSTPRNRAYGFDSKYR

SEQ ID NO: 43660 - protein, 30 aa, Homo sapiens
  MAP TO AC005162.1; EXPRESSED IN BRAIN, SIGNAL = 0.62; EXPRESSED IN ADULT LIVER, SIGNAL = 0.71; EXPRESSED IN PLACENTA, SIGNAL = 0.73; EXPRESSED IN LUNG, SIGNAL = 0.86; EXPRESSED IN BONE MARROW, SIGNAL = 0.71; EXPRESSED IN FETAL LIVER, SIGNAL = 0.68; EST_HUMAN HIT: AW005639.1, EVALUE 3.50e+00; SWISSPROT HIT: P55145, EVALUE 8.60e+00
PAVESAALQVLPGEAHLQPTTSGVCEVCLQ

SEQ ID NO: 43661 - protein, 64 aa, Homo sapiens
  MAP TO AC005920.1; EXPRESSED IN PLACENTA, SIGNAL =   1; EXPRESSED IN LUNG, SIGNAL = 0.59; EXPRESSED IN BRAIN, SIGNAL = 1.3; EXPRESSED IN BONE MARROW, SIGNAL = 0.78; EXPRESSED IN ADULT LIVER, SIGNAL = 0.76; EXPRESSED IN FETAL LIVER, SIGNAL = 0.82; EST_HUMAN HIT: AU143428.1, EVALUE 7.00e-20
MEAENSEVDENVPTAEEATEATEGNAGSAEDTVDISQTGVYTEHVFTDPLGVQIPEDLSPVYQS

SEQ ID NO: 43662 - protein, 65 aa, Homo sapiens
  MAP TO AC005920.1; EXPRESSED IN PLACENTA, SIGNAL =   1; EXPRESSED IN LUNG, SIGNAL = 0.59; EXPRESSED IN BRAIN, SIGNAL = 1.3; EXPRESSED IN BONE MARROW, SIGNAL = 0.78; EXPRESSED IN ADULT LIVER, SIGNAL = 0.76; EXPRESSED IN FETAL LIVER, SIGNAL = 0.82; EST_HUMAN HIT: AU143428.1, EVALUE 7.00e-15
KWKQKIVRLMKMFQQQKKQLKLQKGMRGQLKTQWTSPKLASTQSMSLQILWEFRSQKTSPQCISR

SEQ ID NO: 43663 - protein, 119 aa, Homo sapiens
  MAP TO AC004622.1; EXPRESSED IN PLACENTA, SIGNAL = 0.65; EXPRESSED IN BRAIN, SIGNAL = 0.6; EXPRESSED IN BONE MARROW, SIGNAL = 0.63; EXPRESSED IN ADULT LIVER, SIGNAL = 0.66; EXPRESSED IN LUNG, SIGNAL = 0.74; EST_HUMAN HIT: AW752848.1, EVALUE 4.00e-44; SWISSPROT HIT: Q02342, EVALUE 3.00e-07
YYLKNNMETETLCSDEDAQELVKESQLSMLQLSTIEVATQLSMRDFDLFRNIEPTEYIDDLFKLNSKTGNTHLKRFEDIVNQETFWVASEILTEANQLKRMKIIKHFIKIALHCRECKN

SEQ ID NO: 43664 - protein, 343 aa, Homo sapiens
  MAP TO AC005104.1; EXPRESSED IN LUNG, SIGNAL = 1.2; EXPRESSED IN BRAIN, SIGNAL = 0.88; EXPRESSED IN PLACENTA, SIGNAL = 1.1; EXPRESSED IN BONE MARROW, SIGNAL = 1.1; EXPRESSED IN ADULT LIVER, SIGNAL = 1.1; EXPRESSED IN FETAL LIVER, SIGNAL = 1.2; EST_HUMAN HIT: BE901608.1, EVALUE 8.00e-63; SWISSPROT HIT: Q11103, EVALUE 5.20e+00
TPASPSSANAFYSLSPSTLVPSGLPEFKDSSSSLTDPQVSYVKSPAAERRSGAVAGGPDTPSAQPLGPPALQPGPGVGFCHVVSSCGSVCAGGQSFSALDLDTGRAGRELSAACKNDNGGDDFTTGSFPSGGEHRCDRQCRGGAPAFTLTNAQLQVSEEFIDDDPADISFFAGGSEAFSFPYGSVVPQESQASAQPLVAPPLCELPGSARSSPDRYSMEAVDMNTEDGFAFEEESDFNGNAHPSDTSELFEVKAQASRMQRLLGPSETSSLRNSQSENSSLNNMPLRGGLSVHTCSSASQSEASSMVNFPAYSVRSESSSAFQFSDIIDQLEQLSYPPTTAED

SEQ ID NO: 43665 - protein, 18 aa, Homo sapiens
  MAP TO AC005104.1; EXPRESSED IN LUNG, SIGNAL = 1.2; EXPRESSED IN BRAIN, SIGNAL = 0.88; EXPRESSED IN PLACENTA, SIGNAL = 1.1; EXPRESSED IN BONE MARROW, SIGNAL = 1.1; EXPRESSED IN ADULT LIVER, SIGNAL = 1.1; EXPRESSED IN FETAL LIVER, SIGNAL = 1.2; EST_HUMAN HIT: BE901608.1, EVALUE 1.00e-03
VSFQGLLGPAQTGTPWRQ

SEQ ID NO: 43666 - protein, 48 aa, Homo sapiens
  MAP TO AC005104.1; EXPRESSED IN LUNG, SIGNAL = 1.2; EXPRESSED IN BRAIN, SIGNAL = 0.88; EXPRESSED IN PLACENTA, SIGNAL = 1.1; EXPRESSED IN BONE MARROW, SIGNAL = 1.1; EXPRESSED IN ADULT LIVER, SIGNAL = 1.1; EXPRESSED IN FETAL LIVER, SIGNAL = 1.2; EST_HUMAN HIT: AW503968.1, EVALUE 3.00e-22; SWISSPROT HIT: Q13796, EVALUE 6.20e+00
LACQSLRTAAAPSQIPRFPTSRVQLQRGAVEQWLEAPTHHRPSPSGPP

SEQ ID NO: 43667 - protein, 34 aa, Homo sapiens
  MAP TO AC005144.1; EXPRESSED IN PLACENTA, SIGNAL = 0.78; EXPRESSED IN LUNG, SIGNAL = 0.8; EXPRESSED IN FETAL LIVER, SIGNAL = 0.73; EXPRESSED IN BRAIN, SIGNAL = 0.56; EXPRESSED IN BONE MARROW, SIGNAL = 0.61; EXPRESSED IN ADULT LIVER, SIGNAL = 0.76
AARSGMSLCHAHELLLSGDFRIPSVVLRLTARNL

SEQ ID NO: 43668 - protein, 22 aa, Homo sapiens
  MAP TO AC005144.1; EXPRESSED IN PLACENTA, SIGNAL = 0.78; EXPRESSED IN LUNG, SIGNAL = 0.8; EXPRESSED IN FETAL LIVER, SIGNAL = 0.73; EXPRESSED IN BRAIN, SIGNAL = 0.56; EXPRESSED IN BONE MARROW, SIGNAL = 0.61; EXPRESSED IN ADULT LIVER, SIGNAL = 0.76
RFLAVSRRTTEGILKSPLRSSS

SEQ ID NO: 43669 - protein, 113 aa, Homo sapiens
  MAP TO AC002453.1; EXPRESSED IN PLACENTA, SIGNAL = 0.74; EXPRESSED IN LUNG, SIGNAL = 0.71; EXPRESSED IN FETAL LIVER, SIGNAL = 0.88; EXPRESSED IN ADULT LIVER, SIGNAL = 0.74; EXPRESSED IN BONE MARROW, SIGNAL = 0.92; EXPRESSED IN BRAIN, SIGNAL = 0.92; EST_HUMAN HIT: H75859.1, EVALUE 7.00e-30; SWISSPROT HIT: P97792, EVALUE 1.40e-01
ACSGLKVTVPSHTVHGVRGQALYLPVHYGFHTPASDIQIIWLFERPHTMPKYLLGSVNKSVVPDLEYQHKFTMMPPNASLLINPLQFPDEGNYIVKVNIQGNGTLSASQKIQV

SEQ ID NO: 43670 - protein, 30 aa, Homo sapiens
  MAP TO AC005549.1; EXPRESSED IN LUNG, SIGNAL = 1.3; EXPRESSED IN FETAL LIVER, SIGNAL = 1.1; EXPRESSED IN BRAIN, SIGNAL = 1.3; EXPRESSED IN PLACENTA, SIGNAL = 1.1; EXPRESSED IN BONE MARROW, SIGNAL = 1.5; EXPRESSED IN ADULT LIVER, SIGNAL = 1.3
MEDTVPGAGVQHGQRPQGGMELWCVLEAES

SEQ ID NO: 43671 - protein, 30 aa, Homo sapiens
  MAP TO AC005549.1; EXPRESSED IN LUNG, SIGNAL = 1.3; EXPRESSED IN FETAL LIVER, SIGNAL = 1.1; EXPRESSED IN BRAIN, SIGNAL = 1.3; EXPRESSED IN PLACENTA, SIGNAL = 1.1; EXPRESSED IN BONE MARROW, SIGNAL = 1.5; EXPRESSED IN ADULT LIVER, SIGNAL = 1.3
WKILYQVLGSSMGKGLKVEWSYGVFWKQRV

SEQ ID NO: 43672 - protein, 60 aa, Homo sapiens
  MAP TO AC005667.1; EXPRESSED IN PLACENTA, SIGNAL = 0.73; EXPRESSED IN BRAIN, SIGNAL = 0.83; EXPRESSED IN ADULT LIVER, SIGNAL = 0.86; EXPRESSED IN LUNG, SIGNAL =   1; EXPRESSED IN FETAL LIVER, SIGNAL = 0.84; EXPRESSED IN BONE MARROW, SIGNAL = 0.9; EST_HUMAN HIT: BF681062.1, EVALUE 2.70e+00; SWISSPROT HIT: O05407, EVALUE 4.60e+00
LVSLEGGTVPYIILSFLLGSKLRSRGVGRVGPFQLSCLSSSRQVCLTLKLSIGKLDCLMI

SEQ ID NO: 43673 - protein, 37 aa, Homo sapiens
  MAP TO AC003669.1; EXPRESSED IN PLACENTA, SIGNAL = 1.3; EXPRESSED IN ADULT LIVER, SIGNAL = 1.2; EXPRESSED IN LUNG, SIGNAL = 1.3; EXPRESSED IN FETAL LIVER, SIGNAL = 1.3; EXPRESSED IN BRAIN, SIGNAL = 1.2; EXPRESSED IN BONE MARROW, SIGNAL = 1.4; EST_HUMAN HIT: AL039738.1, EVALUE 2.00e-16; SWISSPROT HIT: P36924, EVALUE 6.40e+00
YEDYGDYWRGDYEVNGVDGYDYSRGQLIEDVEHTFEE

SEQ ID NO: 43674 - protein, 120 aa, Homo sapiens
  MAP TO AC002037.1; EXPRESSED IN PLACENTA, SIGNAL = 0.96; EXPRESSED IN ADULT LIVER, SIGNAL = 0.83; EXPRESSED IN LUNG, SIGNAL = 0.94; EXPRESSED IN FETAL LIVER, SIGNAL = 0.69; EXPRESSED IN BRAIN, SIGNAL = 0.89; EXPRESSED IN BONE MARROW, SIGNAL = 0.8; EST_HUMAN HIT: N28279.1, EVALUE 1.30e+00; SWISSPROT HIT: P28301, EVALUE 1.50e+00
AVGASSSMGTCTLAVAVYLYLTSWQPDSSRPVIRKGLCVSSPWSLGSRDPALFMGAELAGAWLLTSCWKKDENQIFRRVDLSWWIVFKKSKKRDSLSIASRPDGEAVNWDWVLLCHSLSD

SEQ ID NO: 43675 - protein, 21 aa, Homo sapiens
  MAP TO AB019440.1; EXPRESSED IN PLACENTA, SIGNAL = 1.3; EXPRESSED IN ADULT LIVER, SIGNAL =  50; EXPRESSED IN LUNG, SIGNAL = 1.3; EXPRESSED IN HELA, SIGNAL = 6.3; EXPRESSED IN FETAL LIVER, SIGNAL =  13; EXPRESSED IN BRAIN, SIGNAL = 1.2; EXPRESSED IN BONE MARROW, SIGNAL = 0.82
RKKNLSVTERVPDGLLCRSKM

SEQ ID NO: 43676 - protein, 53 aa, Homo sapiens
  MAP TO AC003103.1; EXPRESSED IN ADULT LIVER, SIGNAL = 0.64; EXPRESSED IN PLACENTA, SIGNAL = 0.83; EXPRESSED IN LUNG, SIGNAL = 0.73; EXPRESSED IN BRAIN, SIGNAL = 0.87; EXPRESSED IN BONE MARROW, SIGNAL = 0.78; EXPRESSED IN FETAL LIVER, SIGNAL = 0.76; SWISSPROT HIT: Q28559, EVALUE 1.00e-24; EST_HUMAN HIT: BE902501.1, EVALUE 1.00e-20
MYDQVLKFGAYIVDGLRECCQPVLVYIPPQAELRGGSWVVIDSSINPRHMEMY

SEQ ID NO: 43677 - protein, 30 aa, Homo sapiens
  MAP TO AC003103.1; EXPRESSED IN ADULT LIVER, SIGNAL = 0.64; EXPRESSED IN PLACENTA, SIGNAL = 0.83; EXPRESSED IN LUNG, SIGNAL = 0.73; EXPRESSED IN BRAIN, SIGNAL = 0.87; EXPRESSED IN BONE MARROW, SIGNAL = 0.78; EXPRESSED IN FETAL LIVER, SIGNAL = 0.76; EST_HUMAN HIT: BE902501.1, EVALUE 7.00e-13
VRPSAEVWCLHCGWLEGVLPACAGLHSSPG

SEQ ID NO: 43678 - protein, 52 aa, Homo sapiens
  MAP TO AC005726.1; EXPRESSED IN PLACENTA, SIGNAL = 0.95; EXPRESSED IN ADULT LIVER, SIGNAL = 0.71; EXPRESSED IN LUNG, SIGNAL = 0.71; EXPRESSED IN FETAL LIVER, SIGNAL = 0.69; EXPRESSED IN BRAIN, SIGNAL = 0.58; EXPRESSED IN BONE MARROW, SIGNAL = 0.73; SWISSPROT HIT: P08964, EVALUE 4.70e-02; EST_HUMAN HIT: F11192.1, EVALUE 3.00e-22
EHSEKKQRVRFQLEISSNPEEQRSSILHLQEAVRQHVAQIRQLEKQMYSIMK

SEQ ID NO: 43679 - protein, 59 aa, Homo sapiens
  MAP TO AC005849.1; EXPRESSED IN LUNG, SIGNAL =   1; EXPRESSED IN BRAIN, SIGNAL = 0.57; EXPRESSED IN PLACENTA, SIGNAL = 0.81; EXPRESSED IN BONE MARROW, SIGNAL = 0.61; EXPRESSED IN ADULT LIVER, SIGNAL = 0.62; EST_HUMAN HIT: AW807853.1, EVALUE 2.40e-01; SWISSPROT HIT: P12382, EVALUE 4.00e-01
CGYGKKDGVKGLIWISEKLKSLIDTTQDELTEDDSIEMSASEPVPDEEEDVEAAVAENN

SEQ ID NO: 43680 - protein, 25 aa, Homo sapiens
  MAP TO AC005695.1; EXPRESSED IN PLACENTA, SIGNAL = 1.5; EXPRESSED IN LUNG, SIGNAL = 1.5; EXPRESSED IN FETAL LIVER, SIGNAL = 1.3; EXPRESSED IN BRAIN, SIGNAL = 1.5; EXPRESSED IN BONE MARROW, SIGNAL = 1.3; EXPRESSED IN ADULT LIVER, SIGNAL = 1.3
LHSSQRNTCQQPPTPSSRCKFCLIR

SEQ ID NO: 43681 - protein, 42 aa, Homo sapiens
  MAP TO AC003108.1; EXPRESSED IN PLACENTA, SIGNAL = 1.7; EXPRESSED IN BONE MARROW, SIGNAL = 1.1; EXPRESSED IN ADULT LIVER, SIGNAL = 1.4; EXPRESSED IN LUNG, SIGNAL = 1.4; EXPRESSED IN FETAL LIVER, SIGNAL = 1.3; EXPRESSED IN BRAIN, SIGNAL = 1.1; EST_HUMAN HIT: AW453054.1, EVALUE 2.00e-15; SWISSPROT HIT: P53160, EVALUE 6.30e+00
ACVAYCFITIPSLAGIFTRLNLYLHSGQVALANQCLSQGKSI

SEQ ID NO: 43682 - protein, 22 aa, Homo sapiens
  MAP TO AC005137.1; EXPRESSED IN LUNG, SIGNAL = 0.92; EXPRESSED IN PLACENTA, SIGNAL = 0.84; EXPRESSED IN FETAL LIVER, SIGNAL = 0.98; EXPRESSED IN BRAIN, SIGNAL = 0.91; EXPRESSED IN BONE MARROW, SIGNAL = 1.1; EXPRESSED IN ADULT LIVER, SIGNAL = 0.98
VDFLIENDAEKDYLYDVLRMYH

SEQ ID NO: 43683 - protein, 28 aa, Homo sapiens
  MAP TO AC002067.1; EXPRESSED IN PLACENTA, SIGNAL = 0.85; EXPRESSED IN BRAIN, SIGNAL = 1.1; EXPRESSED IN BONE MARROW, SIGNAL = 1.1; EXPRESSED IN ADULT LIVER, SIGNAL = 1.1; EXPRESSED IN LUNG, SIGNAL = 0.96; EXPRESSED IN HELA, SIGNAL = 3.1; EXPRESSED IN FETAL LIVER, SIGNAL = 1.1
IGPRRGHQHNTPGLSHFICIPRKRFFDL

SEQ ID NO: 43684 - protein, 65 aa, Homo sapiens
  MAP TO AC005857.1; EXPRESSED IN ADULT LIVER, SIGNAL = 1.3; EXPRESSED IN PLACENTA, SIGNAL = 1.4; EXPRESSED IN LUNG, SIGNAL = 1.4; EXPRESSED IN BRAIN, SIGNAL = 0.97; EXPRESSED IN BONE MARROW, SIGNAL = 1.1; EXPRESSED IN FETAL LIVER, SIGNAL = 1.3; EST_HUMAN HIT: BF340204.1, EVALUE 2.60e+00; SWISSPROT HIT: Q06801, EVALUE 3.60e-01
RAHPTSFYSPELMKFLWFHFAEWFSLIFVVKILPDGPAGNRGGSGSTLFTLQEAQQRYFSKHRAE

SEQ ID NO: 43685 - protein, 23 aa, Homo sapiens
  MAP TO AC004857.1; EXPRESSED IN PLACENTA, SIGNAL = 0.84; EXPRESSED IN LUNG, SIGNAL = 0.99; EXPRESSED IN FETAL LIVER, SIGNAL = 0.78; EXPRESSED IN BRAIN, SIGNAL = 0.94; EXPRESSED IN BONE MARROW, SIGNAL = 0.87; EXPRESSED IN ADULT LIVER, SIGNAL = 0.87
QTGSKHVHVHGSHAISSQRYLPI

SEQ ID NO: 43686 - protein, 30 aa, Homo sapiens
  MAP TO AC005697.1; EXPRESSED IN BONE MARROW, SIGNAL = 0.84; EXPRESSED IN PLACENTA, SIGNAL = 0.92; EXPRESSED IN LUNG, SIGNAL = 0.99; EXPRESSED IN FETAL LIVER, SIGNAL = 1.1; EXPRESSED IN BRAIN, SIGNAL = 0.79; EXPRESSED IN ADULT LIVER, SIGNAL = 0.95; SWISSPROT HIT: P35228, EVALUE 3.00e-13; EST_HUMAN HIT: BE999973.1, EVALUE 5.00e-07
MACPWKFLFKTKFHQYAMNGEKDINNNVEK

SEQ ID NO: 43687 - protein, 17 aa, Homo sapiens
  MAP TO AC005697.1; EXPRESSED IN BONE MARROW, SIGNAL = 0.84; EXPRESSED IN PLACENTA, SIGNAL = 0.92; EXPRESSED IN LUNG, SIGNAL = 0.99; EXPRESSED IN FETAL LIVER, SIGNAL = 1.1; EXPRESSED IN BRAIN, SIGNAL = 0.79; EXPRESSED IN ADULT LIVER, SIGNAL = 0.95; EST_HUMAN HIT: BE999973.1, EVALUE 8.40e-02
WPVLGNFCSRPNSTSMQ

SEQ ID NO: 43688 - protein, 27 aa, Homo sapiens
  MAP TO AC002070.1; EXPRESSED IN LUNG, SIGNAL =   1; EXPRESSED IN FETAL LIVER, SIGNAL = 1.1; EXPRESSED IN BONE MARROW, SIGNAL = 1.1; EXPRESSED IN PLACENTA, SIGNAL = 0.91; EXPRESSED IN BRAIN, SIGNAL = 0.96; EXPRESSED IN ADULT LIVER, SIGNAL = 1.1; EST_HUMAN HIT: F30631.1, EVALUE 7.00e-05
GRDSLTMMEKTKATMLMGYAGQKHETM

SEQ ID NO: 43689 - protein, 27 aa, Homo sapiens
  MAP TO AC002070.1; EXPRESSED IN LUNG, SIGNAL =   1; EXPRESSED IN FETAL LIVER, SIGNAL = 1.1; EXPRESSED IN BONE MARROW, SIGNAL = 1.1; EXPRESSED IN PLACENTA, SIGNAL = 0.91; EXPRESSED IN BRAIN, SIGNAL = 0.96; EXPRESSED IN ADULT LIVER, SIGNAL = 1.1
ARAPDHTDRALLRPPGAAGLAHVSVRP

SEQ ID NO: 43690 - protein, 26 aa, Homo sapiens
  MAP TO AC002541.1; EXPRESSED IN FETAL LIVER, SIGNAL = 0.9; EXPRESSED IN BONE MARROW, SIGNAL =   1; EXPRESSED IN PLACENTA, SIGNAL = 0.97; EXPRESSED IN LUNG, SIGNAL =   1; EXPRESSED IN BRAIN, SIGNAL = 1.6; EXPRESSED IN ADULT LIVER, SIGNAL = 0.84
KHLLCFLHSFALMLPPASGRQGKAKQ

SEQ ID NO: 43691 - protein, 19 aa, Homo sapiens
  MAP TO AC002541.1; EXPRESSED IN FETAL LIVER, SIGNAL = 0.9; EXPRESSED IN BONE MARROW, SIGNAL =   1; EXPRESSED IN PLACENTA, SIGNAL = 0.97; EXPRESSED IN LUNG, SIGNAL =   1; EXPRESSED IN BRAIN, SIGNAL = 1.6; EXPRESSED IN ADULT LIVER, SIGNAL = 0.84
KALALFPALICPHVTSSEW

SEQ ID NO: 43692 - protein, 42 aa, Homo sapiens
  MAP TO AC000062.1; EXPRESSED IN PLACENTA, SIGNAL = 0.83; EXPRESSED IN BRAIN, SIGNAL = 0.6; EXPRESSED IN BONE MARROW, SIGNAL = 0.77; EXPRESSED IN ADULT LIVER, SIGNAL = 0.82; EXPRESSED IN LUNG, SIGNAL = 0.77; EXPRESSED IN FETAL LIVER, SIGNAL = 0.83; SWISSPROT HIT: P72797, EVALUE 6.30e+00
MSSLSEYCLPSILRTLFDWYKRQNGIEDESHEYRPRTSNKSK

SEQ ID NO: 43693 - protein, 96 aa, Homo sapiens
  MAP TO AC000382.1; EXPRESSED IN PLACENTA, SIGNAL = 0.69; EXPRESSED IN LUNG, SIGNAL =   1; EXPRESSED IN FETAL LIVER, SIGNAL = 1.2; EXPRESSED IN BONE MARROW, SIGNAL = 0.65; EXPRESSED IN BRAIN, SIGNAL = 0.64; EXPRESSED IN ADULT LIVER, SIGNAL = 0.55
  unsure 8
  unsure 60
  unsure 86
  unsure 88
  unsure 93
VRQSVRQXHDVQQMKTAPARKPARAARQAARAERHRHHCLAITPRRIPKYLHTRCALARXSITVNHRVMLFSPLRTGAPNERDPGXGXGRHSXVAR

SEQ ID NO: 43694 - protein, 68 aa, Homo sapiens
  MAP TO AC005154.1; EXPRESSED IN LUNG, SIGNAL = 1.3; EXPRESSED IN BONE MARROW, SIGNAL = 1.3; EXPRESSED IN ADULT LIVER, SIGNAL = 1.1; EXPRESSED IN PLACENTA, SIGNAL = 1.3; EXPRESSED IN FETAL LIVER, SIGNAL = 1.4; EXPRESSED IN BRAIN, SIGNAL =   1; SWISSPROT HIT: Q60649, EVALUE 1.90e+00; EST_HUMAN HIT: BF574716.1, EVALUE 4.30e+00
IGLGPGIWELGLLSWVELSQASGADQWGLKLEILVRQLQGYPKEKTKLMEAARKQDTPQNKRWITKWK

SEQ ID NO: 43695 - protein, 33 aa, Homo sapiens
  MAP TO AC002076.1; EXPRESSED IN LUNG, SIGNAL = 0.94; EXPRESSED IN BRAIN, SIGNAL = 0.88; EXPRESSED IN PLACENTA, SIGNAL = 0.85; EXPRESSED IN BONE MARROW, SIGNAL = 0.87; EXPRESSED IN ADULT LIVER, SIGNAL = 0.89; EXPRESSED IN FETAL LIVER, SIGNAL = 0.95; SWISSPROT HIT: P50152, EVALUE 9.00e-14; EST_HUMAN HIT: AI139572.1, EVALUE 1.00e-12
VSKCSEEIKNYIEERSGEDPLVKGIPEDKNPFK

SEQ ID NO: 43696 - protein, 168 aa, Homo sapiens
  MAP TO AC005740.1; EXPRESSED IN ADULT LIVER, SIGNAL = 1.1; EXPRESSED IN PLACENTA, SIGNAL = 1.1; EXPRESSED IN LUNG, SIGNAL = 1.2; EXPRESSED IN BRAIN, SIGNAL = 0.99; EXPRESSED IN BONE MARROW, SIGNAL = 1.1; EXPRESSED IN FETAL LIVER, SIGNAL = 1.4; EST_HUMAN HIT: BE258330.1, EVALUE 3.00e-79; SWISSPROT HIT: P50876, EVALUE 3.00e-04
LSALCKHLDNLWEEHRGSVVLFAWMQFLKEETLAYLNIVSPFELKIGSQKKVQRRTAQASPNTELDFGGAAGSDVDQEEIVDERAVQDVESLSNLIQEILDFDQAQQIKCFNSKLFLCSICFCEKLGSECMYFLECRHVYCKACLKDYFEIQIRDGQVQCLNCPEPKC

SEQ ID NO: 43697 - protein, 42 aa, Homo sapiens
  MAP TO AC005261.1; EXPRESSED IN PLACENTA, SIGNAL = 0.98; EXPRESSED IN LUNG, SIGNAL = 0.86; EXPRESSED IN FETAL LIVER, SIGNAL = 0.98; EXPRESSED IN BONE MARROW, SIGNAL = 0.96; EXPRESSED IN ADULT LIVER, SIGNAL = 0.93; EXPRESSED IN BRAIN, SIGNAL = 0.78; SWISSPROT HIT: P21506, EVALUE 2.00e-08; EST_HUMAN HIT: AV749396.1, EVALUE 9.00e-11
SCVTFEDVFVYFSREEWELLEEAQRFLYRDVMLENFALVATL

SEQ ID NO: 43698 - protein, 91 aa, Homo sapiens
  MAP TO AC004677.1; EXPRESSED IN PLACENTA, SIGNAL = 0.96; EXPRESSED IN LUNG, SIGNAL = 1.2; EXPRESSED IN BRAIN, SIGNAL = 0.99; EXPRESSED IN FETAL LIVER, SIGNAL = 1.2; EXPRESSED IN BONE MARROW, SIGNAL = 2.7; EXPRESSED IN ADULT LIVER, SIGNAL = 1.6; EST_HUMAN HIT: BE614216.1, EVALUE 2.00e-15
PRIQFFAIEIARNREGYNKAVYISVQDKEGEKGVNNGGEKRADSGEEENTKNGGEKGADSGEEKEEGINREDKTDKGGEKGKEADKEINKS

SEQ ID NO: 43699 - protein, 33 aa, Homo sapiens
  MAP TO AC005666.1; EXPRESSED IN PLACENTA, SIGNAL = 1.1; EXPRESSED IN LUNG, SIGNAL = 1.1; EXPRESSED IN FETAL LIVER, SIGNAL = 0.94; EXPRESSED IN BRAIN, SIGNAL = 5.6; EXPRESSED IN BONE MARROW, SIGNAL =   1; EXPRESSED IN ADULT LIVER, SIGNAL = 1.5; SWISSPROT HIT: O43236, EVALUE 1.00e-12; EST_HUMAN HIT: BE703253.1, EVALUE 1.00e-11
LRPLDVEFMKALHQRVNIVPILAKADTLTPPEV

SEQ ID NO: 43700 - protein, 53 aa, Homo sapiens
  MAP TO AC002080.1; EXPRESSED IN PLACENTA, SIGNAL = 0.72; EXPRESSED IN LUNG, SIGNAL = 0.55; EXPRESSED IN BRAIN, SIGNAL = 0.63; EXPRESSED IN BONE MARROW, SIGNAL = 0.66; EXPRESSED IN ADULT LIVER, SIGNAL = 0.67; SWISSPROT HIT: P08581, EVALUE 3.00e-30; EST_HUMAN HIT: AL036412.1, EVALUE 3.00e-28
LNGLGCRHFQSCSQCLSAPPFVQCGWCHDKCVRSEECLSGTWTQQICLPAIYK

SEQ ID NO: 43701 - protein, 43 aa, Homo sapiens
  MAP TO AC005157.1; EXPRESSED IN BONE MARROW, SIGNAL = 1.1; EXPRESSED IN PLACENTA, SIGNAL = 0.96; EXPRESSED IN LUNG, SIGNAL = 0.94; EXPRESSED IN FETAL LIVER, SIGNAL = 1.2; EXPRESSED IN ADULT LIVER, SIGNAL = 0.92; EXPRESSED IN BRAIN, SIGNAL = 0.85; SWISSPROT HIT: P16431, EVALUE 3.20e-01
WVQQLSKNPISEKVNTLLLVGPLIITSDFPGALLIWLSGRKNL

SEQ ID NO: 43702 - protein, 128 aa, Homo sapiens
  MAP TO AC003693.1; EXPRESSED IN PLACENTA, SIGNAL =   1; EXPRESSED IN ADULT LIVER, SIGNAL = 1.1; EXPRESSED IN LUNG, SIGNAL = 1.1; EXPRESSED IN FETAL LIVER, SIGNAL = 1.1; EXPRESSED IN BRAIN, SIGNAL = 1.3; EXPRESSED IN BONE MARROW, SIGNAL =   1; EST_HUMAN HIT: AA419611.1, EVALUE 1.90e+00
NHSIPGLERGCPQHVPRTPVQGQEGLPLPPSPLLQDLGPVGVRQVFLEGVTLQAPGGQGLWLEQLPLWGRRRAPCGRRGAEGSLSFGLGRGQGTPQRGMPGLLPAPHSRQKQRSQAVLRPHGAAPMMP

SEQ ID NO: 43703 - protein, 87 aa, Homo sapiens
  MAP TO AC005799.1; EXPRESSED IN PLACENTA, SIGNAL = 1.2; EXPRESSED IN LUNG, SIGNAL = 1.1; EXPRESSED IN FETAL LIVER, SIGNAL = 1.6; EXPRESSED IN BRAIN, SIGNAL = 1.2; EXPRESSED IN BONE MARROW, SIGNAL = 1.2; EXPRESSED IN ADULT LIVER, SIGNAL = 4.4; SWISSPROT HIT: P36956, EVALUE 8.70e-01; EST_HUMAN HIT: AW515749.1, EVALUE 4.00e-40
IKKKTLLHLQLLAQADYRLSDVMRESLLEDQLSPVLTEPHLLALDRRLQTILRTVEGCIVAHGQQSVIVDGPVEQSAPDSGQANLTS

SEQ ID NO: 43704 - protein, 20 aa, Homo sapiens
  MAP TO AC005017.1; EXPRESSED IN PLACENTA, SIGNAL = 0.9; EXPRESSED IN ADULT LIVER, SIGNAL = 1.2; EXPRESSED IN LUNG, SIGNAL = 1.1; EXPRESSED IN FETAL LIVER, SIGNAL = 1.2; EXPRESSED IN BRAIN, SIGNAL = 1.1; EXPRESSED IN BONE MARROW, SIGNAL = 1.9
KKTKVHDLLLRHSGDNRRNI

SEQ ID NO: 43705 - protein, 46 aa, Homo sapiens
  MAP TO AC003670.1; EXPRESSED IN PLACENTA, SIGNAL = 0.93; EXPRESSED IN BONE MARROW, SIGNAL =   1; EXPRESSED IN FETAL LIVER, SIGNAL = 0.75; EXPRESSED IN LUNG, SIGNAL = 0.76; EXPRESSED IN BRAIN, SIGNAL = 0.94; EXPRESSED IN ADULT LIVER, SIGNAL = 0.73; EST_HUMAN HIT: AW853428.1, EVALUE 8.00e-05; SWISSPROT HIT: P08323, EVALUE 1.60e+00
QALFKGLAAEHPGLWGSNISYHGAFASRQHHSYHATAVFLHIQMCT

SEQ ID NO: 43706 - protein, 32 aa, Homo sapiens
  MAP TO AC005162.1; EXPRESSED IN PLACENTA, SIGNAL = 0.69; EXPRESSED IN LUNG, SIGNAL = 0.84; EXPRESSED IN FETAL LIVER, SIGNAL = 0.7; EXPRESSED IN BONE MARROW, SIGNAL = 0.72; EXPRESSED IN ADULT LIVER, SIGNAL = 0.7; EXPRESSED IN BRAIN, SIGNAL = 0.81
NIMVNNITTLFPRQGITHEVDHSSVGGGEWAF

SEQ ID NO: 43707 - protein, 105 aa, Homo sapiens
  MAP TO AC004526.1; EXPRESSED IN PLACENTA, SIGNAL = 0.66; EXPRESSED IN BONE MARROW, SIGNAL = 0.53; EXPRESSED IN LUNG, SIGNAL = 0.56; EXPRESSED IN BRAIN, SIGNAL = 0.85; EXPRESSED IN ADULT LIVER, SIGNAL = 0.49; EST_HUMAN HIT: AW752722.1, EVALUE 6.00e-20; SWISSPROT HIT: Q04690, EVALUE 5.00e-56
TSAERTKVLGQSVFLNDIYYASEIEEICLVDENQFTLTIANQGTPLTFMHQECEAIVQSIIHIRTRWELSQPDSIPQHTKIRPKDVPGTLLNIALLNLGSSDPSL

SEQ ID NO: 43708 - protein, 47 aa, Homo sapiens
  MAP TO AC003953.1; EXPRESSED IN LUNG, SIGNAL = 1.2; EXPRESSED IN FETAL LIVER, SIGNAL = 1.2; EXPRESSED IN BRAIN, SIGNAL = 1.3; EXPRESSED IN BONE MARROW, SIGNAL = 1.1; EXPRESSED IN PLACENTA, SIGNAL = 1.2; EXPRESSED IN ADULT LIVER, SIGNAL = 1.2; EST_HUMAN HIT: AV716537.1, EVALUE 5.20e+00
YLTAYFLTIYTSSASPTPPISLSATIPSLRLSFFLPGCHSSCLQLTL

SEQ ID NO: 43709 - protein, 31 aa, Homo sapiens
  MAP TO AC002301.1; EXPRESSED IN PLACENTA, SIGNAL = 0.57; EXPRESSED IN BRAIN, SIGNAL = 0.66; EXPRESSED IN BONE MARROW, SIGNAL = 0.6; EXPRESSED IN ADULT LIVER, SIGNAL = 0.49; EXPRESSED IN LUNG, SIGNAL = 0.68; EST_HUMAN HIT: AI833168.1, EVALUE 4.00e-11
SGGGKRFSHSGNQLDGPITALRVRVNTYYIV

SEQ ID NO: 43710 - protein, 48 aa, Homo sapiens
  MAP TO AC004240.1; EXPRESSED IN PLACENTA, SIGNAL = 0.67; EXPRESSED IN LUNG, SIGNAL = 0.72; EXPRESSED IN FETAL LIVER, SIGNAL = 0.77; EXPRESSED IN BRAIN, SIGNAL = 0.94; EXPRESSED IN BONE MARROW, SIGNAL = 0.55; EXPRESSED IN ADULT LIVER, SIGNAL = 0.73; EST_HUMAN HIT: Z20946.1, EVALUE 4.50e-01; SWISSPROT HIT: Q64408, EVALUE 6.20e+00
VSLTWMEEKRVLKAYPSLLFLQTSLTTPTEKAGLLPTLLLPKVLRCVW

SEQ ID NO: 43711 - protein, 162 aa, Homo sapiens
  MAP TO AC003080.1; EXPRESSED IN PLACENTA, SIGNAL = 0.62; EXPRESSED IN BONE MARROW, SIGNAL = 0.49; EXPRESSED IN ADULT LIVER, SIGNAL = 0.51; EXPRESSED IN LUNG, SIGNAL = 0.49; EXPRESSED IN BRAIN, SIGNAL = 0.59; EST_HUMAN HIT: AA167678.1, EVALUE 5.00e-35; SWISSPROT HIT: P11260, EVALUE 3.00e-18
NASESLNSRIDKAEERIGKLEDRLFENTQSEETKEKRIENNDALLQYLENSFKSANLRVIGLKEEVEKEIVLESFFEGIITEKFPNLEKDISIQVQEGYRTPSRFNPKKTTSKHLIIKLRKVKDEERILKAAKEKKQVTQWSSNTSGSRLFGGNLTGKESVA

SEQ ID NO: 43712 - protein, 47 aa, Homo sapiens
  MAP TO AC005166.1; EXPRESSED IN LUNG, SIGNAL = 0.92; EXPRESSED IN BRAIN, SIGNAL = 0.97; EXPRESSED IN BONE MARROW, SIGNAL = 0.89; EXPRESSED IN PLACENTA, SIGNAL = 0.86; EXPRESSED IN FETAL LIVER, SIGNAL = 0.87; EXPRESSED IN ADULT LIVER, SIGNAL = 0.94; EST_HUMAN HIT: BF035752.1, EVALUE 1.00e-20; SWISSPROT HIT: Q62241, EVALUE 2.80e+00
KLYHFHLHRCSFYSCHTGDPIQESHCHRHRHKEAFTKGLDVSFHPPL

SEQ ID NO: 43713 - protein, 25 aa, Homo sapiens
  MAP TO AC003084.1; EXPRESSED IN LUNG, SIGNAL = 1.3; EXPRESSED IN FETAL LIVER, SIGNAL = 0.99; EXPRESSED IN BRAIN, SIGNAL = 1.4; EXPRESSED IN BONE MARROW, SIGNAL =   1; EXPRESSED IN PLACENTA, SIGNAL = 1.3; EXPRESSED IN ADULT LIVER, SIGNAL = 1.2
ALILHRETLRKEDFGTSEPGSGEEI

SEQ ID NO: 43714 - protein, 30 aa, Homo sapiens
  MAP TO AC004457.1; EXPRESSED IN PLACENTA, SIGNAL = 0.72; EXPRESSED IN BRAIN, SIGNAL = 0.72; EXPRESSED IN BONE MARROW, SIGNAL = 0.58; EXPRESSED IN ADULT LIVER, SIGNAL = 0.65; EXPRESSED IN LUNG, SIGNAL = 0.69
NFMNLNYHLTTPFTDEKTDADVKKLVSVKD

SEQ ID NO: 43715 - protein, 50 aa, Homo sapiens
  MAP TO AC005094.1; EXPRESSED IN BONE MARROW, SIGNAL = 0.93; EXPRESSED IN PLACENTA, SIGNAL = 0.62; EXPRESSED IN LUNG, SIGNAL = 1.1; EXPRESSED IN FETAL LIVER, SIGNAL = 0.87; EXPRESSED IN BRAIN, SIGNAL = 0.83; EXPRESSED IN ADULT LIVER, SIGNAL = 0.77; EST_HUMAN HIT: AI539448.1, EVALUE 2.00e-03
VKAAEEFLETLDVLIVEENYLPEQIDRDETFLFCKWMPERTFIHKEAKLT

SEQ ID NO: 43716 - protein, 63 aa, Homo sapiens
  MAP TO AC004534.1; EXPRESSED IN PLACENTA, SIGNAL = 1.3; EXPRESSED IN LUNG, SIGNAL = 1.3; EXPRESSED IN FETAL LIVER, SIGNAL = 1.1; EXPRESSED IN BRAIN, SIGNAL = 0.9; EXPRESSED IN ADULT LIVER, SIGNAL = 1.4; EXPRESSED IN BONE MARROW, SIGNAL = 1.2; EST_HUMAN HIT: AV690437.1, EVALUE 1.20e-02; SWISSPROT HIT: P24152, EVALUE 4.60e-02
PPMLLTSDQTLAPTQPSEGAQRVVTPPLFSPPPVRRADLPFPLGPVHTPQLMPLLMDVAGSDS

SEQ ID NO: 43717 - protein, 28 aa, Homo sapiens
  MAP TO AC005234.1; EXPRESSED IN BONE MARROW, SIGNAL = 1.2; EXPRESSED IN PLACENTA, SIGNAL = 0.89; EXPRESSED IN LUNG, SIGNAL = 1.3; EXPRESSED IN FETAL LIVER, SIGNAL = 1.1; EXPRESSED IN BRAIN, SIGNAL = 1.2; EXPRESSED IN ADULT LIVER, SIGNAL = 1.1
VRPSSLFFRMRKRSMILGSCFPVTVGLV

SEQ ID NO: 43718 - protein, 24 aa, Homo sapiens
  MAP TO AC005234.1; EXPRESSED IN BONE MARROW, SIGNAL = 1.2; EXPRESSED IN PLACENTA, SIGNAL = 0.89; EXPRESSED IN LUNG, SIGNAL = 1.3; EXPRESSED IN FETAL LIVER, SIGNAL = 1.1; EXPRESSED IN BRAIN, SIGNAL = 1.2; EXPRESSED IN ADULT LIVER, SIGNAL = 1.1
NQAHSDRETGAQDHGSLSHTEEQG

SEQ ID NO: 43719 - protein, 31 aa, Homo sapiens
  MAP TO AC004025.1; EXPRESSED IN PLACENTA, SIGNAL = 0.64; EXPRESSED IN LUNG, SIGNAL = 0.79; EXPRESSED IN BRAIN, SIGNAL = 0.95; EXPRESSED IN BONE MARROW, SIGNAL = 0.77; EXPRESSED IN ADULT LIVER, SIGNAL = 0.73; EXPRESSED IN FETAL LIVER, SIGNAL = 0.74
ATALHFSLVIKEDEQDHALGKAIQGNEAGMQ

SEQ ID NO: 43720 - protein, 172 aa, Homo sapiens
  MAP TO AC004531.1; EXPRESSED IN PLACENTA, SIGNAL = 1.6; EXPRESSED IN LUNG, SIGNAL = 1.7; EXPRESSED IN FETAL LIVER, SIGNAL = 1.5; EXPRESSED IN BRAIN, SIGNAL = 1.3; EXPRESSED IN BONE MARROW, SIGNAL = 1.7; EXPRESSED IN ADULT LIVER, SIGNAL = 1.4; EXPRESSED IN HELA, SIGNAL = 1.7; EST_HUMAN HIT: BE379007.1, EVALUE 5.00e-89; SWISSPROT HIT: Q12968, EVALUE 6.00e-90
TSSHLPQLQCRDESVSKEQHMIPSPIVHQPFQVTPTPPVGSSYQPMQTNVVYNGPTCLPINAASSQEFDSVLFQQDATLSGLVNLGCQPLSSIPFHSSNSGSTGHLLAHTPHSVHTLPHLQSMGYHCSNTGQRSLSSPVADQITGQPSSQLQPITYGPSHSGSATTASPAAS

SEQ ID NO: 43721 - protein, 28 aa, Homo sapiens
  MAP TO AC004541.1; EXPRESSED IN FETAL LIVER, SIGNAL = 1.2; EXPRESSED IN BONE MARROW, SIGNAL =   1; EXPRESSED IN ADULT LIVER, SIGNAL = 1.3; EXPRESSED IN PLACENTA, SIGNAL = 1.2; EXPRESSED IN LUNG, SIGNAL = 1.1; EXPRESSED IN BRAIN, SIGNAL =   1; EST_HUMAN HIT: AI473415.1, EVALUE 6.10e-02
AVEGSASVEASENLQSRQKAKRNQAPLH

SEQ ID NO: 43722 - protein, 26 aa, Homo sapiens
  MAP TO AC002533.1; EXPRESSED IN LUNG, SIGNAL = 1.2; EXPRESSED IN FETAL LIVER, SIGNAL = 0.8; EXPRESSED IN BRAIN, SIGNAL = 0.67; EXPRESSED IN BONE MARROW, SIGNAL = 0.84; EXPRESSED IN PLACENTA, SIGNAL = 0.94; EXPRESSED IN ADULT LIVER, SIGNAL = 1.1
DNFHNRGNRSSETNYIRQCWYNRSKM

SEQ ID NO: 43723 - protein, 27 aa, Homo sapiens
  MAP TO AC004417.1; EXPRESSED IN LUNG, SIGNAL = 0.95; EXPRESSED IN BRAIN, SIGNAL =   1; EXPRESSED IN BONE MARROW, SIGNAL =   1; EXPRESSED IN ADULT LIVER, SIGNAL = 0.84; EXPRESSED IN PLACENTA, SIGNAL = 0.89; EXPRESSED IN FETAL LIVER, SIGNAL =   1
DSIRALLAIGNRNSTQNSIEQKEREMY

SEQ ID NO: 43724 - protein, 58 aa, Homo sapiens
  MAP TO AC005923.2; EXPRESSED IN PLACENTA, SIGNAL = 1.1; EXPRESSED IN LUNG, SIGNAL = 1.1; EXPRESSED IN FETAL LIVER, SIGNAL = 1.1; EXPRESSED IN BRAIN, SIGNAL = 1.3; EXPRESSED IN BONE MARROW, SIGNAL = 0.99; EXPRESSED IN ADULT LIVER, SIGNAL = 1.2; EST_HUMAN HIT: AW900873.1, EVALUE 7.00e-14; SWISSPROT HIT: Q16983, EVALUE 4.00e-10
LVCTAVAILLHYFFLSTFAWLFVQGLHLYRMQVEPRNVDRGAMRFYHALGWGVPAVLL

SEQ ID NO: 43725 - protein, 51 aa, Homo sapiens
  MAP TO AC005145.1; EXPRESSED IN BONE MARROW, SIGNAL = 0.9; EXPRESSED IN PLACENTA, SIGNAL = 0.68; EXPRESSED IN LUNG, SIGNAL = 0.88; EXPRESSED IN FETAL LIVER, SIGNAL = 0.72; EXPRESSED IN BRAIN, SIGNAL = 0.67; EXPRESSED IN ADULT LIVER, SIGNAL = 0.64; EST_HUMAN HIT: BE833208.1, EVALUE 7.60e-01; SWISSPROT HIT: P91409, EVALUE 4.70e+00
QVSSLYDLKASAGLQALLLLTHIVAYLLAHFVGSSIHQVLTCSASTRSCPS

SEQ ID NO: 43726 - protein, 38 aa, Homo sapiens
  MAP TO AC005736.1; EXPRESSED IN PLACENTA, SIGNAL = 0.83; EXPRESSED IN LUNG, SIGNAL = 0.79; EXPRESSED IN FETAL LIVER, SIGNAL = 0.88; EXPRESSED IN BRAIN, SIGNAL = 0.8; EXPRESSED IN BONE MARROW, SIGNAL = 0.83; EXPRESSED IN ADULT LIVER, SIGNAL = 0.89; EST_HUMAN HIT: R92567.1, EVALUE 4.00e-15; SWISSPROT HIT: Q15531, EVALUE 6.40e+00
SQKEHSVNYVNPAETFTMKCVLEKSPLKFLICMVVLKV

SEQ ID NO: 43727 - protein, 68 aa, Homo sapiens
  MAP TO AC005045.2; EXPRESSED IN BRAIN, SIGNAL = 0.68; EXPRESSED IN ADULT LIVER, SIGNAL = 2.4; EXPRESSED IN PLACENTA, SIGNAL = 0.8; EXPRESSED IN LUNG, SIGNAL = 0.61; EXPRESSED IN FETAL LIVER, SIGNAL = 0.88; EXPRESSED IN BONE MARROW, SIGNAL = 0.62; EST_HUMAN HIT: BF313560.1, EVALUE 3.00e-27; SWISSPROT HIT: P21439, EVALUE 2.00e-33
LLDGQEAKKLNVQWLRAQLGIVSQEPILFDCSIAENIAYGDNSRVVSQDEIVSAAKAANIHPFIETLP

SEQ ID NO: 43728 - protein, 29 aa, Homo sapiens
  MAP TO AC005045.2; EXPRESSED IN BRAIN, SIGNAL = 0.68; EXPRESSED IN ADULT LIVER, SIGNAL = 2.4; EXPRESSED IN PLACENTA, SIGNAL = 0.8; EXPRESSED IN LUNG, SIGNAL = 0.61; EXPRESSED IN FETAL LIVER, SIGNAL = 0.88; EXPRESSED IN BONE MARROW, SIGNAL = 0.62; EST_HUMAN HIT: BF671299.1, EVALUE 8.00e-10
ASRWSRSKETQCPVAQSSTRNRVSGAYPI

SEQ ID NO: 43729 - protein, 37 aa, Homo sapiens
  MAP TO AC004585.1; EXPRESSED IN PLACENTA, SIGNAL = 0.79; EXPRESSED IN LUNG, SIGNAL = 0.78; EXPRESSED IN FETAL LIVER, SIGNAL = 0.73; EXPRESSED IN BONE MARROW, SIGNAL = 0.68; EXPRESSED IN ADULT LIVER, SIGNAL = 0.68; EXPRESSED IN BRAIN, SIGNAL = 0.61; EST_HUMAN HIT: AA255950.1, EVALUE 8.00e-04; SWISSPROT HIT: P08547, EVALUE 2.90e-02
TTTKQLINKKTEDLNNAMNQLDLTSIYKTPPNNSRIH

SEQ ID NO: 43730 - protein, 37 aa, Homo sapiens
  MAP TO AC004382.1; EXPRESSED IN PLACENTA, SIGNAL = 6.3; EXPRESSED IN LUNG, SIGNAL = 0.79; EXPRESSED IN FETAL LIVER, SIGNAL = 0.73; EXPRESSED IN BRAIN, SIGNAL = 0.66; EXPRESSED IN BONE MARROW, SIGNAL = 0.7; EXPRESSED IN ADULT LIVER, SIGNAL = 0.73; EST_HUMAN HIT: W61220.1, EVALUE 8.50e-01; SWISSPROT HIT: O00626, EVALUE 3.00e-18
ANMEDSVCCRDYVRYRLPLRVVKHFYWTSDSCPRPGV

SEQ ID NO: 43731 - protein, 70 aa, Homo sapiens
  MAP TO AC004390.1; EXPRESSED IN FETAL LIVER, SIGNAL = 0.78; EXPRESSED IN BONE MARROW, SIGNAL = 0.74; EXPRESSED IN PLACENTA, SIGNAL = 0.82; EXPRESSED IN LUNG, SIGNAL = 0.92; EXPRESSED IN BRAIN, SIGNAL = 0.93; EXPRESSED IN ADULT LIVER, SIGNAL = 0.79; EST_HUMAN HIT: BE884960.1, EVALUE 1.30e-01; SWISSPROT HIT: Q10233, EVALUE 3.20e+00
PRSLHLENKQVGPGSWQSPFHGVNNTWHLRTGFQRAELSQQPSEDRPRVTNGETEAQTQRGEVTCPGHGA

SEQ ID NO: 43732 - protein, 54 aa, Homo sapiens
  MAP TO AC004039.1; EXPRESSED IN PLACENTA, SIGNAL = 0.72; EXPRESSED IN LUNG, SIGNAL = 0.67; EXPRESSED IN BONE MARROW, SIGNAL = 0.95; EXPRESSED IN FETAL LIVER, SIGNAL = 1.3; EXPRESSED IN BRAIN, SIGNAL = 0.61; EXPRESSED IN ADULT LIVER, SIGNAL = 0.86; SWISSPROT HIT: P48454, EVALUE 4.60e+00
VFQLACPRHQNRGGPVCKGPALTFKETFSRGTVQLKLRKHHYLQRQDLTIEVAD

SEQ ID NO: 43733 - protein, 91 aa, Homo sapiens
  MAP TO AC005803.1; EXPRESSED IN PLACENTA, SIGNAL = 0.9; EXPRESSED IN LUNG, SIGNAL = 0.85; EXPRESSED IN FETAL LIVER, SIGNAL = 1.1; EXPRESSED IN BONE MARROW, SIGNAL = 0.89; EXPRESSED IN ADULT LIVER, SIGNAL = 1.1; EXPRESSED IN BRAIN, SIGNAL = 0.94
SMHQQQQLQHQQFQKELEKIQLLQQQQQQLPFHPPGDTAQDGELLDTSGPYSESSGTSSPSTSPRASNHSLCSGSSASKAGSSPSLEQDDG

SEQ ID NO: 43734 - protein, 91 aa, Homo sapiens
  MAP TO AC005803.1; EXPRESSED IN PLACENTA, SIGNAL = 0.9; EXPRESSED IN LUNG, SIGNAL = 0.85; EXPRESSED IN FETAL LIVER, SIGNAL = 1.1; EXPRESSED IN BONE MARROW, SIGNAL = 0.89; EXPRESSED IN ADULT LIVER, SIGNAL = 1.1; EXPRESSED IN BRAIN, SIGNAL = 0.94
WVSLPRACISSSSSSTSSSRRNWRRSSSCSSSSSSCPSTHLETRLRTASSWTRLARTQRARAPAAPARPPGPPTTRSAPAALPPRLAAAPP

SEQ ID NO: 43735 - protein, 32 aa, Homo sapiens
  MAP TO AC006221.1; EXPRESSED IN LUNG, SIGNAL =   1; EXPRESSED IN FETAL LIVER, SIGNAL = 1.4; EXPRESSED IN BRAIN, SIGNAL = 1.1; EXPRESSED IN BONE MARROW, SIGNAL = 1.2; EXPRESSED IN PLACENTA, SIGNAL = 1.2; EXPRESSED IN ADULT LIVER, SIGNAL = 1.4; SWISSPROT HIT: P55552, EVALUE 6.50e+00
EWEALSTNTSPSTLLKMCSIDSTGLSGINEIV

SEQ ID NO: 43736 - protein, 46 aa, Homo sapiens
  MAP TO AC004984.1; EXPRESSED IN LUNG, SIGNAL = 0.87; EXPRESSED IN FETAL LIVER, SIGNAL =   1; EXPRESSED IN BRAIN, SIGNAL = 0.77; EXPRESSED IN BONE MARROW, SIGNAL =   1; EXPRESSED IN ADULT LIVER, SIGNAL =   1; EXPRESSED IN PLACENTA, SIGNAL = 0.91; EST_HUMAN HIT: W72151.1, EVALUE 1.00e-10; SWISSPROT HIT: P75857, EVALUE 1.60e+00
RMILGRWQRRENQESVFSPGQQLHWQNLSSITILELWRLLKASNFQ

SEQ ID NO: 43737 - protein, 40 aa, Homo sapiens
  MAP TO AC004984.1; EXPRESSED IN LUNG, SIGNAL = 0.87; EXPRESSED IN FETAL LIVER, SIGNAL =   1; EXPRESSED IN BRAIN, SIGNAL = 0.77; EXPRESSED IN BONE MARROW, SIGNAL =   1; EXPRESSED IN ADULT LIVER, SIGNAL =   1; EXPRESSED IN PLACENTA, SIGNAL = 0.91; EST_HUMAN HIT: AI435609.1, EVALUE 2.00e-05
EDDSGKMAEEREPGVCILTWTTIALAESVQYNYFGTLEAT

SEQ ID NO: 43738 - protein, 23 aa, Homo sapiens
  MAP TO AC004106.1; EXPRESSED IN ADULT LIVER, SIGNAL = 1.4; EXPRESSED IN PLACENTA, SIGNAL = 1.5; EXPRESSED IN LUNG, SIGNAL = 1.5; EXPRESSED IN BRAIN, SIGNAL = 1.3; EXPRESSED IN FETAL LIVER, SIGNAL = 1.4; EXPRESSED IN BONE MARROW, SIGNAL = 1.7
YSKNFNQKQESNRISCKVQADGN

SEQ ID NO: 43739 - protein, 31 aa, Homo sapiens
  MAP TO AC005152.1; EXPRESSED IN LUNG, SIGNAL = 1.1; EXPRESSED IN FETAL LIVER, SIGNAL = 0.97; EXPRESSED IN PLACENTA, SIGNAL = 0.97; EXPRESSED IN BRAIN, SIGNAL = 0.99; EXPRESSED IN BONE MARROW, SIGNAL = 0.84; EXPRESSED IN ADULT LIVER, SIGNAL = 0.79; EST_HUMAN HIT: BE550805.1, EVALUE 1.20e+00
LVDVKFKIKAQAGLVPGEGPLPHRGHLLIVF

SEQ ID NO: 43740 - protein, 75 aa, Homo sapiens
  MAP TO AC004549.1; EXPRESSED IN ADULT LIVER, SIGNAL = 0.65; EXPRESSED IN PLACENTA, SIGNAL = 0.8; EXPRESSED IN LUNG, SIGNAL = 0.92; EXPRESSED IN BRAIN, SIGNAL = 0.91; EXPRESSED IN FETAL LIVER, SIGNAL = 0.88; EXPRESSED IN BONE MARROW, SIGNAL = 0.67; EST_HUMAN HIT: BE727393.1, EVALUE 3.00e-35; SWISSPROT HIT: P35748, EVALUE 1.30e-01
EDTCFLKEQLRKAEEQVQATRQEVVFLAKELSDAVNVRDRTMADLHTARLENEKVKKQLADAVAELKLNAMKKDQ

SEQ ID NO: 43741 - protein, 44 aa, Homo sapiens
  MAP TO AC005738.1; EXPRESSED IN PLACENTA, SIGNAL = 0.98; EXPRESSED IN LUNG, SIGNAL = 0.95; EXPRESSED IN FETAL LIVER, SIGNAL = 1.1; EXPRESSED IN BRAIN, SIGNAL =   1; EXPRESSED IN ADULT LIVER, SIGNAL = 1.6; EXPRESSED IN BONE MARROW, SIGNAL = 1.2; EST_HUMAN HIT: AI126574.1, EVALUE 2.00e-16; SWISSPROT HIT: O95715, EVALUE 1.00e-17
LILLRFSITTKSVSRYRGQEHCLHPKLQSTKRFIKWYNAWNEKR

SEQ ID NO: 43742 - protein, 24 aa, Homo sapiens
  MAP TO AC004129.1; EXPRESSED IN LUNG, SIGNAL = 1.1; EXPRESSED IN BRAIN, SIGNAL = 0.88; EXPRESSED IN BONE MARROW, SIGNAL =   1; EXPRESSED IN PLACENTA, SIGNAL = 1.1; EXPRESSED IN FETAL LIVER, SIGNAL =   1; EXPRESSED IN ADULT LIVER, SIGNAL = 0.99; EST_HUMAN HIT: AW501998.1, EVALUE 2.10e-02
KLQRTITTYMFLALELDMTPFMAS

SEQ ID NO: 43743 - protein, 45 aa, Homo sapiens
  MAP TO AC004129.1; EXPRESSED IN LUNG, SIGNAL = 1.1; EXPRESSED IN BRAIN, SIGNAL = 0.88; EXPRESSED IN BONE MARROW, SIGNAL =   1; EXPRESSED IN PLACENTA, SIGNAL = 1.1; EXPRESSED IN FETAL LIVER, SIGNAL =   1; EXPRESSED IN ADULT LIVER, SIGNAL = 0.99; SWISSPROT HIT: P36949, EVALUE 4.80e+00; EST_HUMAN HIT: BE562352.1, EVALUE 3.60e-02
PSWVPVLITVPLDTEQANTPAYLEAMKGVMSSSRARNMYVVIVRC

SEQ ID NO: 43744 - protein, 40 aa, Homo sapiens
  MAP TO AC004492.1; EXPRESSED IN PLACENTA, SIGNAL = 1.1; EXPRESSED IN LUNG, SIGNAL = 0.78; EXPRESSED IN FETAL LIVER, SIGNAL =   1; EXPRESSED IN BONE MARROW, SIGNAL = 0.83; EXPRESSED IN ADULT LIVER, SIGNAL = 0.91; EXPRESSED IN BRAIN, SIGNAL = 0.84; EST_HUMAN HIT: AU129238.1, EVALUE 4.00e-16; SWISSPROT HIT: P31322, EVALUE 3.00e-17
ENGAVEIARCSRGQYFGELALVTNKPRAASAHAIGTVKCL

SEQ ID NO: 43745 - protein, 23 aa, Homo sapiens
  MAP TO AC004492.1; EXPRESSED IN PLACENTA, SIGNAL = 1.1; EXPRESSED IN LUNG, SIGNAL = 0.78; EXPRESSED IN FETAL LIVER, SIGNAL =   1; EXPRESSED IN BONE MARROW, SIGNAL = 0.83; EXPRESSED IN ADULT LIVER, SIGNAL = 0.91; EXPRESSED IN BRAIN, SIGNAL = 0.84; EST_HUMAN HIT: C18185.1, EVALUE 9.00e-08
REWCSRNRSMLAGTVLWRACPGN

SEQ ID NO: 43746 - protein, 30 aa, Homo sapiens
  MAP TO AC004112.1; EXPRESSED IN LUNG, SIGNAL = 0.76; EXPRESSED IN FETAL LIVER, SIGNAL = 1.8; EXPRESSED IN BRAIN, SIGNAL =   1; EXPRESSED IN BONE MARROW, SIGNAL = 1.1; EXPRESSED IN PLACENTA, SIGNAL = 0.87; EXPRESSED IN ADULT LIVER, SIGNAL = 1.2; SWISSPROT HIT: P47043, EVALUE 8.60e+00; EST_HUMAN HIT: W81660.1, EVALUE 1.00e-11
REILEQQQQERNDTNFHGVCMFCNEEFLGN

SEQ ID NO: 43747 - protein, 30 aa, Homo sapiens
  MAP TO AC004112.1; EXPRESSED IN LUNG, SIGNAL = 0.76; EXPRESSED IN FETAL LIVER, SIGNAL = 1.8; EXPRESSED IN BRAIN, SIGNAL =   1; EXPRESSED IN BONE MARROW, SIGNAL = 1.1; EXPRESSED IN PLACENTA, SIGNAL = 0.87; EXPRESSED IN ADULT LIVER, SIGNAL = 1.2; EST_HUMAN HIT: W81660.1, EVALUE 6.00e-11
EKFWNNSSKNEMIPIFMAFVCFAMKNSLET

SEQ ID NO: 43748 - protein, 74 aa, Homo sapiens
  MAP TO AC002523.1; EXPRESSED IN LUNG, SIGNAL =   1; EXPRESSED IN FETAL LIVER, SIGNAL = 1.5; EXPRESSED IN ADULT LIVER, SIGNAL = 1.5; EXPRESSED IN PLACENTA, SIGNAL = 0.93; EXPRESSED IN BRAIN, SIGNAL = 0.83; EXPRESSED IN BONE MARROW, SIGNAL = 0.8; SWISSPROT HIT: P27658, EVALUE 7.40e-01; EST_HUMAN HIT: BF311699.1, EVALUE 3.10e+00
IKSLMLRGEQGLGLPGVLGKQGPEKEVVLGKPPGQETLRHLRAAAAIVKRKGVNLHLTHQDVGALWDVRDVRNH

SEQ ID NO: 43749 - protein, 93 aa, Homo sapiens
  MAP TO AC005065.1; EXPRESSED IN PLACENTA, SIGNAL = 1.5; EXPRESSED IN LUNG, SIGNAL = 0.93; EXPRESSED IN FETAL LIVER, SIGNAL = 0.89; EXPRESSED IN ADULT LIVER, SIGNAL = 0.8; EXPRESSED IN BRAIN, SIGNAL = 0.85; EXPRESSED IN BONE MARROW, SIGNAL = 0.95; SWISSPROT HIT: P36641, EVALUE 6.00e+00; EST_HUMAN HIT: BE160025.1, EVALUE 4.00e-33
CACLKENPECPVLKRSSESMENINSGYETRRKKGKKDKDISKEKDTQNQNITLDCEGTTNKMKSPETKQRKLSPLRLSVSNNQVLNSALNEIE

SEQ ID NO: 43750 - protein, 53 aa, Homo sapiens
  MAP TO AC004408.1; EXPRESSED IN LUNG, SIGNAL = 1.2; EXPRESSED IN FETAL LIVER, SIGNAL =   1; EXPRESSED IN BRAIN, SIGNAL =   1; EXPRESSED IN BONE MARROW, SIGNAL = 0.85; EXPRESSED IN ADULT LIVER, SIGNAL = 0.96; EXPRESSED IN PLACENTA, SIGNAL = 0.97; EST_HUMAN HIT: AW028265.1, EVALUE 2.00e-26; SWISSPROT HIT: Q09530, EVALUE 3.60e+00
HDEGPGSGWAAKGTVRGWNRRARESPGHVSEPDRTQLSQDLGGGTLAMDTLPD

SEQ ID NO: 43751 - protein, 37 aa, Homo sapiens
  MAP TO AC004408.1; EXPRESSED IN LUNG, SIGNAL = 1.2; EXPRESSED IN FETAL LIVER, SIGNAL =   1; EXPRESSED IN BRAIN, SIGNAL =   1; EXPRESSED IN BONE MARROW, SIGNAL = 0.85; EXPRESSED IN ADULT LIVER, SIGNAL = 0.96; EXPRESSED IN PLACENTA, SIGNAL = 0.97; EST_HUMAN HIT: N80215.1, EVALUE 1.00e-13; SWISSPROT HIT: P21917, EVALUE 4.90e+00
VTMRAQALDGLPKGPCGAGTGEPERALGMCQSRTGPS

SEQ ID NO: 43752 - protein, 57 aa, Homo sapiens
  MAP TO AC005274.1; EXPRESSED IN LUNG, SIGNAL = 1.1; EXPRESSED IN FETAL LIVER, SIGNAL =   1; EXPRESSED IN BRAIN, SIGNAL = 1.4; EXPRESSED IN BONE MARROW, SIGNAL = 0.91; EXPRESSED IN ADULT LIVER, SIGNAL = 0.9; EXPRESSED IN PLACENTA, SIGNAL = 4.8; SWISSPROT HIT: P50535, EVALUE 7.90e+00; EST_HUMAN HIT: BF313510.1, EVALUE 4.70e+00
IEFNITGNYGSPVHVNHNANYSSMPSPDMDPADRRQPEQARRPLSVATDNMMLEFYK

SEQ ID NO: 43753 - protein, 32 aa, Homo sapiens
  MAP TO AC005870.1; EXPRESSED IN LUNG, SIGNAL = 0.8; EXPRESSED IN BRAIN, SIGNAL = 0.88; EXPRESSED IN ADULT LIVER, SIGNAL = 0.83; EXPRESSED IN PLACENTA, SIGNAL =   1; EXPRESSED IN FETAL LIVER, SIGNAL = 0.86; EXPRESSED IN BONE MARROW, SIGNAL = 0.7
KNKMTIYMAKNLLWFPCTLLLQVVGYPWVFLL

SEQ ID NO: 43754 - protein, 59 aa, Homo sapiens
  MAP TO AC005146.1; EXPRESSED IN LUNG, SIGNAL =   1; EXPRESSED IN BONE MARROW, SIGNAL = 0.91; EXPRESSED IN PLACENTA, SIGNAL = 0.99; EXPRESSED IN FETAL LIVER, SIGNAL = 1.1; EXPRESSED IN BRAIN, SIGNAL =   1; EXPRESSED IN ADULT LIVER, SIGNAL = 1.1; EST_HUMAN HIT: AA436915.1, EVALUE 1.00e-05
TGGDFALHLPQGQCLETFIVDCHTWTGGATGSWWAESWNADQHLIMHRTLSTTRNYKIQ

SEQ ID NO: 43755 - protein, 90 aa, Homo sapiens
  MAP TO AC004417.1; EXPRESSED IN BRAIN, SIGNAL = 2.4; EXPRESSED IN ADULT LIVER, SIGNAL = 0.94; EXPRESSED IN LUNG, SIGNAL = 0.53; EXPRESSED IN FETAL LIVER, SIGNAL = 0.7; EXPRESSED IN BONE MARROW, SIGNAL = 0.56; SWISSPROT HIT: P52757, EVALUE 7.00e-48; EST_HUMAN HIT: BE296661.1, EVALUE 4.00e-21
LNYRLFHDGKHFVGEKRFESIHDLVTDGLITLYIETKAAEYISKMTTNPIYEHIGYATLLREKVSRRLSRSKNEPRKTNVTHEEHTAVEK

SEQ ID NO: 43756 - protein, 65 aa, Homo sapiens
  MAP TO AC005281.2; EXPRESSED IN LUNG, SIGNAL = 0.63; EXPRESSED IN FETAL LIVER, SIGNAL = 0.68; EXPRESSED IN BONE MARROW, SIGNAL = 0.68; EXPRESSED IN PLACENTA, SIGNAL = 0.81; EXPRESSED IN ADULT LIVER, SIGNAL = 0.71; EXPRESSED IN BRAIN, SIGNAL = 0.77; SWISSPROT HIT: Q60604, EVALUE 2.00e-32; EST_HUMAN HIT: BE897112.1, EVALUE 1.00e-32
GETPIFKQFFKDWRDKDQSDGFGKVYVTEKVAQIKQIPFDASKLHSSPQMAAQHNMVDDGSGKVE

SEQ ID NO: 43757 - protein, 55 aa, Homo sapiens
  MAP TO AC004508.1; EXPRESSED IN PLACENTA, SIGNAL = 0.79; EXPRESSED IN LUNG, SIGNAL = 0.71; EXPRESSED IN FETAL LIVER, SIGNAL = 0.7; EXPRESSED IN BRAIN, SIGNAL = 0.63; EXPRESSED IN ADULT LIVER, SIGNAL = 0.71; EXPRESSED IN BONE MARROW, SIGNAL = 0.67; SWISSPROT HIT: P20592, EVALUE 5.00e-22; EST_HUMAN HIT: AU121806.1, EVALUE 5.00e-14
MAGNGRGISHELISLEITSPEVPDLTIIDLPGITRVAVDNQPRDIGLQVSPSGIW

SEQ ID NO: 43758 - protein, 25 aa, Homo sapiens
  MAP TO AC005020.1; EXPRESSED IN LUNG, SIGNAL = 1.1; EXPRESSED IN FETAL LIVER, SIGNAL = 0.92; EXPRESSED IN BONE MARROW, SIGNAL = 0.96; EXPRESSED IN PLACENTA, SIGNAL = 0.93; EXPRESSED IN BRAIN, SIGNAL = 1.2; EXPRESSED IN ADULT LIVER, SIGNAL = 1.1
MGDGGVHCRRQPHAHNAHLQALPPR

SEQ ID NO: 43759 - protein, 59 aa, Homo sapiens
  MAP TO AC004601.1; EXPRESSED IN BONE MARROW, SIGNAL = 1.4; EXPRESSED IN PLACENTA, SIGNAL = 0.98; EXPRESSED IN LUNG, SIGNAL = 1.1; EXPRESSED IN FETAL LIVER, SIGNAL = 1.7; EXPRESSED IN BRAIN, SIGNAL = 0.93; EXPRESSED IN ADULT LIVER, SIGNAL = 1.6; SWISSPROT HIT: P01233, EVALUE 9.10e-01; EST_HUMAN HIT: R69301.1, EVALUE 9.00e-03
DSKCSSIAVWTKCGSPAHPPAACGDRQGCSHHAYGERSSSPQPPPALRSTISPFLSLPD

SEQ ID NO: 43760 - protein, 38 aa, Homo sapiens
  MAP TO AC004100.1; EXPRESSED IN LUNG, SIGNAL = 1.2; EXPRESSED IN FETAL LIVER, SIGNAL = 0.94; EXPRESSED IN BRAIN, SIGNAL = 0.9; EXPRESSED IN BONE MARROW, SIGNAL = 0.97; EXPRESSED IN PLACENTA, SIGNAL = 0.86; EXPRESSED IN ADULT LIVER, SIGNAL =   1; SWISSPROT HIT: Q9UL58, EVALUE 3.70e+00; EST_HUMAN HIT: AW954808.1, EVALUE 2.90e-01
SAPHWEKPKPHREATRGCSRWQSQLSPALESHVSEKSP

SEQ ID NO: 43761 - protein, 25 aa, Homo sapiens
  MAP TO AC004926.2; EXPRESSED IN PLACENTA, SIGNAL =   1; EXPRESSED IN BRAIN, SIGNAL = 0.77; EXPRESSED IN BONE MARROW, SIGNAL = 0.98; EXPRESSED IN ADULT LIVER, SIGNAL =   1; EXPRESSED IN LUNG, SIGNAL = 0.99; EXPRESSED IN FETAL LIVER, SIGNAL = 1.4
IPVFDYGKNWAFNVLLTRIVNTVAK

SEQ ID NO: 43762 - protein, 20 aa, Homo sapiens
  MAP TO AC004864.1; EXPRESSED IN PLACENTA, SIGNAL = 2.3; EXPRESSED IN LUNG, SIGNAL = 0.98; EXPRESSED IN BRAIN, SIGNAL = 0.88; EXPRESSED IN ADULT LIVER, SIGNAL =   1; EXPRESSED IN FETAL LIVER, SIGNAL = 1.1; EXPRESSED IN BONE MARROW, SIGNAL =   1
VCREYYGSPEKQHMPCHRLA

SEQ ID NO: 43763 - protein, 50 aa, Homo sapiens
  MAP TO AC005210.2; EXPRESSED IN BONE MARROW, SIGNAL = 0.57; EXPRESSED IN ADULT LIVER, SIGNAL = 0.64; EXPRESSED IN PLACENTA, SIGNAL =   1; EXPRESSED IN BRAIN, SIGNAL = 0.67; EXPRESSED IN LUNG, SIGNAL = 0.57; SWISSPROT HIT: P57492, EVALUE 7.10e-01
MSHLGCLTINCDSIEQPLLLIQEICANLGLELGTNLHLAINCAGHELMDY

SEQ ID NO: 43764 - protein, 113 aa, Homo sapiens
  MAP TO AC004558.1; EXPRESSED IN ADULT LIVER, SIGNAL = 1.9; EXPRESSED IN PLACENTA, SIGNAL = 2.2; EXPRESSED IN LUNG, SIGNAL = 1.6; EXPRESSED IN BRAIN, SIGNAL = 1.1; EXPRESSED IN FETAL LIVER, SIGNAL = 1.9; EXPRESSED IN BONE MARROW, SIGNAL = 8.3; SWISSPROT HIT: P31997, EVALUE 5.00e-62; EST_HUMAN HIT: BE736514.1, EVALUE 3.00e-44
SLFTFWNPPTTAQLTIEAVPSNAAEGKEVLLLVHNLPQDPRGYNWYKGETVDANRRIIGYVISNQQITPGPAYSNRETIYPNASLLMRNVTRNDTGSYTLQVIKLNLMSEEVT

SEQ ID NO: 43765 - protein, 25 aa, Homo sapiens
  MAP TO AC002124.1; EXPRESSED IN ADULT LIVER, SIGNAL = 0.93; EXPRESSED IN LUNG, SIGNAL = 0.74; EXPRESSED IN PLACENTA, SIGNAL = 0.58; EXPRESSED IN FETAL LIVER, SIGNAL = 0.69; EXPRESSED IN BRAIN, SIGNAL = 0.71; EXPRESSED IN BONE MARROW, SIGNAL = 0.71; EST_HUMAN HIT: AA744837.1, EVALUE 4.00e-10
LFQNNYTLEEWKHWIASLCSRSGWW

SEQ ID NO: 43766 - protein, 31 aa, Homo sapiens
  MAP TO AC005959.1; EXPRESSED IN PLACENTA, SIGNAL = 0.71; EXPRESSED IN BONE MARROW, SIGNAL = 0.73; EXPRESSED IN ADULT LIVER, SIGNAL = 0.73; EXPRESSED IN LUNG, SIGNAL = 0.77; EXPRESSED IN FETAL LIVER, SIGNAL = 0.69; EXPRESSED IN BRAIN, SIGNAL = 0.64; EST_HUMAN HIT: AI221385.1, EVALUE 2.00e-11
MIERGLIPPTARITFQNPPITPRAAPLHSFD

SEQ ID NO: 43767 - protein, 76 aa, Homo sapiens
  MAP TO AC005866.3; EXPRESSED IN BONE MARROW, SIGNAL = 0.51; EXPRESSED IN ADULT LIVER, SIGNAL = 0.57; EXPRESSED IN LUNG, SIGNAL = 0.53; EXPRESSED IN BRAIN, SIGNAL = 0.64; SWISSPROT HIT: Q01815, EVALUE 1.00e-11; EST_HUMAN HIT: AI016238.1, EVALUE 2.00e-22
FRLQCHRIVNDTIFTNLILFFILLSSISLAAEDPVQHTSFRNHVCIACVFCTPSPWGCARPTASVADIIVQSGAQF

SEQ ID NO: 43768 - protein, 26 aa, Homo sapiens
  MAP TO AB019441.1; EXPRESSED IN PLACENTA, SIGNAL = 0.66; EXPRESSED IN LUNG, SIGNAL = 0.46; EXPRESSED IN FETAL LIVER, SIGNAL = 1.1; EXPRESSED IN BONE MARROW, SIGNAL = 0.74; EXPRESSED IN BRAIN, SIGNAL = 0.78; EXPRESSED IN ADULT LIVER, SIGNAL = 0.8; EST_HUMAN HIT: BE295500.1, EVALUE 1.20e+00
QVPARPGAGAGEAGGQVRSRSGEAQA

SEQ ID NO: 43769 - protein, 26 aa, Homo sapiens
  MAP TO AC005277.1; EXPRESSED IN PLACENTA, SIGNAL = 0.97; EXPRESSED IN LUNG, SIGNAL =   1; EXPRESSED IN FETAL LIVER, SIGNAL = 0.98; EXPRESSED IN BONE MARROW, SIGNAL =   1; EXPRESSED IN ADULT LIVER, SIGNAL = 0.98; EXPRESSED IN BRAIN, SIGNAL = 0.95; EST_HUMAN HIT: AI065129.1, EVALUE 8.00e+00
LLRWADICVLILRKCEYFMLSGKTNF

SEQ ID NO: 43770 - protein, 65 aa, Homo sapiens
  MAP TO AC005078.1; EXPRESSED IN PLACENTA, SIGNAL = 1.3; EXPRESSED IN LUNG, SIGNAL = 1.3; EXPRESSED IN FETAL LIVER, SIGNAL = 1.3; EXPRESSED IN BRAIN, SIGNAL = 1.4; EXPRESSED IN BONE MARROW, SIGNAL = 1.1; EXPRESSED IN ADULT LIVER, SIGNAL = 1.2; SWISSPROT HIT: P39057, EVALUE 1.00e-24; EST_HUMAN HIT: AI795798.1, EVALUE 2.00e-08
VLMRALRDFNMPKIVTDDIPVFLGLVGDLFPALDVPRRRKLHFEQMVRQSTLELRLQPEESFILK

SEQ ID NO: 43771 - protein, 45 aa, Homo sapiens
  MAP TO AC005078.1; EXPRESSED IN PLACENTA, SIGNAL = 1.3; EXPRESSED IN LUNG, SIGNAL = 1.3; EXPRESSED IN FETAL LIVER, SIGNAL = 1.3; EXPRESSED IN BRAIN, SIGNAL = 1.4; EXPRESSED IN BONE MARROW, SIGNAL = 1.1; EXPRESSED IN ADULT LIVER, SIGNAL = 1.2; EST_HUMAN HIT: AV699635.1, EVALUE 8.00e-01
CFWAWSVTCFQPWMCPGGGSCTLNRWSGSLPWSSACSLKRASSSK

SEQ ID NO: 43772 - protein, 35 aa, Homo sapiens
  MAP TO AC004106.1; EXPRESSED IN PLACENTA, SIGNAL =   1; EXPRESSED IN LUNG, SIGNAL = 0.85; EXPRESSED IN BRAIN, SIGNAL = 0.59; EXPRESSED IN FETAL LIVER, SIGNAL = 0.81; EXPRESSED IN BONE MARROW, SIGNAL = 0.8; EXPRESSED IN ADULT LIVER, SIGNAL = 1.6
VVILEEVTMLMVVMMLMLLVMMMAKKEIKKKVLFM

SEQ ID NO: 43773 - protein, 124 aa, Homo sapiens
  MAP TO AC004460.1; EXPRESSED IN BONE MARROW, SIGNAL = 1.1; EXPRESSED IN PLACENTA, SIGNAL = 1.2; EXPRESSED IN LUNG, SIGNAL = 1.3; EXPRESSED IN FETAL LIVER, SIGNAL = 1.1; EXPRESSED IN BRAIN, SIGNAL = 1.1; EXPRESSED IN ADULT LIVER, SIGNAL = 1.1; EST_HUMAN HIT: AI201297.1, EVALUE 2.00e-17
SEDVVTPSAVTPSALSASAGPFITVTDDPGAASIFAETMTKTEEVKRHSFFALYCEITKWQVEPQIDDPNSNLEEVINEAEAITSENSLGCKQALNTDYLDSDYQRGQLYPFSLGSDLQVAAFI

SEQ ID NO: 43774 - protein, 56 aa, Homo sapiens
  MAP TO AC002541.1; EXPRESSED IN LUNG, SIGNAL = 0.8; EXPRESSED IN FETAL LIVER, SIGNAL = 0.81; EXPRESSED IN BRAIN, SIGNAL = 1.4; EXPRESSED IN BONE MARROW, SIGNAL = 1.1; EXPRESSED IN ADULT LIVER, SIGNAL = 0.73; EXPRESSED IN PLACENTA, SIGNAL = 0.81; SWISSPROT HIT: O43524, EVALUE 3.50e+00
QTIINDISDKILLTMGQATPTGSHLSMPFPFPYFIAVVLAAEMVMDIHNYTAEFKE

SEQ ID NO: 43775 - protein, 42 aa, Homo sapiens
  MAP TO AC004253.1; EXPRESSED IN ADULT LIVER, SIGNAL = 2.2; EXPRESSED IN PLACENTA, SIGNAL = 0.93; EXPRESSED IN LUNG, SIGNAL = 1.9; EXPRESSED IN BRAIN, SIGNAL = 1.4; EXPRESSED IN FETAL LIVER, SIGNAL = 1.2; EXPRESSED IN BONE MARROW, SIGNAL = 0.9; EST_HUMAN HIT: BF683740.1, EVALUE 5.00e-20; SWISSPROT HIT: Q11176, EVALUE 2.10e+00
MDEEDSDGELNTWELSEGTNCPPKEQPGDLFNEDWDSELKAD

SEQ ID NO: 43776 - protein, 34 aa, Homo sapiens
  MAP TO AC004875.1; EXPRESSED IN ADULT LIVER, SIGNAL = 0.81; EXPRESSED IN PLACENTA, SIGNAL = 0.74; EXPRESSED IN LUNG, SIGNAL = 0.9; EXPRESSED IN BRAIN, SIGNAL = 0.69; EXPRESSED IN BONE MARROW, SIGNAL = 0.78; EXPRESSED IN FETAL LIVER, SIGNAL = 0.73; SWISSPROT HIT: P40348, EVALUE 8.50e+00
MKIISLLEINASDIAVISTKGKNMMSLTILTPTN

SEQ ID NO: 43777 - protein, 36 aa, Homo sapiens
  MAP TO AC005562.1; EXPRESSED IN PLACENTA, SIGNAL = 0.89; EXPRESSED IN LUNG, SIGNAL = 0.82; EXPRESSED IN FETAL LIVER, SIGNAL = 0.9; EXPRESSED IN BONE MARROW, SIGNAL = 0.87; EXPRESSED IN ADULT LIVER, SIGNAL = 0.76; EXPRESSED IN BRAIN, SIGNAL = 0.81; EST_HUMAN HIT: BE538114.1, EVALUE 4.40e-02; SWISSPROT HIT: P18054, EVALUE 2.00e-10
IVHLLHQRDDTVRVDPELQAWDQEIMEVGLCQAQDR

SEQ ID NO: 43778 - protein, 99 aa, Homo sapiens
  MAP TO AC001228.1; EXPRESSED IN ADULT LIVER, SIGNAL = 1.1; EXPRESSED IN LUNG, SIGNAL = 1.1; EXPRESSED IN PLACENTA, SIGNAL = 0.96; EXPRESSED IN FETAL LIVER, SIGNAL =   1; EXPRESSED IN BRAIN, SIGNAL = 1.2; EXPRESSED IN BONE MARROW, SIGNAL = 1.3; EST_HUMAN HIT: AI738908.1, EVALUE 4.00e-06
WTAWSARASTCTSPSSPPTTRRSTSAARARAAGTRPSRWRSSISRTAAPCRTFAAARNAPHPPHPPRTPWLPRPPHPPSPRSPPGHPRSPNPARHEPAA

SEQ ID NO: 43779 - protein, 149 aa, Homo sapiens
  MAP TO AC001228.1; EXPRESSED IN ADULT LIVER, SIGNAL = 1.1; EXPRESSED IN LUNG, SIGNAL = 1.1; EXPRESSED IN PLACENTA, SIGNAL = 0.96; EXPRESSED IN FETAL LIVER, SIGNAL =   1; EXPRESSED IN BRAIN, SIGNAL = 1.2; EXPRESSED IN BONE MARROW, SIGNAL = 1.3; EST_HUMAN HIT: AI290356.1, EVALUE 1.00e-71; SWISSPROT HIT: Q09639, EVALUE 3.70e-01
RPHCRSQSRARHDMKSPDEVLREGELEKRSDSLFQLWKKKRGVLTSDRLSLFPASPRARPKELRFHSILKVDCVERTGKYVYFTIVTTDHKEIDFRCAGESCWNAAIALALIDFQNRRALQDFRSRQERTAPAAPAEDAVAAAAAAPSE

SEQ ID NO: 43780 - protein, 29 aa, Homo sapiens
  MAP TO AC005918.5; EXPRESSED IN LUNG, SIGNAL = 0.65; EXPRESSED IN BONE MARROW, SIGNAL = 0.58; EXPRESSED IN PLACENTA, SIGNAL = 0.67; EXPRESSED IN FETAL LIVER, SIGNAL = 0.76; EXPRESSED IN BRAIN, SIGNAL = 1.4; EXPRESSED IN ADULT LIVER, SIGNAL = 0.7; SWISSPROT HIT: P33926, EVALUE 8.60e+00; EST_HUMAN HIT: BE729701.1, EVALUE 2.00e+00
SWQEAREENGQEPTGLWGTLDGLALPREL

SEQ ID NO: 43781 - protein, 25 aa, Homo sapiens
  MAP TO AC005918.5; EXPRESSED IN LUNG, SIGNAL = 0.65; EXPRESSED IN BONE MARROW, SIGNAL = 0.58; EXPRESSED IN PLACENTA, SIGNAL = 0.67; EXPRESSED IN FETAL LIVER, SIGNAL = 0.76; EXPRESSED IN BRAIN, SIGNAL = 1.4; EXPRESSED IN ADULT LIVER, SIGNAL = 0.7
VWLCPENYELLQGGEGKGASSSWWG

SEQ ID NO: 43782 - protein, 59 aa, Homo sapiens
  MAP TO AC002060.2; EXPRESSED IN LUNG, SIGNAL = 0.81; EXPRESSED IN PLACENTA, SIGNAL = 0.68; EXPRESSED IN FETAL LIVER, SIGNAL = 0.69; EXPRESSED IN BRAIN, SIGNAL = 0.75; EXPRESSED IN BONE MARROW, SIGNAL = 0.73; EXPRESSED IN ADULT LIVER, SIGNAL = 0.75; EST_HUMAN HIT: W92708.1, EVALUE 1.60e-02
MASSLTYLRPPPTMPPALPPPPSPKFPTPPPSLLPLQEMPNGGDATRVQVPFSLQDLRQ

SEQ ID NO: 43783 - protein, 32 aa, Homo sapiens
  MAP TO AC002060.2; EXPRESSED IN LUNG, SIGNAL = 0.81; EXPRESSED IN PLACENTA, SIGNAL = 0.68; EXPRESSED IN FETAL LIVER, SIGNAL = 0.69; EXPRESSED IN BRAIN, SIGNAL = 0.75; EXPRESSED IN BONE MARROW, SIGNAL = 0.73; EXPRESSED IN ADULT LIVER, SIGNAL = 0.75; EST_HUMAN HIT: W92708.1, EVALUE 2.00e-05
LPHLHSYPYRKCPMEVMPLGFKFPSHCRTLDR

SEQ ID NO: 43784 - protein, 60 aa, Homo sapiens
  MAP TO AC002301.1; EXPRESSED IN ADULT LIVER, SIGNAL = 0.55; EXPRESSED IN LUNG, SIGNAL = 0.53; EXPRESSED IN BRAIN, SIGNAL = 0.71; EXPRESSED IN BONE MARROW, SIGNAL = 0.57; EST_HUMAN HIT: BE541728.1, EVALUE 4.60e+00
MLVLATLAALFILTTAVLAERLFRRALRPDPSHRAPTLVWRPGGELWIEPMGTARERSED

SEQ ID NO: 43785 - protein, 18 aa, Homo sapiens
  MAP TO AC002301.1; EXPRESSED IN ADULT LIVER, SIGNAL = 0.55; EXPRESSED IN LUNG, SIGNAL = 0.53; EXPRESSED IN BRAIN, SIGNAL = 0.71; EXPRESSED IN BONE MARROW, SIGNAL = 0.57
AGPGHPGCALHPHHRCVG

SEQ ID NO: 43786 - protein, 64 aa, Homo sapiens
  MAP TO AC005972.1; EXPRESSED IN PLACENTA, SIGNAL = 0.82; EXPRESSED IN BRAIN, SIGNAL = 1.2; EXPRESSED IN BONE MARROW, SIGNAL = 0.92; EXPRESSED IN ADULT LIVER, SIGNAL = 0.95; EXPRESSED IN LUNG, SIGNAL = 1.2; EXPRESSED IN FETAL LIVER, SIGNAL =   1; SWISSPROT HIT: Q05332, EVALUE 4.50e+00
ISLILPTVFSPDSTNERHLHEIWLGRKGEAIVFLRQQQMADMEFCLKLLGVLLKILQLALQAAE

SEQ ID NO: 43787 - protein, 34 aa, Homo sapiens
  MAP TO AC006095.1; EXPRESSED IN PLACENTA, SIGNAL = 0.74; EXPRESSED IN LUNG, SIGNAL = 0.84; EXPRESSED IN BONE MARROW, SIGNAL = 0.78; EXPRESSED IN ADULT LIVER, SIGNAL = 0.87; EXPRESSED IN FETAL LIVER, SIGNAL = 0.89; EXPRESSED IN BRAIN, SIGNAL =   1
NTAETFRKWSNGWVITLLDGCYGKIEKGNKKLFG

SEQ ID NO: 43788 - protein, 64 aa, Homo sapiens
  MAP TO AC003080.1; EXPRESSED IN PLACENTA, SIGNAL = 0.61; EXPRESSED IN FETAL LIVER, SIGNAL = 0.72; EXPRESSED IN BRAIN, SIGNAL = 0.63; EXPRESSED IN LUNG, SIGNAL = 0.59; EXPRESSED IN BONE MARROW, SIGNAL = 0.61; EXPRESSED IN ADULT LIVER, SIGNAL = 0.69; SWISSPROT HIT: P32910, EVALUE 1.20e+00; EST_HUMAN HIT: BE089509.1, EVALUE 7.00e-15
AVFLSSFPAVYSELLKLFDVREVANLVQDTLGSLPTILHVDDSLQAIKLQCIGKTVESQLYTNP

SEQ ID NO: 43789 - protein, 69 aa, Homo sapiens
  MAP TO AC005920.1; EXPRESSED IN BONE MARROW, SIGNAL = 0.68; EXPRESSED IN PLACENTA, SIGNAL = 0.68; EXPRESSED IN LUNG, SIGNAL = 0.53; EXPRESSED IN FETAL LIVER, SIGNAL = 0.69; EXPRESSED IN ADULT LIVER, SIGNAL = 0.61; EXPRESSED IN BRAIN, SIGNAL = 0.97; SWISSPROT HIT: P17691, EVALUE 8.80e-01; EST_HUMAN HIT: AU143722.1, EVALUE 6.00e-25
DELSDVSQGGSKATTPASTANSDVATIPTDTPLKEENEGFVKVTDAPNKSEISKHIEVQVAQETRNVST

SEQ ID NO: 43790 - protein, 38 aa, Homo sapiens
  MAP TO AC005920.1; EXPRESSED IN BONE MARROW, SIGNAL = 0.68; EXPRESSED IN PLACENTA, SIGNAL = 0.68; EXPRESSED IN LUNG, SIGNAL = 0.53; EXPRESSED IN FETAL LIVER, SIGNAL = 0.69; EXPRESSED IN ADULT LIVER, SIGNAL = 0.61; EXPRESSED IN BRAIN, SIGNAL = 0.97; EST_HUMAN HIT: AU143722.1, EVALUE 1.40e+00
IIFICRMSFLMLAKADLKLPLQHQQLIQMWQQFLLILP

SEQ ID NO: 43791 - protein, 103 aa, Homo sapiens
  MAP TO AC002303.1; EXPRESSED IN LUNG, SIGNAL = 0.6; EXPRESSED IN ADULT LIVER, SIGNAL = 0.54; EXPRESSED IN PLACENTA, SIGNAL = 0.71; EXPRESSED IN BRAIN, SIGNAL = 0.57; EXPRESSED IN BONE MARROW, SIGNAL = 0.65; SWISSPROT HIT: P40413, EVALUE 9.70e+00; EST_HUMAN HIT: AW451424.1, EVALUE 2.00e-34
GFMEDEGRQRTTKYISCVFAEESDLSRQYQREKARSELLTTVSLASMQEESLLPEGEDTFLSESDSEEERSSSKRRGRGSQKDTRASANLRPKTQPHHSTPTK

SEQ ID NO: 43792 - protein, 50 aa, Homo sapiens
  MAP TO AC002303.1; EXPRESSED IN LUNG, SIGNAL = 0.6; EXPRESSED IN ADULT LIVER, SIGNAL = 0.54; EXPRESSED IN PLACENTA, SIGNAL = 0.71; EXPRESSED IN BRAIN, SIGNAL = 0.57; EXPRESSED IN BONE MARROW, SIGNAL = 0.65; EST_HUMAN HIT: AI369361.1, EVALUE 2.00e-24
GIHGRRRSAANHQVHFLRVCRGERPKPAVPKREGPQRALDHREPGVYAGG

SEQ ID NO: 43793 - protein, 133 aa, Homo sapiens
  MAP TO AC005840.1; EXPRESSED IN PLACENTA, SIGNAL = 1.1; EXPRESSED IN LUNG, SIGNAL =   1; EXPRESSED IN FETAL LIVER, SIGNAL = 0.96; EXPRESSED IN BONE MARROW, SIGNAL =   1; EXPRESSED IN ADULT LIVER, SIGNAL = 1.2; EXPRESSED IN BRAIN, SIGNAL = 0.85; EST_HUMAN HIT: BF357123.1, EVALUE 1.00e-48; SWISSPROT HIT: P13753, EVALUE 3.60e-02
VVTWTREELGGSPAQVSGASFSSLRQSVAGTYSISSSLTAEPGSAGATYTCQVTHISLEEPLGASTQVVPPGTGSVLLFPTSTLGLMALLPQLIYGLVLLPIHFVRSPGFMLLPLLLTIFPRRQLPQLLPHIP

SEQ ID NO: 43794 - protein, 59 aa, Homo sapiens
  MAP TO AC006501.5; EXPRESSED IN LUNG, SIGNAL = 0.88; EXPRESSED IN FETAL LIVER, SIGNAL = 1.3; EXPRESSED IN BONE MARROW, SIGNAL = 0.81; EXPRESSED IN PLACENTA, SIGNAL = 1.9; EXPRESSED IN BRAIN, SIGNAL = 0.73; EXPRESSED IN ADULT LIVER, SIGNAL = 0.72; EST_HUMAN HIT: AL040518.1, EVALUE 4.00e-28; SWISSPROT HIT: Q16760, EVALUE 6.10e-02
RRTEHQLKQFTEDWSEEDVSTWLCAQDLKDLVGIFKMNNIDGKELLNLTKESLADDLKI

SEQ ID NO: 43795 - protein, 63 aa, Homo sapiens
  MAP TO AC004974.1; EXPRESSED IN LUNG, SIGNAL = 0.55; EXPRESSED IN FETAL LIVER, SIGNAL = 0.71; EXPRESSED IN BRAIN, SIGNAL = 0.89; EXPRESSED IN BONE MARROW, SIGNAL = 0.73; EXPRESSED IN PLACENTA, SIGNAL = 0.8; EXPRESSED IN ADULT LIVER, SIGNAL = 0.67; EST_HUMAN HIT: BF379254.1, EVALUE 6.00e-28
LMTLRGSVLEDAIPSTAKHSTARGLPLKEVLEHVVPELNVQCLRLAFNTPKVTEQLMKLDEQG

SEQ ID NO: 43796 - protein, 41 aa, Homo sapiens
  MAP TO AC004974.1; EXPRESSED IN LUNG, SIGNAL = 0.55; EXPRESSED IN FETAL LIVER, SIGNAL = 0.71; EXPRESSED IN BRAIN, SIGNAL = 0.89; EXPRESSED IN BONE MARROW, SIGNAL = 0.73; EXPRESSED IN PLACENTA, SIGNAL = 0.8; EXPRESSED IN ADULT LIVER, SIGNAL = 0.67; EST_HUMAN HIT: BF379254.1, EVALUE 6.00e-14
PVSLAAHDTERFGPGGRHSVDSQALDSQRPASQRSAGARGS

SEQ ID NO: 43797 - protein, 43 aa, Homo sapiens
  MAP TO AC005747.1; EXPRESSED IN BRAIN, SIGNAL = 0.62; EXPRESSED IN LUNG, SIGNAL = 0.72; EXPRESSED IN FETAL LIVER, SIGNAL = 0.71; EXPRESSED IN BONE MARROW, SIGNAL = 0.94; EXPRESSED IN ADULT LIVER, SIGNAL = 0.65; EXPRESSED IN PLACENTA, SIGNAL = 0.59
MECPAYSSSSALATSSPTPSLSSVHEVARGSLTLWLSLAPIIR

SEQ ID NO: 43798 - protein, 58 aa, Homo sapiens
  MAP TO AC003691.1; EXPRESSED IN PLACENTA, SIGNAL = 0.82; EXPRESSED IN BRAIN, SIGNAL = 0.72; EXPRESSED IN BONE MARROW, SIGNAL = 0.77; EXPRESSED IN ADULT LIVER, SIGNAL = 0.64; EXPRESSED IN LUNG, SIGNAL = 0.79; EXPRESSED IN FETAL LIVER, SIGNAL = 0.79; SWISSPROT HIT: P42436, EVALUE 1.20e+00; EST_HUMAN HIT: AA126663.1, EVALUE 1.00e-28
MNLDGSAQDPEKREYSSVCVGREDDIKKSERMTAVVHDREVVIFYHKGEYHAMDIRCY

SEQ ID NO: 43799 - protein, 70 aa, Homo sapiens
  MAP TO AC005585.1; EXPRESSED IN LUNG, SIGNAL = 1.1; EXPRESSED IN ADULT LIVER, SIGNAL = 0.99; EXPRESSED IN PLACENTA, SIGNAL = 1.1; EXPRESSED IN FETAL LIVER, SIGNAL = 1.1; EXPRESSED IN BRAIN, SIGNAL = 0.76; EXPRESSED IN BONE MARROW, SIGNAL = 0.95; SWISSPROT HIT: Q15459, EVALUE 1.00e-28; EST_HUMAN HIT: AU135890.1, EVALUE 9.00e-28
VTWDGHSGSMARTQQAAQANITLQEQIEAIHKAKGLVPEDDTKEKIGPSKPNEIPQQPPPPSSATNIPSS

SEQ ID NO: 43800 - protein, 44 aa, Homo sapiens
  MAP TO AC005228.1; EXPRESSED IN BRAIN, SIGNAL =   1; EXPRESSED IN ADULT LIVER, SIGNAL = 0.86; EXPRESSED IN PLACENTA, SIGNAL = 0.9; EXPRESSED IN FETAL LIVER, SIGNAL = 0.84; EXPRESSED IN BONE MARROW, SIGNAL = 0.75; EXPRESSED IN LUNG, SIGNAL = 0.9; EST_HUMAN HIT: BF352940.1, EVALUE 1.80e-02
IFYCRHLKTHILKHDTKCFFHDTKCFFQQFLSCESYNKQQITGI

SEQ ID NO: 43801 - protein, 31 aa, Homo sapiens
  MAP TO AC004982.1; EXPRESSED IN PLACENTA, SIGNAL = 1.1; EXPRESSED IN LUNG, SIGNAL = 0.98; EXPRESSED IN BRAIN, SIGNAL = 1.1; EXPRESSED IN BONE MARROW, SIGNAL =   1; EXPRESSED IN ADULT LIVER, SIGNAL = 0.93; EXPRESSED IN FETAL LIVER, SIGNAL = 0.93
VSSALNKSDNSISIFEKYSCMKDKKIPFEED

SEQ ID NO: 43802 - protein, 18 aa, Homo sapiens
  MAP TO AC002490.1; EXPRESSED IN BRAIN, SIGNAL = 0.8; EXPRESSED IN ADULT LIVER, SIGNAL = 0.49; EXPRESSED IN PLACENTA, SIGNAL = 0.72; EXPRESSED IN LUNG, SIGNAL = 0.7; EXPRESSED IN BONE MARROW, SIGNAL = 0.68; EST_HUMAN HIT: BE616770.1, EVALUE 4.90e-02
LCRCRMNGTPTMRRWCTS

SEQ ID NO: 43803 - protein, 79 aa, Homo sapiens
  MAP TO AC004586.1; EXPRESSED IN FETAL LIVER, SIGNAL = 0.96; EXPRESSED IN BRAIN, SIGNAL = 0.65; EXPRESSED IN BONE MARROW, SIGNAL = 0.79; EXPRESSED IN ADULT LIVER, SIGNAL = 0.75; EXPRESSED IN PLACENTA, SIGNAL = 0.59; EXPRESSED IN LUNG, SIGNAL = 0.7; EST_HUMAN HIT: AI752165.1, EVALUE 3.00e-18; SWISSPROT HIT: P49641, EVALUE 2.00e-30
VSVPVRLPALGLGVLQLQLGLDGHRTLPSSVRIYLHGRQLSVSRHEAFPLRVIDSGTSDFALSNRYMQVWFSGLTGLLK

SEQ ID NO: 43804 - protein, 117 aa, Homo sapiens
  MAP TO AC006237.1; EXPRESSED IN ADULT LIVER, SIGNAL = 0.58; EXPRESSED IN LUNG, SIGNAL = 0.66; EXPRESSED IN PLACENTA, SIGNAL = 0.71; EXPRESSED IN FETAL LIVER, SIGNAL = 0.68; EXPRESSED IN BRAIN, SIGNAL = 0.92; EXPRESSED IN BONE MARROW, SIGNAL = 0.69; EST_HUMAN HIT: BE531280.1, EVALUE 1.00e-05; SWISSPROT HIT: Q28397, EVALUE 7.20e+00
NKWYKQHLSYRLVNWPEHLRSRQFGAPCAPPSSCGATSQRWSSGRPQPQAPLTSGSPSSKGTTTMGWAMPLMAQVLAQSLPPAQQEGNPTWRSSLGVAMKHSPSLWPWLRHISLQRT

SEQ ID NO: 43805 - protein, 55 aa, Homo sapiens
  MAP TO AC006237.1; EXPRESSED IN ADULT LIVER, SIGNAL = 0.58; EXPRESSED IN LUNG, SIGNAL = 0.66; EXPRESSED IN PLACENTA, SIGNAL = 0.71; EXPRESSED IN FETAL LIVER, SIGNAL = 0.68; EXPRESSED IN BRAIN, SIGNAL = 0.92; EXPRESSED IN BONE MARROW, SIGNAL = 0.69; EST_HUMAN HIT: AA580757.1, EVALUE 6.40e-02; SWISSPROT HIT: P07318, EVALUE 2.70e-02
GFSAGRCASAKATGRVNASLPPPNCFSKLGSPPAVREGGFVPAPGPSKALPSPSL

SEQ ID NO: 43806 - protein, 32 aa, Homo sapiens
  MAP TO AC004457.1; EXPRESSED IN ADULT LIVER, SIGNAL = 0.53; EXPRESSED IN LUNG, SIGNAL = 0.57; EXPRESSED IN BRAIN, SIGNAL = 0.59; EXPRESSED IN BONE MARROW, SIGNAL = 0.61; SWISSPROT HIT: Q13563, EVALUE 5.00e+00
EVPVQVDYFFQILIRTITLLSHGIGRVISNIQ

SEQ ID NO: 43807 - protein, 38 aa, Homo sapiens
  MAP TO AC004737.1; EXPRESSED IN BONE MARROW, SIGNAL = 0.56; EXPRESSED IN ADULT LIVER, SIGNAL = 0.59; EXPRESSED IN LUNG, SIGNAL = 0.57; EXPRESSED IN BRAIN, SIGNAL = 0.79; SWISSPROT HIT: P29846, EVALUE 6.40e+00; EST_HUMAN HIT: BF307636.1, EVALUE 2.50e+00
RPPAPSCDLPTAHHELVGRTGQWRICCGPPCEVGGPRL

SEQ ID NO: 43808 - protein, 20 aa, Homo sapiens
  MAP TO AC005291.1; EXPRESSED IN BONE MARROW, SIGNAL = 0.65; EXPRESSED IN PLACENTA, SIGNAL = 0.74; EXPRESSED IN LUNG, SIGNAL = 0.79; EXPRESSED IN FETAL LIVER, SIGNAL = 0.85; EXPRESSED IN BRAIN, SIGNAL = 0.72; EXPRESSED IN ADULT LIVER, SIGNAL = 0.82
EHPVDRCQELRWRGQKRGER

SEQ ID NO: 43809 - protein, 25 aa, Homo sapiens
  MAP TO AC006534.2; EXPRESSED IN BONE MARROW, SIGNAL = 0.59; EXPRESSED IN PLACENTA, SIGNAL = 0.68; EXPRESSED IN LUNG, SIGNAL = 0.52; EXPRESSED IN ADULT LIVER, SIGNAL = 0.61; EXPRESSED IN BRAIN, SIGNAL = 0.61; EST_HUMAN HIT: AW794502.1, EVALUE 2.00e-08
MTMDDVREYEKNMHEQTNIKVCNQH

SEQ ID NO: 43810 - protein, 48 aa, Homo sapiens
  MAP TO AC003083.1; EXPRESSED IN BONE MARROW, SIGNAL = 1.2; EXPRESSED IN PLACENTA, SIGNAL = 1.2; EXPRESSED IN LUNG, SIGNAL = 1.1; EXPRESSED IN FETAL LIVER, SIGNAL = 1.1; EXPRESSED IN ADULT LIVER, SIGNAL = 0.94; EXPRESSED IN BRAIN, SIGNAL = 1.2; EST_HUMAN HIT: AI889077.1, EVALUE 1.00e-15
TVLKNNDLRSRQELTAHLTNQWPSPGALDVNAVALDTLLYRKHNKQWY

SEQ ID NO: 43811 - protein, 21 aa, Homo sapiens
  MAP TO AC003083.1; EXPRESSED IN BONE MARROW, SIGNAL = 1.2; EXPRESSED IN PLACENTA, SIGNAL = 1.2; EXPRESSED IN LUNG, SIGNAL = 1.1; EXPRESSED IN FETAL LIVER, SIGNAL = 1.1; EXPRESSED IN ADULT LIVER, SIGNAL = 0.94; EXPRESSED IN BRAIN, SIGNAL = 1.2
LCHCRTVKTKALTILIFTGLC

SEQ ID NO: 43812 - protein, 24 aa, Homo sapiens
  MAP TO AC002307.1; EXPRESSED IN PLACENTA, SIGNAL =   2; EXPRESSED IN LUNG, SIGNAL = 0.72; EXPRESSED IN BRAIN, SIGNAL = 0.86; EXPRESSED IN BONE MARROW, SIGNAL = 2.8; EXPRESSED IN ADULT LIVER, SIGNAL =   1; SWISSPROT HIT: P33897, EVALUE 8.00e-07; EST_HUMAN HIT: BE901733.1, EVALUE 1.00e-05
MRRKGYSEQDLEAILDIMHLHHIL

SEQ ID NO: 43813 - protein, 79 aa, Homo sapiens
  MAP TO AC006544.19; EXPRESSED IN PLACENTA, SIGNAL = 1.1; EXPRESSED IN LUNG, SIGNAL = 0.99; EXPRESSED IN FETAL LIVER, SIGNAL = 1.1; EXPRESSED IN BONE MARROW, SIGNAL =   1; EXPRESSED IN ADULT LIVER, SIGNAL = 1.2; EXPRESSED IN BRAIN, SIGNAL =   1; EST_HUMAN HIT: AW062662.1, EVALUE 1.00e-43
CKMPGWKNFRGTSEWLWLLTQPLNLSSELSGAILLLCIYPESLVRDLPPSTGTPSHLIGWKLPAKQCLNCVGRSFQEMC

SEQ ID NO: 43814 - protein, 73 aa, Homo sapiens
  MAP TO AC004023.1; EXPRESSED IN PLACENTA, SIGNAL = 0.85; EXPRESSED IN LUNG, SIGNAL = 0.84; EXPRESSED IN FETAL LIVER, SIGNAL = 0.94; EXPRESSED IN BONE MARROW, SIGNAL = 0.9; EXPRESSED IN ADULT LIVER, SIGNAL = 0.9; EXPRESSED IN BRAIN, SIGNAL = 0.86; EST_HUMAN HIT: AI791952.1, EVALUE 5.00e-28
MAERGQCRAWAMASEGAVPKLWQLPHGIEPASAQKSRIEVWEPPPRFQRMYGNACVPRQKFAAEVGPSWRTSA

SEQ ID NO: 43815 - protein, 47 aa, Homo sapiens
  MAP TO AC005881.2; EXPRESSED IN PLACENTA, SIGNAL = 0.73; EXPRESSED IN LUNG, SIGNAL = 0.6; EXPRESSED IN BRAIN, SIGNAL = 0.9; EXPRESSED IN BONE MARROW, SIGNAL = 0.68; EXPRESSED IN ADULT LIVER, SIGNAL = 0.76; SWISSPROT HIT: Q60349, EVALUE 4.70e+00
PCLLMFSFHGDSVKTIEKPTVKLMIDPNLTVTDTTLTPGVPAPTLNL

SEQ ID NO: 43816 - protein, 65 aa, Homo sapiens
  MAP TO AC004486.1; EXPRESSED IN LUNG, SIGNAL = 1.9; EXPRESSED IN FETAL LIVER, SIGNAL = 1.2; EXPRESSED IN BONE MARROW, SIGNAL = 1.5; EXPRESSED IN PLACENTA, SIGNAL = 1.5; EXPRESSED IN BRAIN, SIGNAL = 1.3; EXPRESSED IN ADULT LIVER, SIGNAL = 1.4; EST_HUMAN HIT: BF224402.1, EVALUE 8.00e-08; SWISSPROT HIT: Q9ZE96, EVALUE 7.70e+00
LKPSSLATLVVSVIGFLCSKQQNLDQTPCVSVTSRHRLVFRDRSALEARGRERTILFFMSTPPCR

SEQ ID NO: 43817 - protein, 80 aa, Homo sapiens
  MAP TO AC005926.1; EXPRESSED IN ADULT LIVER, SIGNAL = 0.7; EXPRESSED IN BRAIN, SIGNAL = 0.66; EXPRESSED IN LUNG, SIGNAL = 2.6; EXPRESSED IN FETAL LIVER, SIGNAL = 0.71; EXPRESSED IN BONE MARROW, SIGNAL = 0.73; EXPRESSED IN PLACENTA, SIGNAL = 0.58; SWISSPROT HIT: O04134, EVALUE 7.20e+00; EST_HUMAN HIT: AI581852.1, EVALUE 8.20e-01
IRNPASSGFGNQGRTTRFQKPGAWPLDFSTSSAHSLLLSNKNHHPPNHSFASYASCAECRIFIKEVPPGASHSSEEVKGK

SEQ ID NO: 43818 - protein, 21 aa, Homo sapiens
  MAP TO AC004499.1; EXPRESSED IN FETAL LIVER, SIGNAL = 0.88; EXPRESSED IN BRAIN, SIGNAL = 0.64; EXPRESSED IN BONE MARROW, SIGNAL = 0.84; EXPRESSED IN ADULT LIVER, SIGNAL = 0.8; EXPRESSED IN PLACENTA, SIGNAL = 0.89; EXPRESSED IN LUNG, SIGNAL = 0.89
DDAVLQSHSPTRGHKERKMAG

SEQ ID NO: 43819 - protein, 49 aa, Homo sapiens
  MAP TO AC004582.1; EXPRESSED IN BONE MARROW, SIGNAL = 1.2; EXPRESSED IN ADULT LIVER, SIGNAL = 0.82; EXPRESSED IN LUNG, SIGNAL = 0.76; EXPRESSED IN PLACENTA, SIGNAL = 0.95; EXPRESSED IN FETAL LIVER, SIGNAL = 0.73; EXPRESSED IN BRAIN, SIGNAL = 0.63; EST_HUMAN HIT: C16631.1, EVALUE 2.30e+00; SWISSPROT HIT: P49657, EVALUE 7.10e-01
GQELKSQEGGKCQKDPGEHKRWDSTQTASGGDGGQEIQEGSVTEVSPRQ

SEQ ID NO: 43820 - protein, 84 aa, Homo sapiens
  MAP TO AC005104.1; EXPRESSED IN BONE MARROW, SIGNAL = 0.74; EXPRESSED IN PLACENTA, SIGNAL = 0.6; EXPRESSED IN LUNG, SIGNAL = 0.82; EXPRESSED IN FETAL LIVER, SIGNAL = 0.78; EXPRESSED IN BRAIN, SIGNAL = 0.66; EXPRESSED IN ADULT LIVER, SIGNAL = 0.7; SWISSPROT HIT: Q14681, EVALUE 2.00e-30; EST_HUMAN HIT: BE674544.1, EVALUE 1.00e-43
KTSQVPMKHVYHVLQCQEEELTQVVSTMSDSWKFEQLVSNGSSYNYGNEDQAKFLYVVSKKLHNTPYSMASEPRKKAKILQEQG

SEQ ID NO: 43821 - protein, 50 aa, Homo sapiens
  MAP TO AC004468.1; EXPRESSED IN PLACENTA, SIGNAL = 0.82; EXPRESSED IN LUNG, SIGNAL = 0.89; EXPRESSED IN FETAL LIVER, SIGNAL = 0.84; EXPRESSED IN BRAIN, SIGNAL = 0.96; EXPRESSED IN BONE MARROW, SIGNAL = 0.88; EXPRESSED IN ADULT LIVER, SIGNAL = 0.81; SWISSPROT HIT: P11532, EVALUE 4.00e-08
LHRVLMDLQNQKLKELNDWLTKTEERTRKMEEEPLGPDLEDLKRQVQQHK

SEQ ID NO: 43822 - protein, 79 aa, Homo sapiens
  MAP TO AC000384.1; EXPRESSED IN PLACENTA, SIGNAL = 0.77; EXPRESSED IN LUNG, SIGNAL = 1.1; EXPRESSED IN BONE MARROW, SIGNAL = 0.88; EXPRESSED IN ADULT LIVER, SIGNAL = 1.1; EXPRESSED IN FETAL LIVER, SIGNAL = 0.96; EXPRESSED IN BRAIN, SIGNAL = 1.3; EST_HUMAN HIT: AA211486.1, EVALUE 3.00e-22; SWISSPROT HIT: P32583, EVALUE 6.50e-01
AASLEASVQDDAGTSGGPSSPPSDPPAMSPGPLDALSSPTSVQEADETTRSDISERPSVDDIESETGSTGALETRSLKD

SEQ ID NO: 43823 - protein, 57 aa, Homo sapiens
  MAP TO AC004031.1; EXPRESSED IN PLACENTA, SIGNAL =   1; EXPRESSED IN FETAL LIVER, SIGNAL = 1.1; EXPRESSED IN ADULT LIVER, SIGNAL = 0.94; EXPRESSED IN LUNG, SIGNAL = 0.89; EXPRESSED IN BRAIN, SIGNAL = 0.75; EXPRESSED IN BONE MARROW, SIGNAL = 0.95; SWISSPROT HIT: Q12866, EVALUE 3.50e+00
EQEDPSDPASKIASLLLAKLADYVVPGEKLLNRRVAWQCSIPVPSQVPLASVLPMMK

SEQ ID NO: 43824 - protein, 66 aa, Homo sapiens
  MAP TO AC006027.1; EXPRESSED IN LUNG, SIGNAL = 1.2; EXPRESSED IN BRAIN, SIGNAL = 0.85; EXPRESSED IN ADULT LIVER, SIGNAL = 1.3; EXPRESSED IN PLACENTA, SIGNAL = 1.2; EXPRESSED IN FETAL LIVER, SIGNAL = 1.1; EXPRESSED IN BONE MARROW, SIGNAL =   1; EST_HUMAN HIT: AI476732.1, EVALUE 1.00e-33; SWISSPROT HIT: P35959, EVALUE 5.90e+00
DDSADQGWKTHSRQVVDVGCQLEPHLGLFARTPTHGMSMELFDFLTAMAGFQEQLSQENKAEVHDF

SEQ ID NO: 43825 - protein, 40 aa, Homo sapiens
  MAP TO AC002451.1; EXPRESSED IN PLACENTA, SIGNAL = 0.9; EXPRESSED IN ADULT LIVER, SIGNAL = 0.84; EXPRESSED IN LUNG, SIGNAL = 1.1; EXPRESSED IN FETAL LIVER, SIGNAL = 0.98; EXPRESSED IN BRAIN, SIGNAL = 0.99; EXPRESSED IN BONE MARROW, SIGNAL = 0.9; EST_HUMAN HIT: AA076175.1, EVALUE 3.70e-01
QLLTRMTATGTLILLVEMQTCTSLWKTVWYFLVKLKWLTL

SEQ ID NO: 43826 - protein, 34 aa, Homo sapiens
  MAP TO AC006151.3; EXPRESSED IN PLACENTA, SIGNAL = 0.8; EXPRESSED IN LUNG, SIGNAL = 0.93; EXPRESSED IN FETAL LIVER, SIGNAL = 0.72; EXPRESSED IN BRAIN, SIGNAL =   1; EXPRESSED IN ADULT LIVER, SIGNAL = 0.83; EXPRESSED IN BONE MARROW, SIGNAL = 0.97; EST_HUMAN HIT: BE745127.1, EVALUE 9.90e+00; SWISSPROT HIT: P13285, EVALUE 1.30e+00
RRHTCHHSNDALPSPFPSPRPDSKEDEQEDRGWE

SEQ ID NO: 43827 - protein, 49 aa, Homo sapiens
  MAP TO AC004082.1; EXPRESSED IN BONE MARROW, SIGNAL = 0.51; EXPRESSED IN ADULT LIVER, SIGNAL = 0.71; EXPRESSED IN PLACENTA, SIGNAL = 0.86; EXPRESSED IN LUNG, SIGNAL = 0.8; EXPRESSED IN BRAIN, SIGNAL = 0.66
AQADLELLPNLQTRRILPPSMYLLQKTKALQTYKRSDIRGSNGPTINAT

SEQ ID NO: 43828 - protein, 32 aa, Homo sapiens
  MAP TO AC004082.1; EXPRESSED IN BONE MARROW, SIGNAL = 0.51; EXPRESSED IN ADULT LIVER, SIGNAL = 0.71; EXPRESSED IN PLACENTA, SIGNAL = 0.86; EXPRESSED IN LUNG, SIGNAL = 0.8; EXPRESSED IN BRAIN, SIGNAL = 0.66
SSRSGAAAQPANTEDFASIHVFASKDKSITNL

SEQ ID NO: 43829 - protein, 55 aa, Homo sapiens
  MAP TO AC005000.1; EXPRESSED IN PLACENTA, SIGNAL = 1.6; EXPRESSED IN BRAIN, SIGNAL = 0.57; EXPRESSED IN BONE MARROW, SIGNAL = 0.77; EXPRESSED IN ADULT LIVER, SIGNAL =   1; EXPRESSED IN LUNG, SIGNAL = 0.85; EXPRESSED IN FETAL LIVER, SIGNAL = 1.1; SWISSPROT HIT: P13797, EVALUE 7.00e-26; EST_HUMAN HIT: AA334080.1, EVALUE 9.00e-25
ENLNLALNSASAIGCHVVNIGAEDLRAGKPHLVLGLLWQIIKIGLFADIELSRNE

SEQ ID NO: 43830 - protein, 40 aa, Homo sapiens
  MAP TO AC005000.1; EXPRESSED IN PLACENTA, SIGNAL = 1.6; EXPRESSED IN BRAIN, SIGNAL = 0.57; EXPRESSED IN BONE MARROW, SIGNAL = 0.77; EXPRESSED IN ADULT LIVER, SIGNAL =   1; EXPRESSED IN LUNG, SIGNAL = 0.85; EXPRESSED IN FETAL LIVER, SIGNAL = 1.1; EST_HUMAN HIT: BE177612.1, EVALUE 7.00e-21
KLELGTELCFCHWVSCCEHWCRRFEGWETSSGFGTALADH

SEQ ID NO: 43831 - protein, 107 aa, Homo sapiens
  MAP TO AC005319.1; EXPRESSED IN PLACENTA, SIGNAL = 0.68; EXPRESSED IN LUNG, SIGNAL = 0.64; EXPRESSED IN FETAL LIVER, SIGNAL = 0.69; EXPRESSED IN BRAIN, SIGNAL = 0.67; EXPRESSED IN BONE MARROW, SIGNAL = 0.76; EXPRESSED IN ADULT LIVER, SIGNAL = 0.69; EST_HUMAN HIT: AW360928.1, EVALUE 1.30e+00; SWISSPROT HIT: P23442, EVALUE 2.60e+00
QPLRTFFGRVVATSMAARLTAFGIHENSNNGGIHPGKPGKRNTDIHKRNSGGEIPDGHKYPSLSLEFLMVFPQVLSLQQPFSEPSCAKISLMNLHKDHSVYGVPSLF

SEQ ID NO: 43832 - protein, 25 aa, Homo sapiens
  MAP TO AC006354.2; EXPRESSED IN ADULT LIVER, SIGNAL = 0.68; EXPRESSED IN LUNG, SIGNAL = 0.6; EXPRESSED IN PLACENTA, SIGNAL = 0.72; EXPRESSED IN FETAL LIVER, SIGNAL = 0.82; EXPRESSED IN BRAIN, SIGNAL = 0.7; EXPRESSED IN BONE MARROW, SIGNAL = 0.65
MRKHQEDVLGLQGTPHGKIECQQPL

SEQ ID NO: 43833 - protein, 27 aa, Homo sapiens
  MAP TO AC004587.1; EXPRESSED IN PLACENTA, SIGNAL =   1; EXPRESSED IN LUNG, SIGNAL = 0.77; EXPRESSED IN FETAL LIVER, SIGNAL = 0.8; EXPRESSED IN BRAIN, SIGNAL = 0.61; EXPRESSED IN BONE MARROW, SIGNAL = 1.1; EXPRESSED IN ADULT LIVER, SIGNAL = 0.88; SWISSPROT HIT: P46940, EVALUE 6.00e-09; EST_HUMAN HIT: AU139621.1, EVALUE 8.00e-08
AVMKLFDRAKVNVNLLIFLLNKKFYGK

SEQ ID NO: 43834 - protein, 28 aa, Homo sapiens
  MAP TO AC002299.1; EXPRESSED IN PLACENTA, SIGNAL = 1.1; EXPRESSED IN BRAIN, SIGNAL = 0.92; EXPRESSED IN BONE MARROW, SIGNAL = 0.87; EXPRESSED IN ADULT LIVER, SIGNAL = 0.86; EXPRESSED IN LUNG, SIGNAL = 1.1; EXPRESSED IN FETAL LIVER, SIGNAL = 0.83
FLQDHMVQIPHHVLQRPFSQRGCGQQPD

SEQ ID NO: 43835 - protein, 70 aa, Homo sapiens
  MAP TO AC004491.1; EXPRESSED IN BONE MARROW, SIGNAL = 1.2; EXPRESSED IN ADULT LIVER, SIGNAL = 1.1; EXPRESSED IN PLACENTA, SIGNAL = 1.2; EXPRESSED IN LUNG, SIGNAL = 1.2; EXPRESSED IN FETAL LIVER, SIGNAL =   1; EXPRESSED IN BRAIN, SIGNAL = 1.1; EST_HUMAN HIT: BE151283.1, EVALUE 2.00e-10
FQVLKNTARAKQNGPAKESSPRDASLWPLLQSGLCLLTSSSSLPLSHTLQSFKPLIRVQAYQTLKVGSSF

SEQ ID NO: 43836 - protein, 55 aa, Homo sapiens
  MAP TO AC006358.2; EXPRESSED IN BONE MARROW, SIGNAL = 0.65; EXPRESSED IN ADULT LIVER, SIGNAL = 0.51; EXPRESSED IN LUNG, SIGNAL = 0.5; EXPRESSED IN BRAIN, SIGNAL = 0.58; EST_HUMAN HIT: AW732977.1, EVALUE 5.60e-01; SWISSPROT HIT: Q07084, EVALUE 3.50e+00
PRKGVSATGCSRHLASWETWREGESRAGTTLTDGLPIPASAAFSCFAVRGSPKWR

SEQ ID NO: 43837 - protein, 54 aa, Homo sapiens
  MAP TO AC006358.2; EXPRESSED IN BONE MARROW, SIGNAL = 0.65; EXPRESSED IN ADULT LIVER, SIGNAL = 0.51; EXPRESSED IN LUNG, SIGNAL = 0.5; EXPRESSED IN BRAIN, SIGNAL = 0.58
PGRECLPPAAAATWPPGRPGGKGKAGQEPHSQTVSPSPPLPPSPASLYVALQSG

SEQ ID NO: 43838 - protein, 49 aa, Homo sapiens
  MAP TO AC001228.1; EXPRESSED IN BRAIN, SIGNAL = 0.98; EXPRESSED IN ADULT LIVER, SIGNAL = 0.53; EXPRESSED IN PLACENTA, SIGNAL = 0.92; EXPRESSED IN LUNG, SIGNAL = 0.51; EXPRESSED IN BONE MARROW, SIGNAL = 0.54; EST_HUMAN HIT: BE274041.1, EVALUE 2.00e-11; SWISSPROT HIT: P49589, EVALUE 2.00e-12
HVGSKHHSPMSAFPPQIIKRARQNHLFEQYREKRPEAAQLLEDVQAALK

SEQ ID NO: 43839 - protein, 101 aa, Homo sapiens
  MAP TO AC005189.1; EXPRESSED IN LUNG, SIGNAL = 0.6; EXPRESSED IN BONE MARROW, SIGNAL = 0.72; EXPRESSED IN ADULT LIVER, SIGNAL = 0.71; EXPRESSED IN PLACENTA, SIGNAL = 1.2; EXPRESSED IN BRAIN, SIGNAL = 0.65; SWISSPROT HIT: Q62736, EVALUE 3.80e-01; EST_HUMAN HIT: AA456375.1, EVALUE 1.00e-52
ECLKHPWLTQSSIQEPSFRMEKALEEANALQEGHSVPEINSDTDKSETKESIVTEELIVVTSYTLGQCRQSEKEKMEQKAISKRFKFEEPLLQEIPGEFIY

SEQ ID NO: 43840 - protein, 102 aa, Homo sapiens
  MAP TO AC002041.1; EXPRESSED IN BONE MARROW, SIGNAL = 1.2; EXPRESSED IN PLACENTA, SIGNAL =   1; EXPRESSED IN LUNG, SIGNAL = 1.2; EXPRESSED IN FETAL LIVER, SIGNAL =   1; EXPRESSED IN ADULT LIVER, SIGNAL = 1.1; EXPRESSED IN BRAIN, SIGNAL = 1.3; SWISSPROT HIT: P53796, EVALUE 4.00e-45; EST_HUMAN HIT: AI612841.1, EVALUE 9.00e-40
TCPLLQCWKHLTQTIWGLHHLEYRAQDADVRGLTTLTPVSESSKVVVVESVMGQLSSHHQLTSGSHSSPCFIPTPPLQGACLSLTLLGSAWERRGESTMSAH

SEQ ID NO: 43841 - protein, 35 aa, Homo sapiens
  MAP TO AC005154.1; EXPRESSED IN LUNG, SIGNAL = 0.7; EXPRESSED IN FETAL LIVER, SIGNAL = 0.82; EXPRESSED IN PLACENTA, SIGNAL = 0.68; EXPRESSED IN BRAIN, SIGNAL = 0.7; EXPRESSED IN BONE MARROW, SIGNAL = 0.78; EXPRESSED IN ADULT LIVER, SIGNAL = 0.76; EST_HUMAN HIT: BE389086.1, EVALUE 9.00e-11; SWISSPROT HIT: P41250, EVALUE 7.00e-12
TSGHVDKFADFMVKDVKNGECFRADHLLKGEVLHL

SEQ ID NO: 43842 - protein, 66 aa, Homo sapiens
  MAP TO AC002519.1; EXPRESSED IN PLACENTA, SIGNAL = 1.1; EXPRESSED IN LUNG, SIGNAL = 1.5; EXPRESSED IN FETAL LIVER, SIGNAL = 1.3; EXPRESSED IN BRAIN, SIGNAL = 1.4; EXPRESSED IN BONE MARROW, SIGNAL = 1.5; EXPRESSED IN ADULT LIVER, SIGNAL = 1.6; EST_HUMAN HIT: BF677547.1, EVALUE 2.00e-05; SWISSPROT HIT: P33691, EVALUE 1.20e+00
KTPGKALLPPPLVASGAAGSLVWCTLWTSLVKLQLKSLQALLWQRKSLSQGREQNPVNLKVAGRMV

SEQ ID NO: 43843 - protein, 90 aa, Homo sapiens
  MAP TO AC005007.1; EXPRESSED IN PLACENTA, SIGNAL = 0.86; EXPRESSED IN BRAIN, SIGNAL = 0.86; EXPRESSED IN ADULT LIVER, SIGNAL = 0.84; EXPRESSED IN LUNG, SIGNAL = 0.81; EXPRESSED IN FETAL LIVER, SIGNAL = 0.83; EXPRESSED IN BONE MARROW, SIGNAL = 0.78; SWISSPROT HIT: P40872, EVALUE 1.20e+00; EST_HUMAN HIT: AW748596.1, EVALUE 3.00e-40
ARINARLQQYRAKAELARSTRPQAWVPREKLPRPLTSSASAIRKLMRKAELMGISTDIFPVDNSDTSSSVDGRRKHKQPALTADFVNYYF

SEQ ID NO: 43844 - protein, 43 aa, Homo sapiens
  MAP TO AC005007.1; EXPRESSED IN PLACENTA, SIGNAL = 0.86; EXPRESSED IN BRAIN, SIGNAL = 0.86; EXPRESSED IN ADULT LIVER, SIGNAL = 0.84; EXPRESSED IN LUNG, SIGNAL = 0.81; EXPRESSED IN FETAL LIVER, SIGNAL = 0.83; EXPRESSED IN BONE MARROW, SIGNAL = 0.78; EST_HUMAN HIT: BE254599.1, EVALUE 5.00e-19
GKDQCPASAVSCQSRTSSIYQTPGLGSKGKIAQTTHQQCFSYS

SEQ ID NO: 43845 - protein, 30 aa, Homo sapiens
  MAP TO AC005324.1; EXPRESSED IN LUNG, SIGNAL = 0.62; EXPRESSED IN BRAIN, SIGNAL = 0.6; EXPRESSED IN ADULT LIVER, SIGNAL = 0.84; EXPRESSED IN FETAL LIVER, SIGNAL = 0.78; EXPRESSED IN BONE MARROW, SIGNAL = 1.6; EXPRESSED IN PLACENTA, SIGNAL = 0.86; SWISSPROT HIT: O60765, EVALUE 3.00e-08; EST_HUMAN HIT: BE902618.1, EVALUE 6.00e-12
KPFRCNECGKSFKCSSSLIRHQRVHTEEQP

SEQ ID NO: 43846 - protein, 34 aa, Homo sapiens
  MAP TO AC004455.1; EXPRESSED IN PLACENTA, SIGNAL = 0.89; EXPRESSED IN BRAIN, SIGNAL = 1.2; EXPRESSED IN BONE MARROW, SIGNAL = 1.4; EXPRESSED IN ADULT LIVER, SIGNAL = 0.87; EXPRESSED IN LUNG, SIGNAL = 0.96; EXPRESSED IN FETAL LIVER, SIGNAL = 0.97; SWISSPROT HIT: P18126, EVALUE 6.50e+00
QESPVFQHRKQECLKPHCAVSAGDISLLSNLPSL

SEQ ID NO: 43847 - protein, 136 aa, Homo sapiens
  MAP TO AC005924.2; EXPRESSED IN PLACENTA, SIGNAL = 0.8; EXPRESSED IN BONE MARROW, SIGNAL = 0.86; EXPRESSED IN ADULT LIVER, SIGNAL = 0.69; EXPRESSED IN LUNG, SIGNAL = 0.89; EXPRESSED IN FETAL LIVER, SIGNAL = 0.83; EXPRESSED IN BRAIN, SIGNAL = 0.8; EST_HUMAN HIT: BE780453.1, EVALUE 1.00e-68; SWISSPROT HIT: P03079, EVALUE 5.20e-01
TSPKKQEEARREYPLSPDGHLHRQKNEPIHLDVVEQPPQRSDFPLAAPENASTGPAHVRGRTAVETDLTFGLTPNRPSLSACSSEAPEERSGRRLADSESLGHGAQRNTDLEREDSISRGRRSPSKPDFLYKKSAL

SEQ ID NO: 43848 - protein, 102 aa, Homo sapiens
  MAP TO AB019440.1; EXPRESSED IN PLACENTA, SIGNAL = 0.84; EXPRESSED IN FETAL LIVER, SIGNAL = 0.89; EXPRESSED IN BRAIN, SIGNAL = 1.1; EXPRESSED IN ADULT LIVER, SIGNAL = 1.1; EXPRESSED IN LUNG, SIGNAL = 0.95; EXPRESSED IN BONE MARROW, SIGNAL =   1; EST_HUMAN HIT: AW405458.1, EVALUE 3.00e-43; SWISSPROT HIT: P01766, EVALUE 2.00e-39
GLVQPGGSLRLSCAASGFTFSSYDMHWVRQATGKGLEWVSAIGTAGDTYYPGSVKGRFTISRENAKNSLYLQMNSLRAGDTAVYYCARDTVRGSQYEPRHKP

SEQ ID NO: 43849 - protein, 140 aa, Homo sapiens
  MAP TO AC000114.1; EXPRESSED IN PLACENTA, SIGNAL = 0.75; EXPRESSED IN BRAIN, SIGNAL = 0.98; EXPRESSED IN BONE MARROW, SIGNAL = 0.77; EXPRESSED IN ADULT LIVER, SIGNAL = 0.65; EXPRESSED IN LUNG, SIGNAL = 0.65; SWISSPROT HIT: P19683, EVALUE 2.90e+00
SSTVPISGLTQMQSLPSALQKYALYYLALLECKALPAAPPEHEKTLNSGLAQMQSLVSNTSKTWKSACWPCLTMKPLQLALFNCTHQKEALYPPKTMMTGPEHHQAHAADLAHLWITLVGLPRIPVLDNWGESFPAKASL

SEQ ID NO: 43850 - protein, 62 aa, Homo sapiens
  MAP TO AC005192.1; EXPRESSED IN PLACENTA, SIGNAL = 0.72; EXPRESSED IN LUNG, SIGNAL = 0.57; EXPRESSED IN FETAL LIVER, SIGNAL = 1.3; EXPRESSED IN ADULT LIVER, SIGNAL = 0.69; EXPRESSED IN BRAIN, SIGNAL = 0.97; EXPRESSED IN BONE MARROW, SIGNAL = 0.9
PAFYENCLLWEVWPRRQCPTEEKDKDIGSNFQTSKSSSFFTCETGLIITHAAVRQEQGDVCV

SEQ ID NO: 43851 - protein, 27 aa, Homo sapiens
  MAP TO AC005192.1; EXPRESSED IN PLACENTA, SIGNAL = 0.72; EXPRESSED IN LUNG, SIGNAL = 0.57; EXPRESSED IN FETAL LIVER, SIGNAL = 1.3; EXPRESSED IN ADULT LIVER, SIGNAL = 0.69; EXPRESSED IN BRAIN, SIGNAL = 0.97; EXPRESSED IN BONE MARROW, SIGNAL = 0.9
NQHFMKIAFCGKSGRGGSVPQKRKIKT

SEQ ID NO: 43852 - protein, 23 aa, Homo sapiens
  MAP TO AC002045.1; EXPRESSED IN LUNG, SIGNAL = 0.79; EXPRESSED IN BONE MARROW, SIGNAL = 0.88; EXPRESSED IN ADULT LIVER, SIGNAL = 0.88; EXPRESSED IN PLACENTA, SIGNAL = 1.1; EXPRESSED IN FETAL LIVER, SIGNAL = 1.2; EXPRESSED IN BRAIN, SIGNAL =   1
HAVSVPSAGECRELGTEGRAGVQ

SEQ ID NO: 43853 - protein, 49 aa, Homo sapiens
  MAP TO AC006212.1; EXPRESSED IN BONE MARROW, SIGNAL = 0.65; EXPRESSED IN ADULT LIVER, SIGNAL = 0.49; EXPRESSED IN LUNG, SIGNAL = 0.58; EXPRESSED IN BRAIN, SIGNAL = 0.77; SWISSPROT HIT: Q9Y5X0, EVALUE 4.70e+00; EST_HUMAN HIT: AI547259.1, EVALUE 8.00e-03
FSSLSDIMNLRRVRTFLWIKLWLKGMLLITGLPEIFNMKKFATMRSTNK

SEQ ID NO: 43854 - protein, 26 aa, Homo sapiens
  MAP TO AC002090.1; EXPRESSED IN LUNG, SIGNAL = 1.8; EXPRESSED IN BRAIN, SIGNAL = 1.2; EXPRESSED IN PLACENTA, SIGNAL = 1.9; EXPRESSED IN BONE MARROW, SIGNAL = 1.3; EXPRESSED IN ADULT LIVER, SIGNAL = 1.5; EXPRESSED IN FETAL LIVER, SIGNAL = 1.1; SWISSPROT HIT: O70354, EVALUE 2.00e-03; EST_HUMAN HIT: H10914.1, EVALUE 6.00e-08
VQLIHYNHELYTNVTEAAKSPNGLVV

SEQ ID NO: 43855 - protein, 25 aa, Homo sapiens
  MAP TO AC002090.1; EXPRESSED IN LUNG, SIGNAL = 1.8; EXPRESSED IN BRAIN, SIGNAL = 1.2; EXPRESSED IN PLACENTA, SIGNAL = 1.9; EXPRESSED IN BONE MARROW, SIGNAL = 1.3; EXPRESSED IN ADULT LIVER, SIGNAL = 1.5; EXPRESSED IN FETAL LIVER, SIGNAL = 1.1; EST_HUMAN HIT: H10914.1, EVALUE 7.00e-08
CSSSTITMSYIRMSQKLQRVQMDWW

SEQ ID NO: 43856 - protein, 66 aa, Homo sapiens
  MAP TO AC004829.2; EXPRESSED IN LUNG, SIGNAL = 1.1; EXPRESSED IN BRAIN, SIGNAL = 0.96; EXPRESSED IN PLACENTA, SIGNAL = 1.1; EXPRESSED IN FETAL LIVER, SIGNAL = 0.78; EXPRESSED IN BONE MARROW, SIGNAL = 0.93; EXPRESSED IN ADULT LIVER, SIGNAL = 0.93; SWISSPROT HIT: Q57830, EVALUE 3.90e+00; EST_HUMAN HIT: BE613559.1, EVALUE 5.70e+00
ILLLIQKLLLIAIHILIGQYLIFFSNSICILVHLSQTVSLNKCKILTLCCFSRIIMLQNLQRQSYM

SEQ ID NO: 43857 - protein, 41 aa, Homo sapiens
  MAP TO AC006153.2; EXPRESSED IN BRAIN, SIGNAL = 0.68; EXPRESSED IN ADULT LIVER, SIGNAL = 0.68; EXPRESSED IN PLACENTA, SIGNAL = 0.68; EXPRESSED IN LUNG, SIGNAL = 0.75; EXPRESSED IN BONE MARROW, SIGNAL = 0.72; SWISSPROT HIT: P42641, EVALUE 3.20e-01; EST_HUMAN HIT: AI925874.1, EVALUE 1.00e-16
ELELYKEELQTKPALLAVNKMDLPDAQDKFHELMSQLQNPK

SEQ ID NO: 43858 - protein, 27 aa, Homo sapiens
  MAP TO AC006153.2; EXPRESSED IN BRAIN, SIGNAL = 0.68; EXPRESSED IN ADULT LIVER, SIGNAL = 0.68; EXPRESSED IN PLACENTA, SIGNAL = 0.68; EXPRESSED IN LUNG, SIGNAL = 0.75; EXPRESSED IN BONE MARROW, SIGNAL = 0.72; EST_HUMAN HIT: AI433716.1, EVALUE 5.00e-10
KRNFRQNLHSWQLIKWTCQMPKISSMN

SEQ ID NO: 43859 - protein, 27 aa, Homo sapiens
  MAP TO AC004655.1; EXPRESSED IN LUNG, SIGNAL = 0.8; EXPRESSED IN BONE MARROW, SIGNAL = 2.1; EXPRESSED IN ADULT LIVER, SIGNAL = 0.73; EXPRESSED IN PLACENTA, SIGNAL = 0.79; EXPRESSED IN FETAL LIVER, SIGNAL = 0.76; EXPRESSED IN BRAIN, SIGNAL = 0.87; SWISSPROT HIT: O89042, EVALUE 1.10e-01
EKKSKKGRQEALERLKKAKAGEKYKYE

SEQ ID NO: 43860 - protein, 18 aa, Homo sapiens
  MAP TO AC004655.1; EXPRESSED IN LUNG, SIGNAL = 0.8; EXPRESSED IN BONE MARROW, SIGNAL = 2.1; EXPRESSED IN ADULT LIVER, SIGNAL = 0.73; EXPRESSED IN PLACENTA, SIGNAL = 0.79; EXPRESSED IN FETAL LIVER, SIGNAL = 0.76; EXPRESSED IN BRAIN, SIGNAL = 0.87
RKKIKEGAPRSPRKTEKG

SEQ ID NO: 43861 - protein, 18 aa, Homo sapiens
  MAP TO AC004508.1; EXPRESSED IN BRAIN, SIGNAL = 0.95; EXPRESSED IN BONE MARROW, SIGNAL = 0.94; EXPRESSED IN LUNG, SIGNAL = 0.94; EXPRESSED IN ADULT LIVER, SIGNAL = 1.1; EXPRESSED IN PLACENTA, SIGNAL = 0.79; EXPRESSED IN FETAL LIVER, SIGNAL = 0.87
ISCEYPPGLWPAPSEAAA

SEQ ID NO: 43862 - protein, 36 aa, Homo sapiens
  MAP TO AC005207.1; EXPRESSED IN PLACENTA, SIGNAL = 0.61; EXPRESSED IN LUNG, SIGNAL = 0.53; EXPRESSED IN BONE MARROW, SIGNAL = 0.54; EXPRESSED IN ADULT LIVER, SIGNAL = 0.62; EXPRESSED IN BRAIN, SIGNAL = 1.9; SWISSPROT HIT: Q03656, EVALUE 3.70e+00; EST_HUMAN HIT: AI307801.1, EVALUE 6.00e-15
MSSDSDIECDTENEEQEEHTSVGGFHDSFMVMTQPP

SEQ ID NO: 43863 - protein, 54 aa, Homo sapiens
  MAP TO AC002476.1; EXPRESSED IN LUNG, SIGNAL = 0.99; EXPRESSED IN FETAL LIVER, SIGNAL = 0.86; EXPRESSED IN BRAIN, SIGNAL = 0.57; EXPRESSED IN PLACENTA, SIGNAL = 1.4; EXPRESSED IN BONE MARROW, SIGNAL =   1; EXPRESSED IN ADULT LIVER, SIGNAL = 0.81; SWISSPROT HIT: O33659, EVALUE 8.00e+00; EST_HUMAN HIT: AW955413.1, EVALUE 3.00e-24
VQVTNNIVLSWINEVQKKSRRHRLEIKLEGKIDQTDVGGVRGGDNRMVSNSTLD

SEQ ID NO: 43864 - protein, 27 aa, Homo sapiens
  MAP TO AC004111.1; EXPRESSED IN FETAL LIVER, SIGNAL = 0.68; EXPRESSED IN BRAIN, SIGNAL = 0.62; EXPRESSED IN BONE MARROW, SIGNAL = 0.72; EXPRESSED IN ADULT LIVER, SIGNAL = 0.78; EXPRESSED IN PLACENTA, SIGNAL = 1.2; EXPRESSED IN LUNG, SIGNAL = 0.81
VIPSRTQSSRRDIQKDSLSKTRSENSR

SEQ ID NO: 43865 - protein, 47 aa, Homo sapiens
  MAP TO AC005539.1; EXPRESSED IN PLACENTA, SIGNAL = 1.1; EXPRESSED IN LUNG, SIGNAL = 1.1; EXPRESSED IN BRAIN, SIGNAL = 1.1; EXPRESSED IN FETAL LIVER, SIGNAL = 1.1; EXPRESSED IN BONE MARROW, SIGNAL = 0.91; EXPRESSED IN ADULT LIVER, SIGNAL = 1.1; SWISSPROT HIT: P52624, EVALUE 4.00e-08; EST_HUMAN HIT: AW241573.1, EVALUE 3.00e-04
IALLAAVVCVTLLDRLDCDQINLPHDVLVEYQQRPQLLISNFIRRRL

SEQ ID NO: 43866 - protein, 29 aa, Homo sapiens
  MAP TO AC004773.1; EXPRESSED IN PLACENTA, SIGNAL = 0.72; EXPRESSED IN BRAIN, SIGNAL = 0.82; EXPRESSED IN BONE MARROW, SIGNAL = 0.83; EXPRESSED IN ADULT LIVER, SIGNAL = 0.68; EXPRESSED IN LUNG, SIGNAL = 0.8; EXPRESSED IN FETAL LIVER, SIGNAL = 0.71
SGWILGSQLHTAGKDEVESPGQISVAGHL

SEQ ID NO: 43867 - protein, 36 aa, Homo sapiens
  MAP TO AC005997.2; EXPRESSED IN LUNG, SIGNAL = 0.77; EXPRESSED IN FETAL LIVER, SIGNAL = 0.75; EXPRESSED IN PLACENTA, SIGNAL = 0.79; EXPRESSED IN ADULT LIVER, SIGNAL = 0.59; EXPRESSED IN BRAIN, SIGNAL = 0.6; EXPRESSED IN BONE MARROW, SIGNAL = 0.62
SMDCGAVELQLLSWLECMVVSTVKRKVHKHDPVLLL

SEQ ID NO: 43868 - protein, 55 aa, Homo sapiens
  MAP TO AC005164.1; EXPRESSED IN BRAIN, SIGNAL = 1.2; EXPRESSED IN ADULT LIVER, SIGNAL = 0.82; EXPRESSED IN PLACENTA, SIGNAL = 0.84; EXPRESSED IN LUNG, SIGNAL = 0.83; EXPRESSED IN FETAL LIVER, SIGNAL = 0.99; EXPRESSED IN BONE MARROW, SIGNAL = 0.77; EST_HUMAN HIT: BE884320.1, EVALUE 4.00e-25; SWISSPROT HIT: P36115, EVALUE 2.10e+00
RVEEFLSKDISYLISNKKEAKFAQTLGRISPVPSPESAYTAETTSPHPSHDGSSF

SEQ ID NO: 43869 - protein, 54 aa, Homo sapiens
  MAP TO AC005164.1; EXPRESSED IN BRAIN, SIGNAL = 1.2; EXPRESSED IN ADULT LIVER, SIGNAL = 0.82; EXPRESSED IN PLACENTA, SIGNAL = 0.84; EXPRESSED IN LUNG, SIGNAL = 0.83; EXPRESSED IN FETAL LIVER, SIGNAL = 0.99; EXPRESSED IN BONE MARROW, SIGNAL = 0.77; EST_HUMAN HIT: BE884320.1, EVALUE 7.00e-25; SWISSPROT HIT: P14994, EVALUE 4.60e+00
ELKNFSAKISVILFQIRRKLNLHKPWVEFLLYQVQNLHILQKPLHLIPAMMEVH

SEQ ID NO: 43870 - protein, 39 aa, Homo sapiens
  MAP TO AC004060.1; EXPRESSED IN LUNG, SIGNAL = 0.78; EXPRESSED IN FETAL LIVER, SIGNAL =   1; EXPRESSED IN BRAIN, SIGNAL = 0.91; EXPRESSED IN BONE MARROW, SIGNAL =   1; EXPRESSED IN PLACENTA, SIGNAL = 0.98; EXPRESSED IN ADULT LIVER, SIGNAL =   1
LAIMCNFWNTLLMQINTCSRVWISMVPTSMQLVSVISVT

SEQ ID NO: 43871 - protein, 64 aa, Homo sapiens
  MAP TO AC004843.1; EXPRESSED IN LUNG, SIGNAL = 0.63; EXPRESSED IN BRAIN, SIGNAL = 0.67; EXPRESSED IN ADULT LIVER, SIGNAL = 0.61; EXPRESSED IN PLACENTA, SIGNAL = 0.61; EXPRESSED IN BONE MARROW, SIGNAL = 0.5; EST_HUMAN HIT: BF031289.1, EVALUE 1.50e+00; SWISSPROT HIT: P70343, EVALUE 5.20e-01
SSCTVGLILNETDNAAETGWWPGHSEAGRKPVGAKYKEVLTFSVMQVTQINVVKMKEEDRGKDK

SEQ ID NO: 43872 - protein, 45 aa, Homo sapiens
  MAP TO AC006011.2; EXPRESSED IN ADULT LIVER, SIGNAL = 0.68; EXPRESSED IN BRAIN, SIGNAL = 0.57; EXPRESSED IN PLACENTA, SIGNAL = 0.58; EXPRESSED IN LUNG, SIGNAL = 0.56
KDESNEIEMTIPGLDWGMEEVMQKDQKKVPQKKVPYAKPIPAQFQ

SEQ ID NO: 43873 - protein, 80 aa, Homo sapiens
  MAP TO AC006121.1; EXPRESSED IN LUNG, SIGNAL = 0.83; EXPRESSED IN FETAL LIVER, SIGNAL = 0.9; EXPRESSED IN PLACENTA, SIGNAL = 1.1; EXPRESSED IN BRAIN, SIGNAL = 0.98; EXPRESSED IN BONE MARROW, SIGNAL = 0.78; EXPRESSED IN ADULT LIVER, SIGNAL = 1.2; EST_HUMAN HIT: AW864811.1, EVALUE 1.00e-23; SWISSPROT HIT: Q93008, EVALUE 7.00e-39
FLFPPRAFRGKHLSFVVRFPNQGRQVDDLEVWSHTNDTIGSVRRCILNRIKANVAHTKIELFVGGELIDPADDRKLIGQL

SEQ ID NO: 43874 - protein, 48 aa, Homo sapiens
  MAP TO AC005295.1; EXPRESSED IN PLACENTA, SIGNAL = 0.94; EXPRESSED IN ADULT LIVER, SIGNAL =   1; EXPRESSED IN LUNG, SIGNAL = 0.78; EXPRESSED IN FETAL LIVER, SIGNAL = 0.79; EXPRESSED IN BRAIN, SIGNAL = 0.79; EXPRESSED IN BONE MARROW, SIGNAL = 0.81; EST_HUMAN HIT: N34510.1, EVALUE 1.50e-01
MCPLIQEFSSTLPSLRQQDQALLFLLLSLLNLKTRMKTFMMIYFHLVN

SEQ ID NO: 43875 - protein, 31 aa, Homo sapiens
  MAP TO AC004740.1; EXPRESSED IN LUNG, SIGNAL = 0.66; EXPRESSED IN BRAIN, SIGNAL = 0.55; EXPRESSED IN BONE MARROW, SIGNAL = 0.6; EXPRESSED IN ADULT LIVER, SIGNAL = 0.73; EXPRESSED IN PLACENTA, SIGNAL = 0.73
HSRRTSELRMVYTNFLILLQEQQQMTMMNKV

SEQ ID NO: 43876 - protein, 48 aa, Homo sapiens
  MAP TO AC004811.2; EXPRESSED IN PLACENTA, SIGNAL = 0.59; EXPRESSED IN LUNG, SIGNAL = 0.51; EXPRESSED IN ADULT LIVER, SIGNAL = 0.72; EXPRESSED IN BRAIN, SIGNAL = 0.89; EXPRESSED IN BONE MARROW, SIGNAL = 0.7; EST_HUMAN HIT: BE177698.1, EVALUE 7.80e-01; SWISSPROT HIT: P49025, EVALUE 2.00e-20
MEQEMTRLHRRVSEVEAVLSQKEVELKASETQRSLLEQDLATYITECS

SEQ ID NO: 43877 - protein, 18 aa, Homo sapiens
  MAP TO AC004811.2; EXPRESSED IN PLACENTA, SIGNAL = 0.59; EXPRESSED IN LUNG, SIGNAL = 0.51; EXPRESSED IN ADULT LIVER, SIGNAL = 0.72; EXPRESSED IN BRAIN, SIGNAL = 0.89; EXPRESSED IN BONE MARROW, SIGNAL = 0.7
GAGNDPVTSESVRGGGCA

SEQ ID NO: 43878 - protein, 96 aa, Homo sapiens
  MAP TO AC005216.1; EXPRESSED IN PLACENTA, SIGNAL = 0.62; EXPRESSED IN LUNG, SIGNAL = 0.85; EXPRESSED IN FETAL LIVER, SIGNAL = 0.87; EXPRESSED IN BRAIN, SIGNAL = 0.94; EXPRESSED IN ADULT LIVER, SIGNAL = 0.75; EXPRESSED IN BONE MARROW, SIGNAL = 0.92; EST_HUMAN HIT: AA057219.1, EVALUE 2.70e+00; SWISSPROT HIT: Q02597, EVALUE 3.40e+00
IGEHGQMRCAAEFARMGLEMEEGLSHRVKPSQKKTMRLGLAVQQVGVGSKITESLMHREIQKANLPLLQKLPDTAKPLEKELKLTMWFWIIDIKTQ

SEQ ID NO: 43879 - protein, 48 aa, Homo sapiens
  MAP TO AC005358.1; EXPRESSED IN PLACENTA, SIGNAL = 0.95; EXPRESSED IN LUNG, SIGNAL = 0.88; EXPRESSED IN FETAL LIVER, SIGNAL = 0.97; EXPRESSED IN BONE MARROW, SIGNAL = 0.9; EXPRESSED IN ADULT LIVER, SIGNAL = 0.98; EXPRESSED IN BRAIN, SIGNAL = 0.95
LSSSLPSPPPSLSSSSSTSSSWLSFVGNLPCTRLCPECFLYICLPTEF

SEQ ID NO: 43880 - protein, 45 aa, Homo sapiens
  MAP TO AC002541.1; EXPRESSED IN LUNG, SIGNAL = 0.91; EXPRESSED IN FETAL LIVER, SIGNAL =   1; EXPRESSED IN BONE MARROW, SIGNAL = 1.1; EXPRESSED IN PLACENTA, SIGNAL = 0.67; EXPRESSED IN BRAIN, SIGNAL = 1.3; EXPRESSED IN ADULT LIVER, SIGNAL = 0.86; EST_HUMAN HIT: AA703466.1, EVALUE 4.00e-12
LILSFDFLLNTDALHSYPESEFYFCHFSHFSLVKNHCWGNIPVFG

SEQ ID NO: 43881 - protein, 45 aa, Homo sapiens
  MAP TO AC002541.1; EXPRESSED IN LUNG, SIGNAL = 0.91; EXPRESSED IN FETAL LIVER, SIGNAL =   1; EXPRESSED IN BONE MARROW, SIGNAL = 1.1; EXPRESSED IN PLACENTA, SIGNAL = 0.67; EXPRESSED IN BRAIN, SIGNAL = 1.3; EXPRESSED IN ADULT LIVER, SIGNAL = 0.86; EST_HUMAN HIT: AA703466.1, EVALUE 5.00e-09
SKNRNISPAMVLNQAEMAEMTEIEFRLWIGMKSISVQQKVKTQYE

SEQ ID NO: 43882 - protein, 33 aa, Homo sapiens
  MAP TO AC005079.1; EXPRESSED IN LUNG, SIGNAL = 0.77; EXPRESSED IN BRAIN, SIGNAL = 0.94; EXPRESSED IN BONE MARROW, SIGNAL = 0.65; EXPRESSED IN PLACENTA, SIGNAL = 1.3; EXPRESSED IN FETAL LIVER, SIGNAL = 0.69; EXPRESSED IN ADULT LIVER, SIGNAL = 0.69; EST_HUMAN HIT: AU140742.1, EVALUE 1.00e-11
RDEIGRIELVQKLAKENYQFLQTDKKEQEKSEH

SEQ ID NO: 43883 - protein, 57 aa, Homo sapiens; identical to SEQ ID NO: 43556
  MAP TO AC002457.1; EXPRESSED IN LUNG, SIGNAL = 0.42; EXPRESSED IN BONE MARROW, SIGNAL = 0.53; EXPRESSED IN BRAIN, SIGNAL = 0.57; EST_HUMAN HIT: T68053.1, EVALUE 1.60e+00; SWISSPROT HIT: P08183, EVALUE 3.00e-27

SEQ ID NO: 43884 - protein, 38 aa, Homo sapiens
  MAP TO AC002457.1; EXPRESSED IN LUNG, SIGNAL = 0.42; EXPRESSED IN BONE MARROW, SIGNAL = 0.53; EXPRESSED IN BRAIN, SIGNAL = 0.57
QLFLTLSVLSVMSPRLMKELVTKLECSFSQWQHFSLGL

SEQ ID NO: 43885 - protein, 57 aa, Homo sapiens
  MAP TO AC004816.1; EXPRESSED IN BRAIN, SIGNAL = 0.58; EXPRESSED IN BONE MARROW, SIGNAL = 0.52; EXPRESSED IN ADULT LIVER, SIGNAL = 0.42; SWISSPROT HIT: P80192, EVALUE 9.00e-31; EST_HUMAN HIT: AW014042.1, EVALUE 1.00e-29
WNPDPHSRPSFTNILDQLTTIEESGFFEMPKDSFHCLQDNWKHEIQEMFDQLRAKEK

SEQ ID NO: 43886 - protein, 18 aa, Homo sapiens
  MAP TO AC004816.1; EXPRESSED IN BRAIN, SIGNAL = 0.58; EXPRESSED IN BONE MARROW, SIGNAL = 0.52; EXPRESSED IN ADULT LIVER, SIGNAL = 0.42; EST_HUMAN HIT: AW014042.1, EVALUE 2.00e-03
AGILIPTHDHLSRISWTS

SEQ ID NO: 43887 - protein, 28 aa, Homo sapiens
  MAP TO AC005220.1; EXPRESSED IN LUNG, SIGNAL = 0.92; EXPRESSED IN BRAIN, SIGNAL = 1.4; EXPRESSED IN BONE MARROW, SIGNAL = 0.79; EXPRESSED IN ADULT LIVER, SIGNAL = 2.8; EXPRESSED IN PLACENTA, SIGNAL = 1.1; EXPRESSED IN FETAL LIVER, SIGNAL = 0.98; EST_HUMAN HIT: AU138719.1, EVALUE 5.00e-08; SWISSPROT HIT: Q93068, EVALUE 4.00e-09
QRIADNHTPEELGMEEEDVIEVYQEQIG

SEQ ID NO: 43888 - protein, 84 aa, Homo sapiens
  MAP TO AC002126.1; EXPRESSED IN LUNG, SIGNAL = 0.46; EXPRESSED IN BRAIN, SIGNAL = 0.58; EXPRESSED IN ADULT LIVER, SIGNAL = 0.46; EST_HUMAN HIT: AI435954.1, EVALUE 1.00e-17; SWISSPROT HIT: P23023, EVALUE 1.10e+00
LRWPHRAVGLVPAGCGAAAHADGRRHGLPARLHRPHAAHHRAGGGRRARPLQRLEHELGQGSHRRGHQLHHLRPHADPAAAPAE

SEQ ID NO: 43889 - protein, 49 aa, Homo sapiens
  MAP TO AC005368.1; EXPRESSED IN HELA, SIGNAL = 1.7; EXPRESSED IN BRAIN, SIGNAL = 0.82; EXPRESSED IN BONE MARROW, SIGNAL = 1.3; EXPRESSED IN PLACENTA, SIGNAL = 1.1; EXPRESSED IN LUNG, SIGNAL = 0.78; EXPRESSED IN FETAL LIVER, SIGNAL = 1.5; EXPRESSED IN ADULT LIVER, SIGNAL = 1.2; EST_HUMAN HIT: AW503940.1, EVALUE 2.00e-20; SWISSPROT HIT: O60610, EVALUE 2.00e-21
QVEMKKMESDFEQKLQDLQGEKDALHSEKQQIATEKQDLEAEVSQLTGE

SEQ ID NO: 43890 - protein, 55 aa, Homo sapiens
  MAP TO AC002543.1; EXPRESSED IN PLACENTA, SIGNAL = 0.95; EXPRESSED IN BRAIN, SIGNAL = 1.5; EXPRESSED IN BONE MARROW, SIGNAL = 1.3; EXPRESSED IN ADULT LIVER, SIGNAL = 1.1; EXPRESSED IN LUNG, SIGNAL = 0.93; EXPRESSED IN FETAL LIVER, SIGNAL = 1.1; EST_HUMAN HIT: AL079360.1, EVALUE 1.00e-07; SWISSPROT HIT: P32462, EVALUE 5.30e-01
FCLELMAFYACNNGLLSIYFFAIHLIGKENKHKNEFRAMECPTLKIYKILQIVQY

SEQ ID NO: 43891 - protein, 58 aa, Homo sapiens
  MAP TO AC004132.1; EXPRESSED IN BRAIN, SIGNAL = 1.2; EXPRESSED IN BONE MARROW, SIGNAL =   1; EXPRESSED IN ADULT LIVER, SIGNAL = 0.87; EXPRESSED IN PLACENTA, SIGNAL = 0.9; EXPRESSED IN LUNG, SIGNAL = 0.82; EXPRESSED IN FETAL LIVER, SIGNAL = 1.1; EST_HUMAN HIT: AI244667.1, EVALUE 9.00e-27; SWISSPROT HIT: P35680, EVALUE 7.00e-28
QSVPVINSVAGSLAALQPVQFSQQLHSPHQQPLMQQSPGSHMAQQPFMAAVTQLQNSH

SEQ ID NO: 43892 - protein, 51 aa, Homo sapiens
  MAP TO AC004132.1; EXPRESSED IN BRAIN, SIGNAL = 1.2; EXPRESSED IN BONE MARROW, SIGNAL =   1; EXPRESSED IN ADULT LIVER, SIGNAL = 0.87; EXPRESSED IN PLACENTA, SIGNAL = 0.9; EXPRESSED IN LUNG, SIGNAL = 0.82; EXPRESSED IN FETAL LIVER, SIGNAL = 1.1; EST_HUMAN HIT: AI244667.1, EVALUE 4.00e-10
HRVSLSSTVWPAAWQPCSPSSSPSSCTALTSSPSCSRAQAATWPSSPSWQL

SEQ ID NO: 43893 - protein, 50 aa, Homo sapiens
  MAP TO AC006016.2; EXPRESSED IN BRAIN, SIGNAL = 0.66; EXPRESSED IN ADULT LIVER, SIGNAL = 0.64; EXPRESSED IN FETAL LIVER, SIGNAL = 0.72; EXPRESSED IN BONE MARROW, SIGNAL = 0.68; EXPRESSED IN PLACENTA, SIGNAL = 0.69; EXPRESSED IN LUNG, SIGNAL = 0.64; EST_HUMAN HIT: AA775142.1, EVALUE 6.60e+00; SWISSPROT HIT: Q06184, EVALUE 3.60e+00
TDYIKFSQKNLSKYVSINIMWGEMFQGKHWYDPKGTRNQYDVEMLSRLPP

SEQ ID NO: 43894 - protein, 30 aa, Homo sapiens
  MAP TO AC005083.1; EXPRESSED IN LUNG, SIGNAL = 0.48; EXPRESSED IN FETAL LIVER, SIGNAL = 0.72; EXPRESSED IN BRAIN, SIGNAL = 0.58; EXPRESSED IN ADULT LIVER, SIGNAL = 0.43; EXPRESSED IN BONE MARROW, SIGNAL = 0.6; SWISSPROT HIT: P55847, EVALUE 8.60e+00
HGYFHGTMMLRTSAKKAFMDSVCLGLTGDR

SEQ ID NO: 43895 - protein, 28 aa, Homo sapiens
  MAP TO AC005083.1; EXPRESSED IN LUNG, SIGNAL = 0.48; EXPRESSED IN FETAL LIVER, SIGNAL = 0.72; EXPRESSED IN BRAIN, SIGNAL = 0.58; EXPRESSED IN ADULT LIVER, SIGNAL = 0.43; EXPRESSED IN BONE MARROW, SIGNAL = 0.6
AWLFPWNYDAENLCQEGIYGLSVPGAYR

SEQ ID NO: 43896 - protein, 63 aa, Homo sapiens
  MAP TO AC005585.1; EXPRESSED IN PLACENTA, SIGNAL = 0.84; EXPRESSED IN LUNG, SIGNAL = 0.84; EXPRESSED IN FETAL LIVER, SIGNAL = 0.76; EXPRESSED IN BONE MARROW, SIGNAL = 0.79; EXPRESSED IN ADULT LIVER, SIGNAL = 0.8; EXPRESSED IN BRAIN, SIGNAL = 0.75; EST_HUMAN HIT: AW954566.1, EVALUE 6.00e-32; SWISSPROT HIT: Q92609, EVALUE 2.00e-03
EAIQLDGEILFSLLQKVSPVAHKHLSRQKIDPLLYMTEWFMCAFSRTLPWSSVLRVWDMFFCE

SEQ ID NO: 43897 - protein, 41 aa, Homo sapiens
  MAP TO AC005585.1; EXPRESSED IN PLACENTA, SIGNAL = 0.84; EXPRESSED IN LUNG, SIGNAL = 0.84; EXPRESSED IN FETAL LIVER, SIGNAL = 0.76; EXPRESSED IN BONE MARROW, SIGNAL = 0.79; EXPRESSED IN ADULT LIVER, SIGNAL = 0.8; EXPRESSED IN BRAIN, SIGNAL = 0.75; EST_HUMAN HIT: BE707526.1, EVALUE 7.10e+00
PRCLPRRRSSWTGRSFSRCCRRCRRWPTSTSAVRRSTRSSI

SEQ ID NO: 43898 - protein, 68 aa, Homo sapiens
  MAP TO AC004820.2; EXPRESSED IN BONE MARROW, SIGNAL = 0.83; EXPRESSED IN PLACENTA, SIGNAL = 0.7; EXPRESSED IN LUNG, SIGNAL = 0.57; EXPRESSED IN BRAIN, SIGNAL = 0.68; EXPRESSED IN ADULT LIVER, SIGNAL = 0.51; EST_HUMAN HIT: BF672815.1, EVALUE 6.00e-33; SWISSPROT HIT: P11799, EVALUE 8.00e-08
VSGLPAPDVSWYLNGRTVQSDDLHKMIVSEKGLHSLIFEVVRASDAGAYACVAKNRAGEATFTVQLDV

SEQ ID NO: 43899 - protein, 31 aa, Homo sapiens
  MAP TO AC005383.1; EXPRESSED IN LUNG, SIGNAL = 0.82; EXPRESSED IN PLACENTA, SIGNAL = 0.84; EXPRESSED IN FETAL LIVER, SIGNAL = 0.75; EXPRESSED IN BRAIN, SIGNAL = 0.63; EXPRESSED IN BONE MARROW, SIGNAL = 0.72; EXPRESSED IN ADULT LIVER, SIGNAL = 0.66
LTAELLEYCNAPKSRPPYRPRIGDACCAKYT

SEQ ID NO: 43900 - protein, 17 aa, Homo sapiens
  MAP TO AC005284.1; EXPRESSED IN PLACENTA, SIGNAL = 0.91; EXPRESSED IN LUNG, SIGNAL = 0.91; EXPRESSED IN BRAIN, SIGNAL = 0.69; EXPRESSED IN FETAL LIVER, SIGNAL = 0.93; EXPRESSED IN BONE MARROW, SIGNAL = 0.83; EXPRESSED IN ADULT LIVER, SIGNAL = 0.85
VVGRIEDVFLDQKFWLQ

SEQ ID NO: 43901 - protein, 44 aa, Homo sapiens
  MAP TO AC005178.1; EXPRESSED IN PLACENTA, SIGNAL = 0.84; EXPRESSED IN ADULT LIVER, SIGNAL = 0.81; EXPRESSED IN LUNG, SIGNAL = 0.82; EXPRESSED IN FETAL LIVER, SIGNAL = 0.84; EXPRESSED IN BRAIN, SIGNAL = 0.72; EXPRESSED IN BONE MARROW, SIGNAL = 0.84
GKDNNNNNNHYNSNSNSGDCSIQTVKCQALCKHFPGISSLILTH

SEQ ID NO: 43902 - protein, 29 aa, Homo sapiens
  MAP TO AC004863.1; EXPRESSED IN BONE MARROW, SIGNAL = 0.95; EXPRESSED IN PLACENTA, SIGNAL = 1.2; EXPRESSED IN LUNG, SIGNAL = 1.3; EXPRESSED IN FETAL LIVER, SIGNAL = 0.95; EXPRESSED IN BRAIN, SIGNAL = 1.1; EXPRESSED IN ADULT LIVER, SIGNAL =   1; EST_HUMAN HIT: BE222778.1, EVALUE 7.00e-11
AYVQCNEDNVERDIQTEEIETREVWTQHP

SEQ ID NO: 43903 - protein, 26 aa, Homo sapiens
  MAP TO AC004863.1; EXPRESSED IN BONE MARROW, SIGNAL = 0.95; EXPRESSED IN PLACENTA, SIGNAL = 1.2; EXPRESSED IN LUNG, SIGNAL = 1.3; EXPRESSED IN FETAL LIVER, SIGNAL = 0.95; EXPRESSED IN BRAIN, SIGNAL = 1.1; EXPRESSED IN ADULT LIVER, SIGNAL =   1; EST_HUMAN HIT: BE222778.1, EVALUE 2.00e-03
FGIFLFLRHMFSVTKIMLKETFKRRK

SEQ ID NO: 43904 - protein, 28 aa, Homo sapiens
  MAP TO AC005358.1; EXPRESSED IN PLACENTA, SIGNAL = 1.3; EXPRESSED IN LUNG, SIGNAL = 1.2; EXPRESSED IN BRAIN, SIGNAL = 0.96; EXPRESSED IN FETAL LIVER, SIGNAL = 1.1; EXPRESSED IN BONE MARROW, SIGNAL = 1.1; EXPRESSED IN ADULT LIVER, SIGNAL = 1.1
AWLEFCKFRHSMLIAKRLWHILLYSISL

SEQ ID NO: 43905 - protein, 18 aa, Homo sapiens
  MAP TO AC002536.1; EXPRESSED IN PLACENTA, SIGNAL = 0.62; EXPRESSED IN LUNG, SIGNAL = 0.58; EXPRESSED IN ADULT LIVER, SIGNAL = 0.74; EXPRESSED IN BRAIN, SIGNAL = 0.68; EXPRESSED IN BONE MARROW, SIGNAL = 0.71
MPALELREHEGVGSGGQG

SEQ ID NO: 43906 - protein, 61 aa, Homo sapiens
  MAP TO AC005988.1; EXPRESSED IN LUNG, SIGNAL = 1.5; EXPRESSED IN FETAL LIVER, SIGNAL = 1.6; EXPRESSED IN BRAIN, SIGNAL = 0.87; EXPRESSED IN ADULT LIVER, SIGNAL = 1.3; EXPRESSED IN BONE MARROW, SIGNAL = 0.82; EXPRESSED IN PLACENTA, SIGNAL = 0.8; EST_HUMAN HIT: BE218315.1, EVALUE 5.00e-05
RSRCWQDWFLLRPLSLACRRLPSRCVLMWSVCPCPWCPSVCPHSLSWCPRTPVRLDSGPSP

SEQ ID NO: 43907 - protein, 38 aa, Homo sapiens
  MAP TO AC006097.1; EXPRESSED IN PLACENTA, SIGNAL = 0.89; EXPRESSED IN LUNG, SIGNAL =   1; EXPRESSED IN FETAL LIVER, SIGNAL = 1.8; EXPRESSED IN BRAIN, SIGNAL = 1.1; EXPRESSED IN BONE MARROW, SIGNAL =   1; EXPRESSED IN ADULT LIVER, SIGNAL = 2.9; SWISSPROT HIT: Q25464, EVALUE 1.00e-03; EST_HUMAN HIT: T68666.1, EVALUE 7.00e-19
QNTCKDNPCGRGQCLITQSPPYYRCVCKHPYTGPSCSQ

SEQ ID NO: 43908 - protein, 30 aa, Homo sapiens
  MAP TO AC004547.1; EXPRESSED IN BRAIN, SIGNAL = 0.66; EXPRESSED IN ADULT LIVER, SIGNAL = 0.4
GELWKFVLYITELILRSVVCYSIHGNLSLL

SEQ ID NO: 43909 - protein, 22 aa, Homo sapiens
  MAP TO AC004879.1; EXPRESSED IN LUNG, SIGNAL =   1; EXPRESSED IN FETAL LIVER, SIGNAL = 0.89; EXPRESSED IN BONE MARROW, SIGNAL = 0.94; EXPRESSED IN PLACENTA, SIGNAL = 0.84; EXPRESSED IN BRAIN, SIGNAL = 0.77; EXPRESSED IN ADULT LIVER, SIGNAL = 0.98
QDTELPYASVSSLLQQDKDDFN

SEQ ID NO: 43910 - protein, 53 aa, Homo sapiens
  MAP TO AC006350.2; EXPRESSED IN ADULT LIVER, SIGNAL = 0.96; EXPRESSED IN PLACENTA, SIGNAL = 0.7; EXPRESSED IN LUNG, SIGNAL = 0.6; EXPRESSED IN FETAL LIVER, SIGNAL =   1; EXPRESSED IN BRAIN, SIGNAL = 0.66; EXPRESSED IN BONE MARROW, SIGNAL = 0.66; SWISSPROT HIT: Q92785, EVALUE 4.10e-01
DFAEKKSTAKALEDVKANFYCELCDKQYHKHQEFDNHINSYDHAHKQVRQSGK

SEQ ID NO: 43911 - protein, 64 aa, Homo sapiens
  MAP TO AC006354.2; EXPRESSED IN ADULT LIVER, SIGNAL = 0.78; EXPRESSED IN PLACENTA, SIGNAL = 0.66; EXPRESSED IN LUNG, SIGNAL = 0.62; EXPRESSED IN FETAL LIVER, SIGNAL = 0.7; EXPRESSED IN BRAIN, SIGNAL = 0.81; EXPRESSED IN BONE MARROW, SIGNAL = 0.65; SWISSPROT HIT: O74233, EVALUE 2.60e+00
NKYVSLEHVGKPIIAGGTEHGGDSSTFVVQIGIPDRPSMTAGGGAGILWKAIFLKTKATVTNRN

SEQ ID NO: 43912 - protein, 56 aa, Homo sapiens
  MAP TO AC004984.1; EXPRESSED IN PLACENTA, SIGNAL = 0.66; EXPRESSED IN LUNG, SIGNAL = 0.69; EXPRESSED IN BRAIN, SIGNAL = 0.58; EXPRESSED IN BONE MARROW, SIGNAL = 0.56; EXPRESSED IN ADULT LIVER, SIGNAL = 0.62; SWISSPROT HIT: P15744, EVALUE 4.10e-01
LPRMMTPLMVLEKSIKNLLKSIHHSRCHQEHSGFMRGGQNININRSLGEADSTPHG

SEQ ID NO: 43913 - protein, 150 aa, Homo sapiens
  MAP TO AC005538.2; EXPRESSED IN PLACENTA, SIGNAL = 0.74; EXPRESSED IN LUNG, SIGNAL = 0.79; EXPRESSED IN FETAL LIVER, SIGNAL =   1; EXPRESSED IN ADULT LIVER, SIGNAL = 0.8; EXPRESSED IN BRAIN, SIGNAL = 0.98; EXPRESSED IN BONE MARROW, SIGNAL = 1.3; SWISSPROT HIT: P13275, EVALUE 9.70e+00
CSRISRKSPGDPAKPASSPREWDPLHPSSTDMALVPRNDSLSLQETSSSSFLSSQPFEDDDICNVTISDLYAGMLHSMSRLLSTKPSSIISTKTFIMQNWNSRRRHRYKSRMNKTYCKGARRSQRSSKENFIPCSEPVKGTGALRDCKNV

SEQ ID NO: 43914 - protein, 34 aa, Homo sapiens
  MAP TO AC005538.2; EXPRESSED IN PLACENTA, SIGNAL = 0.74; EXPRESSED IN LUNG, SIGNAL = 0.79; EXPRESSED IN FETAL LIVER, SIGNAL =   1; EXPRESSED IN ADULT LIVER, SIGNAL = 0.8; EXPRESSED IN BRAIN, SIGNAL = 0.98; EXPRESSED IN BONE MARROW, SIGNAL = 1.3
TAVVSPERVLVTQRNQLHLPENGILCILPPQTWP

SEQ ID NO: 43915 - protein, 92 aa, Homo sapiens
  MAP TO AC004991.1; EXPRESSED IN PLACENTA, SIGNAL = 0.99; EXPRESSED IN FETAL LIVER, SIGNAL = 1.1; EXPRESSED IN BRAIN, SIGNAL = 1.2; EXPRESSED IN BONE MARROW, SIGNAL = 1.1; EXPRESSED IN ADULT LIVER, SIGNAL = 1.1; EXPRESSED IN LUNG, SIGNAL = 1.1; SWISSPROT HIT: P38811, EVALUE 8.00e-11
PLAYSTLADLVHHVRQHLPLSDLSLAVQLFAKNIDDESLPSSIQTMSCKLLLNLVDCIRSKSEQESGNGRDVLMRMLEVPALLRVSSILHSI

SEQ ID NO: 43916 - protein, 34 aa, Homo sapiens
  MAP TO AC002465.1; EXPRESSED IN LUNG, SIGNAL = 0.54; EXPRESSED IN FETAL LIVER, SIGNAL = 0.7; EXPRESSED IN PLACENTA, SIGNAL = 0.63; EXPRESSED IN BRAIN, SIGNAL = 0.62; EXPRESSED IN BONE MARROW, SIGNAL = 0.78; EXPRESSED IN ADULT LIVER, SIGNAL = 0.52
NGITSKDQQKILAALKELQVEEIQFGELSEETKL

SEQ ID NO: 43917 - protein, 110 aa, Homo sapiens
  MAP TO AC005411.1; EXPRESSED IN ADULT LIVER, SIGNAL = 0.96; EXPRESSED IN PLACENTA, SIGNAL = 0.96; EXPRESSED IN LUNG, SIGNAL = 0.98; EXPRESSED IN BRAIN, SIGNAL =   1; EXPRESSED IN BONE MARROW, SIGNAL = 0.85; EXPRESSED IN FETAL LIVER, SIGNAL = 0.87
CKSGLSFHHMPGDESDTVMVWRSPGSLILQEAGTDVCAVDRQTASSILRTFHILSPVWLLGHTRGTAGGGESNPIQFLTLQPPHTRSDLHYILGLNGPIKMSTVKDRFKN

SEQ ID NO: 43918 - protein, 126 aa, Homo sapiens
  MAP TO AC006213.1; EXPRESSED IN PLACENTA, SIGNAL = 1.1; EXPRESSED IN LUNG, SIGNAL = 0.94; EXPRESSED IN BRAIN, SIGNAL = 0.97; EXPRESSED IN FETAL LIVER, SIGNAL = 0.97; EXPRESSED IN BONE MARROW, SIGNAL = 0.85; EXPRESSED IN ADULT LIVER, SIGNAL = 1.1; SWISSPROT HIT: Q9UK11, EVALUE 2.00e-50
GKIQTELESVPEAGAHEEWSCQQIWEQIAKDLTRSQDSIINNSQFFENGDVPSQVEAGLPTIHTGQKPSQGGKCKQSISDVPIFDLPQQLYSEEKSYTCDECGKSICYISALHVHQRVHVGEKLFM

SEQ ID NO: 43919 - protein, 32 aa, Homo sapiens
  MAP TO AC006213.1; EXPRESSED IN PLACENTA, SIGNAL = 1.1; EXPRESSED IN LUNG, SIGNAL = 0.94; EXPRESSED IN BRAIN, SIGNAL = 0.97; EXPRESSED IN FETAL LIVER, SIGNAL = 0.97; EXPRESSED IN BONE MARROW, SIGNAL = 0.85; EXPRESSED IN ADULT LIVER, SIGNAL = 1.1
EARSKLSWSLFQKQEHMKSGPASKSGNKLQKT

SEQ ID NO: 43920 - protein, 39 aa, Homo sapiens
  MAP TO AC005629.1; EXPRESSED IN BRAIN, SIGNAL = 0.91; EXPRESSED IN PLACENTA, SIGNAL = 0.83; EXPRESSED IN LUNG, SIGNAL = 0.89; EXPRESSED IN BONE MARROW, SIGNAL = 0.68; EXPRESSED IN ADULT LIVER, SIGNAL = 0.74; EXPRESSED IN FETAL LIVER, SIGNAL = 0.83
NLVPLQCLLWVMEALLFSRLGIKVLEMYKDFFPTALVNL

SEQ ID NO: 43921 - protein, 22 aa, Homo sapiens
  MAP TO AC006227.1; EXPRESSED IN BONE MARROW, SIGNAL = 0.72; EXPRESSED IN ADULT LIVER, SIGNAL = 0.71; EXPRESSED IN PLACENTA, SIGNAL = 0.86; EXPRESSED IN LUNG, SIGNAL = 0.77; EXPRESSED IN BRAIN, SIGNAL = 0.61
STPSSAFSVSLFCISSSFSRCS

SEQ ID NO: 43922 - protein, 51 aa, Homo sapiens
  MAP TO AC006377.3; EXPRESSED IN LUNG, SIGNAL = 0.64; EXPRESSED IN BRAIN, SIGNAL = 0.59; EXPRESSED IN BONE MARROW, SIGNAL = 0.56; EXPRESSED IN ADULT LIVER, SIGNAL = 0.53; SWISSPROT HIT: Q63421, EVALUE 1.00e-23
RLLDTEDELSDIQSDAVPSEVRDWLASTFTRQMGMMLRRSDEKPRFKSIVH

SEQ ID NO: 43923 - protein, 34 aa, Homo sapiens
  MAP TO AC006377.3; EXPRESSED IN LUNG, SIGNAL = 0.64; EXPRESSED IN BRAIN, SIGNAL = 0.59; EXPRESSED IN BONE MARROW, SIGNAL = 0.56; EXPRESSED IN ADULT LIVER, SIGNAL = 0.53
DSWIQRMSSVTFSQMLCLLRSETGWPPPSRGRWG

SEQ ID NO: 43924 - protein, 43 aa, Homo sapiens
  MAP TO AC004957.1; EXPRESSED IN PLACENTA, SIGNAL = 1.2; EXPRESSED IN LUNG, SIGNAL = 1.3; EXPRESSED IN FETAL LIVER, SIGNAL =   1; EXPRESSED IN BONE MARROW, SIGNAL = 0.89; EXPRESSED IN BRAIN, SIGNAL = 1.1; EXPRESSED IN ADULT LIVER, SIGNAL = 1.3
TERSKREKGNVKEKKREKGEKNKEDRRRKGRRREGMVRRRKKG

SEQ ID NO: 43925 - protein, 36 aa, Homo sapiens
  MAP TO AC004957.1; EXPRESSED IN PLACENTA, SIGNAL = 1.2; EXPRESSED IN LUNG, SIGNAL = 1.3; EXPRESSED IN FETAL LIVER, SIGNAL =   1; EXPRESSED IN BONE MARROW, SIGNAL = 0.89; EXPRESSED IN BRAIN, SIGNAL = 1.1; EXPRESSED IN ADULT LIVER, SIGNAL = 1.3
QKGAKERRGMSRRKRERKERRTKKTGEGKGGGEKGW

SEQ ID NO: 43926 - protein, 56 aa, Homo sapiens
  MAP TO AC005365.1; EXPRESSED IN BRAIN, SIGNAL = 0.92; EXPRESSED IN PLACENTA, SIGNAL = 0.91; EXPRESSED IN LUNG, SIGNAL = 1.1; EXPRESSED IN BONE MARROW, SIGNAL = 0.79; EXPRESSED IN ADULT LIVER, SIGNAL = 0.91; EXPRESSED IN FETAL LIVER, SIGNAL = 0.72; SWISSPROT HIT: O60673, EVALUE 6.00e-28
VELHARTRRDLEPDPEFDPICALFYCISSDTPLPDTEKTELTGVIVIDKDKTVFSQ

SEQ ID NO: 43927 - protein, 65 aa, Homo sapiens
  MAP TO AC006238.1; EXPRESSED IN ADULT LIVER, SIGNAL = 0.69; EXPRESSED IN BONE MARROW, SIGNAL = 0.9; EXPRESSED IN PLACENTA, SIGNAL = 0.73; EXPRESSED IN LUNG, SIGNAL = 0.77; EXPRESSED IN BRAIN, SIGNAL = 0.81
SSSVRKWPRKAGWLLYPLRQRSSRSGKKMTTAGRSQLILRPSSSFSGVVLWLLGFCPQPTGARKC

SEQ ID NO: 43928 - protein, 34 aa, Homo sapiens
  MAP TO AC003086.1; EXPRESSED IN ADULT LIVER, SIGNAL = 0.61; EXPRESSED IN LUNG, SIGNAL = 0.56; EXPRESSED IN BRAIN, SIGNAL =   2; EXPRESSED IN BONE MARROW, SIGNAL = 0.61
SFGKKEHLQVLLIGNHPMKNSRLSFPCHVNIYSH

SEQ ID NO: 43929 - protein, 97 aa, Homo sapiens
  MAP TO AC005562.1; EXPRESSED IN BRAIN, SIGNAL = 1.1; EXPRESSED IN ADULT LIVER, SIGNAL = 1.3; EXPRESSED IN PLACENTA, SIGNAL = 1.2; EXPRESSED IN LUNG, SIGNAL = 1.4; EXPRESSED IN BONE MARROW, SIGNAL = 1.2; EXPRESSED IN FETAL LIVER, SIGNAL = 1.1; SWISSPROT HIT: P28741, EVALUE 3.30e+00
DQLEIQLTEQLRSLIPNEDVRKFMSHVIWTLKMECSETHVQGSCAKLMSRTGLLMKLLSEQQEAKALNVEWDTDQQKTNYINENMEQNEQKEQKSSE

SEQ ID NO: 43930 - protein, 30 aa, Homo sapiens
  MAP TO AC003091.1; EXPRESSED IN PLACENTA, SIGNAL = 0.82; EXPRESSED IN LUNG, SIGNAL = 0.7; EXPRESSED IN FETAL LIVER, SIGNAL = 0.72; EXPRESSED IN BONE MARROW, SIGNAL = 0.79; EXPRESSED IN BRAIN, SIGNAL = 0.83; EXPRESSED IN ADULT LIVER, SIGNAL = 0.68
GNKGMLHNPSMKRSWDCWMLKMDRSLLARK

SEQ ID NO: 43931 - protein, 30 aa, Homo sapiens
  MAP TO AC003091.1; EXPRESSED IN PLACENTA, SIGNAL = 0.82; EXPRESSED IN LUNG, SIGNAL = 0.7; EXPRESSED IN FETAL LIVER, SIGNAL = 0.72; EXPRESSED IN BONE MARROW, SIGNAL = 0.79; EXPRESSED IN BRAIN, SIGNAL = 0.83; EXPRESSED IN ADULT LIVER, SIGNAL = 0.68
LFWLTNSCPSSTSSNPMISSLKDCATSLYF

SEQ ID NO: 43932 - protein, 33 aa, Homo sapiens
  MAP TO AC005586.1; EXPRESSED IN PLACENTA, SIGNAL = 0.85; EXPRESSED IN BRAIN, SIGNAL = 0.68; EXPRESSED IN BONE MARROW, SIGNAL = 0.83; EXPRESSED IN ADULT LIVER, SIGNAL = 0.86; EXPRESSED IN LUNG, SIGNAL = 0.91; EXPRESSED IN FETAL LIVER, SIGNAL = 0.81
TPNMLSTASITMLPFGLKEVFSPHRALPLSMPL

SEQ ID NO: 43933 - protein, 84 aa, Homo sapiens
  MAP TO AC005392.1; EXPRESSED IN PLACENTA, SIGNAL = 1.4; EXPRESSED IN LUNG, SIGNAL = 0.84; EXPRESSED IN BRAIN, SIGNAL = 0.56; EXPRESSED IN BONE MARROW, SIGNAL = 3.1; EXPRESSED IN ADULT LIVER, SIGNAL = 0.79; SWISSPROT HIT: Q00888, EVALUE 3.00e-46
KLSKPYITINNLNPRENKDVLTFTCEPKSKNYTYIWWLNGQSLPVSPRVKRPIENRILILPNVTRNETGPYQCEIRDRYGGIRS

SEQ ID NO: 43934 - protein, 19 aa, Homo sapiens
  MAP TO AC005392.1; EXPRESSED IN PLACENTA, SIGNAL = 1.4; EXPRESSED IN LUNG, SIGNAL = 0.84; EXPRESSED IN BRAIN, SIGNAL = 0.56; EXPRESSED IN BONE MARROW, SIGNAL = 3.1; EXPRESSED IN ADULT LIVER, SIGNAL = 0.79
FSLLSTQQSCPSPTSQSTT

SEQ ID NO: 43935 - protein, 55 aa, Homo sapiens
  MAP TO AC000120.1; EXPRESSED IN BRAIN, SIGNAL = 0.57; EXPRESSED IN ADULT LIVER, SIGNAL = 0.42; SWISSPROT HIT: Q16850, EVALUE 9.00e-29
RHRCIGENFAYVQIKTIWSTMLRLYEFDLIDGYFPTVNYTTMIHTPENPVIRYKR

SEQ ID NO: 43936 - protein, 41 aa, Homo sapiens
  MAP TO AC005831.1; EXPRESSED IN LUNG, SIGNAL = 1.1; EXPRESSED IN BRAIN, SIGNAL = 0.62; EXPRESSED IN PLACENTA, SIGNAL = 0.8; EXPRESSED IN BONE MARROW, SIGNAL = 0.87; EXPRESSED IN ADULT LIVER, SIGNAL = 0.7
SKQMIVITSSSVSPCKRPEQNNIQKREKIPHLLVTGKAEAM

SEQ ID NO: 43937 - protein, 27 aa, Homo sapiens
  MAP TO AC004129.1; EXPRESSED IN PLACENTA, SIGNAL = 1.2; EXPRESSED IN LUNG, SIGNAL = 1.3; EXPRESSED IN BRAIN, SIGNAL = 1.5; EXPRESSED IN ADULT LIVER, SIGNAL = 1.8; EXPRESSED IN FETAL LIVER, SIGNAL =   2; EXPRESSED IN BONE MARROW, SIGNAL = 1.4; EXPRESSED IN HELA, SIGNAL = 1.8
AAKQLHEPASCSGSSCAFSSWVLLLFC

SEQ ID NO: 43938 - protein, 63 aa, Homo sapiens
  MAP TO AC005038.1; EXPRESSED IN PLACENTA, SIGNAL = 1.2; EXPRESSED IN LUNG, SIGNAL =   1; EXPRESSED IN FETAL LIVER, SIGNAL = 1.2; EXPRESSED IN BRAIN, SIGNAL = 1.5; EXPRESSED IN BONE MARROW, SIGNAL = 1.3; EXPRESSED IN ADULT LIVER, SIGNAL = 1.3; SWISSPROT HIT: Q99437, EVALUE 1.00e-29
YSMFGAGLTVGLSNLFCGVCVGIVGSGAALADAQNPSLFVKILIVEIFGSAIGLFGVIVAILQ

SEQ ID NO: 43939 - protein, 26 aa, Homo sapiens
  MAP TO AC004827.1; EXPRESSED IN ADULT LIVER, SIGNAL = 0.56; EXPRESSED IN PLACENTA, SIGNAL = 0.59; EXPRESSED IN LUNG, SIGNAL = 0.64; EXPRESSED IN BRAIN, SIGNAL = 0.71; EXPRESSED IN BONE MARROW, SIGNAL = 0.7
SNTLERKTPIQILGQEPDAEMVEYLI

SEQ ID NO: 43940 - protein, 32 aa, Homo sapiens
  MAP TO AC004827.1; EXPRESSED IN ADULT LIVER, SIGNAL = 0.56; EXPRESSED IN PLACENTA, SIGNAL = 0.59; EXPRESSED IN LUNG, SIGNAL = 0.64; EXPRESSED IN BRAIN, SIGNAL = 0.71; EXPRESSED IN BONE MARROW, SIGNAL = 0.7
TPILWKEKLPFRSWDKSLMQRWWNISSKRPNQ

SEQ ID NO: 43941 - protein, 34 aa, Homo sapiens
  MAP TO AC004694.1; EXPRESSED IN LUNG, SIGNAL = 0.72; EXPRESSED IN BRAIN, SIGNAL = 0.64; EXPRESSED IN BONE MARROW, SIGNAL = 0.91; EXPRESSED IN ADULT LIVER, SIGNAL = 0.67; EXPRESSED IN PLACENTA, SIGNAL = 0.65
PIIVTNNHKHRSVFFSHCQGSPDIPDSKCTCVNV

SEQ ID NO: 43942 - protein, 60 aa, Homo sapiens
  MAP TO AC006084.1; EXPRESSED IN PLACENTA, SIGNAL = 0.94; EXPRESSED IN BONE MARROW, SIGNAL = 0.96; EXPRESSED IN ADULT LIVER, SIGNAL = 0.74; EXPRESSED IN LUNG, SIGNAL = 1.2; EXPRESSED IN FETAL LIVER, SIGNAL =   1; EXPRESSED IN BRAIN, SIGNAL = 0.72; SWISSPROT HIT: P71229, EVALUE 6.00e+00
PAFKSWQEDSESGEAQLSPQAGRMNHHPLEEDCPPVLSHRSLDFGQSQRFLHDPEKLDSS

SEQ ID NO: 43943 - protein, 26 aa, Homo sapiens
  MAP TO AC004111.1; EXPRESSED IN BRAIN, SIGNAL = 0.84; EXPRESSED IN PLACENTA, SIGNAL =   1; EXPRESSED IN LUNG, SIGNAL = 0.96; EXPRESSED IN BONE MARROW, SIGNAL = 1.1; EXPRESSED IN ADULT LIVER, SIGNAL =   1; EXPRESSED IN FETAL LIVER, SIGNAL =   1
INSEEKCFQQFARISYEDNNFLVIEV

SEQ ID NO: 43944 - protein, 21 aa, Homo sapiens
  MAP TO AC004111.1; EXPRESSED IN BRAIN, SIGNAL = 0.84; EXPRESSED IN PLACENTA, SIGNAL =   1; EXPRESSED IN LUNG, SIGNAL = 0.96; EXPRESSED IN BONE MARROW, SIGNAL = 1.1; EXPRESSED IN ADULT LIVER, SIGNAL =   1; EXPRESSED IN FETAL LIVER, SIGNAL =   1
LTQKRNVFSNLPGFPMRIIIF

SEQ ID NO: 43945 - protein, 35 aa, Homo sapiens
  MAP TO AC005090.1; EXPRESSED IN PLACENTA, SIGNAL =   1; EXPRESSED IN ADULT LIVER, SIGNAL = 1.1; EXPRESSED IN LUNG, SIGNAL = 1.1; EXPRESSED IN FETAL LIVER, SIGNAL = 1.1; EXPRESSED IN BRAIN, SIGNAL = 0.93; EXPRESSED IN BONE MARROW, SIGNAL = 1.1
LFTRFTILSSRRMMHLFLLKSGVAMRLLWAMKPEQ

SEQ ID NO: 43946 - protein, 29 aa, Homo sapiens
  MAP TO AC005090.1; EXPRESSED IN PLACENTA, SIGNAL =   1; EXPRESSED IN ADULT LIVER, SIGNAL = 1.1; EXPRESSED IN LUNG, SIGNAL = 1.1; EXPRESSED IN FETAL LIVER, SIGNAL = 1.1; EXPRESSED IN BRAIN, SIGNAL = 0.93; EXPRESSED IN BONE MARROW, SIGNAL = 1.1
KRKRCIILLLERMVNLVNNTTKNNMKNHN

SEQ ID NO: 43947 - protein, 68 aa, Homo sapiens
  MAP TO AC004505.1; EXPRESSED IN BONE MARROW, SIGNAL = 0.55; EXPRESSED IN PLACENTA, SIGNAL = 0.62; EXPRESSED IN LUNG, SIGNAL = 0.52; EXPRESSED IN ADULT LIVER, SIGNAL = 0.53; EXPRESSED IN BRAIN, SIGNAL = 0.56
PHPLEEQLTQYVTFALGQYVTFALGHLVQLFQQILQQCHLAIGFTLTESKSSHVLYQQLALCHNCFKD

SEQ ID NO: 43948 - protein, 55 aa, Homo sapiens
  MAP TO AC004505.1; EXPRESSED IN BONE MARROW, SIGNAL = 0.55; EXPRESSED IN PLACENTA, SIGNAL = 0.62; EXPRESSED IN LUNG, SIGNAL = 0.52; EXPRESSED IN ADULT LIVER, SIGNAL = 0.53; EXPRESSED IN BRAIN, SIGNAL = 0.56; SWISSPROT HIT: P25159, EVALUE 6.20e-02
NPVRHLCPGSVRHLCPGSLSTTFPTDPPAMPPCHWLHAHREQKQPCFISTIGPLS

SEQ ID NO: 43949 - protein, 24 aa, Homo sapiens
  MAP TO AC006539.1; EXPRESSED IN LUNG, SIGNAL = 0.59; EXPRESSED IN FETAL LIVER, SIGNAL = 0.84; EXPRESSED IN BRAIN, SIGNAL = 0.6; EXPRESSED IN BONE MARROW, SIGNAL = 0.66; EXPRESSED IN ADULT LIVER, SIGNAL = 0.58; SWISSPROT HIT: O14628, EVALUE 7.00e-04
LTVSKPELISRLEQRQEPWNVKRH

SEQ ID NO: 43950 - protein, 55 aa, Homo sapiens
  MAP TO AC004127.1; EXPRESSED IN PLACENTA, SIGNAL = 1.3; EXPRESSED IN LUNG, SIGNAL = 1.3; EXPRESSED IN BONE MARROW, SIGNAL = 1.2; EXPRESSED IN FETAL LIVER, SIGNAL = 1.1; EXPRESSED IN BRAIN, SIGNAL = 1.2; EXPRESSED IN ADULT LIVER, SIGNAL =   1
YMKSRVKGLGGLIVVSKTGDWVAKWTSTSMPWAAAKDGKLHFGIDPDDTTITDLP

SEQ ID NO: 43951 - protein, 48 aa, Homo sapiens
  MAP TO AC004600.2; EXPRESSED IN PLACENTA, SIGNAL = 0.64; EXPRESSED IN FETAL LIVER, SIGNAL = 0.85; EXPRESSED IN BRAIN, SIGNAL = 0.63; EXPRESSED IN BONE MARROW, SIGNAL = 0.67; EXPRESSED IN ADULT LIVER, SIGNAL = 0.74; EXPRESSED IN LUNG, SIGNAL = 0.83; SWISSPROT HIT: Q05086, EVALUE 7.00e-22
LEMIAMENPADLKKQLYVEFEGEQGVDEGGVSKEFFQLVVEEIFNPDI

SEQ ID NO: 43952 - protein, 18 aa, Homo sapiens
  MAP TO AC004600.2; EXPRESSED IN PLACENTA, SIGNAL = 0.64; EXPRESSED IN FETAL LIVER, SIGNAL = 0.85; EXPRESSED IN BRAIN, SIGNAL = 0.63; EXPRESSED IN BONE MARROW, SIGNAL = 0.67; EXPRESSED IN ADULT LIVER, SIGNAL = 0.74; EXPRESSED IN LUNG, SIGNAL = 0.83
FPDTSNHLLFMFIFSITS

SEQ ID NO: 43953 - protein, 73 aa, Homo sapiens
  MAP TO AC003688.1; EXPRESSED IN PLACENTA, SIGNAL = 0.64; EXPRESSED IN LUNG, SIGNAL = 0.46; EXPRESSED IN ADULT LIVER, SIGNAL = 0.46; EXPRESSED IN BRAIN, SIGNAL = 0.91; SWISSPROT HIT: P14672, EVALUE 5.00e-35
ERVPAMSYVSIVAIFGFVAFFEIGPGPIPWFIVAELFSQGPRPAAMAVAGFSNWTSNFIIGMGFQYVAVGPPA

SEQ ID NO: 43954 - protein, 37 aa, Homo sapiens
  MAP TO AC006478.2; EXPRESSED IN PLACENTA, SIGNAL = 0.82; EXPRESSED IN LUNG, SIGNAL = 0.96; EXPRESSED IN FETAL LIVER, SIGNAL = 0.83; EXPRESSED IN BRAIN, SIGNAL = 0.95; EXPRESSED IN ADULT LIVER, SIGNAL = 0.89; EXPRESSED IN BONE MARROW, SIGNAL = 0.86
TIYTERFIEPATVACVGANEDAKRKELASGPESGAHF

SEQ ID NO: 43955 - protein, 28 aa, Homo sapiens
  MAP TO AC004130.1; EXPRESSED IN PLACENTA, SIGNAL = 0.98; EXPRESSED IN BRAIN, SIGNAL = 0.76; EXPRESSED IN BONE MARROW, SIGNAL = 0.85; EXPRESSED IN ADULT LIVER, SIGNAL = 0.68; EXPRESSED IN LUNG, SIGNAL = 0.85; SWISSPROT HIT: P26012, EVALUE 4.40e-01
DNRCASSNAASCARCLALGPECGWCVQE

SEQ ID NO: 43956 - protein, 46 aa, Homo sapiens
  MAP TO AC005630.1; EXPRESSED IN LUNG, SIGNAL = 1.4; EXPRESSED IN BONE MARROW, SIGNAL = 1.3; EXPRESSED IN ADULT LIVER, SIGNAL = 1.2; EXPRESSED IN PLACENTA, SIGNAL = 1.3; EXPRESSED IN FETAL LIVER, SIGNAL = 1.3; EXPRESSED IN BRAIN, SIGNAL = 1.2; SWISSPROT HIT: P02547, EVALUE 2.10e+00
IEDLDHCEMKEEPTSEKKLEDEGTEKENWAILEKIRKTERQGHLNV

SEQ ID NO: 43957 - protein, 35 aa, Homo sapiens
  MAP TO AC004626.1; EXPRESSED IN PLACENTA, SIGNAL = 0.65; EXPRESSED IN BONE MARROW, SIGNAL = 0.51; EXPRESSED IN LUNG, SIGNAL = 0.55; EXPRESSED IN BRAIN, SIGNAL = 0.61; EXPRESSED IN ADULT LIVER, SIGNAL = 0.5; SWISSPROT HIT: P27120, EVALUE 6.40e+00
REIRLPLRIKGEGMGPKIHFNFELLDIGKVFTGSA

SEQ ID NO: 43958 - protein, 58 aa, Homo sapiens
  MAP TO AC003042.1; EXPRESSED IN FETAL LIVER, SIGNAL = 0.68; EXPRESSED IN BONE MARROW, SIGNAL = 0.74; EXPRESSED IN ADULT LIVER, SIGNAL = 0.8; EXPRESSED IN PLACENTA, SIGNAL = 0.83; EXPRESSED IN LUNG, SIGNAL = 0.7; EXPRESSED IN BRAIN, SIGNAL = 0.71; SWISSPROT HIT: Q14524, EVALUE 1.00e+00
PPAALWPGSCSRRVKLGCRGSGPSCSGWPRRGTFQFCGPDGRNWTQCAATRSTRVSAW

SEQ ID NO: 43959 - protein, 120 aa, Homo sapiens
  MAP TO AC003042.1; EXPRESSED IN FETAL LIVER, SIGNAL = 0.68; EXPRESSED IN BONE MARROW, SIGNAL = 0.74; EXPRESSED IN ADULT LIVER, SIGNAL = 0.8; EXPRESSED IN PLACENTA, SIGNAL = 0.83; EXPRESSED IN LUNG, SIGNAL = 0.7; EXPRESSED IN BRAIN, SIGNAL = 0.71; SWISSPROT HIT: P39290, EVALUE 1.00e-06
LLALQAARRSVARLLLQAGKAGLQGKRAELLRMAEARDIPVLRPRRQKLDTMCRYQVHQGVCMEVSPLRPRPWREAGEASPGDDPQQLWLVLDGIQDPRNFGAVLRSAHFLGVDKVITSR

SEQ ID NO: 43960 - protein, 55 aa, Homo sapiens
  MAP TO AC005495.1; EXPRESSED IN BONE MARROW, SIGNAL = 0.88; EXPRESSED IN PLACENTA, SIGNAL = 0.92; EXPRESSED IN LUNG, SIGNAL = 0.98; EXPRESSED IN FETAL LIVER, SIGNAL =   1; EXPRESSED IN ADULT LIVER, SIGNAL =   1; EXPRESSED IN BRAIN, SIGNAL = 0.75; SWISSPROT HIT: P45295, EVALUE 5.30e-01
LLVFGIAIFPLIVENIMYAMLNEKIDWEFKNELYFLSPGQLPQEPRTSLLIINNT

SEQ ID NO: 43961 - protein, 57 aa, Homo sapiens
  MAP TO AC004775.1; EXPRESSED IN PLACENTA, SIGNAL = 0.7; EXPRESSED IN LUNG, SIGNAL = 0.72; EXPRESSED IN BRAIN, SIGNAL = 0.61; EXPRESSED IN ADULT LIVER, SIGNAL = 0.68; EXPRESSED IN BONE MARROW, SIGNAL = 0.71
FLLLSPFLCQAIINSAWTSAAVLPPLSLLYPISLLPVWLASTLCFLLTAGAFHLENR

SEQ ID NO: 43962 - protein, 43 aa, Homo sapiens
  MAP TO AC004850.2; EXPRESSED IN LUNG, SIGNAL = 0.68; EXPRESSED IN PLACENTA, SIGNAL = 0.64; EXPRESSED IN BRAIN, SIGNAL = 0.76; EXPRESSED IN BONE MARROW, SIGNAL = 0.77; EXPRESSED IN ADULT LIVER, SIGNAL = 0.65; SWISSPROT HIT: P49754, EVALUE 8.00e-21
IISKQRITNVPRDDISLRPDMYPCSLCWKDNVTLIIGWGTSVK

SEQ ID NO: 43963 - protein, 46 aa, Homo sapiens
  MAP TO AC005250.1; EXPRESSED IN PLACENTA, SIGNAL = 1.2; EXPRESSED IN ADULT LIVER, SIGNAL = 1.1; EXPRESSED IN LUNG, SIGNAL = 1.4; EXPRESSED IN FETAL LIVER, SIGNAL = 0.98; EXPRESSED IN BRAIN, SIGNAL = 1.1; EXPRESSED IN BONE MARROW, SIGNAL = 0.89; SWISSPROT HIT: P24814, EVALUE 4.20e-01
NKRVTDASFKFIDKNYPNLSHIYMADCKGITDSSLRSLSPLKQLTV

SEQ ID NO: 43964 - protein, 72 aa, Homo sapiens
  MAP TO AC004227.1; EXPRESSED IN PLACENTA, SIGNAL = 0.74; EXPRESSED IN LUNG, SIGNAL = 0.69; EXPRESSED IN BRAIN, SIGNAL = 0.75; EXPRESSED IN BONE MARROW, SIGNAL = 0.92; EXPRESSED IN FETAL LIVER, SIGNAL = 1.1; EXPRESSED IN ADULT LIVER, SIGNAL = 0.81; SWISSPROT HIT: P27619, EVALUE 8.70e-01
FKELLFRTEQEKSGVPHIPKIAEKKSNRHSIQHVPGDIEQTSQEKGSKKVKANTVSGGRNKIRKILDKTRFS

SEQ ID NO: 43965 - protein, 29 aa, Homo sapiens
  MAP TO AC004825.2; EXPRESSED IN PLACENTA, SIGNAL = 1.4; EXPRESSED IN LUNG, SIGNAL = 1.4; EXPRESSED IN FETAL LIVER, SIGNAL = 1.3; EXPRESSED IN BONE MARROW, SIGNAL = 1.5; EXPRESSED IN ADULT LIVER, SIGNAL = 1.3; EXPRESSED IN BRAIN, SIGNAL = 1.3
DTDTAKTSDDISLSLGQSSSLCKEGSEEQ

SEQ ID NO: 43966 - protein, 58 aa, Homo sapiens
  MAP TO AC005154.1; EXPRESSED IN LUNG, SIGNAL = 1.1; EXPRESSED IN FETAL LIVER, SIGNAL = 1.1; EXPRESSED IN BRAIN, SIGNAL = 1.1; EXPRESSED IN PLACENTA, SIGNAL = 1.1; EXPRESSED IN BONE MARROW, SIGNAL = 1.1; EXPRESSED IN ADULT LIVER, SIGNAL = 0.99; SWISSPROT HIT: P24247, EVALUE 7.90e+00
VTIHDAQSTYQGKVPAGTQASAIVEFGFSLPQIPDCPWSFKKDSLSLGQESGAKQEHQ

SEQ ID NO: 43967 - protein, 89 aa, Homo sapiens
  MAP TO AC004659.1; EXPRESSED IN PLACENTA, SIGNAL = 0.76; EXPRESSED IN LUNG, SIGNAL = 0.67; EXPRESSED IN BRAIN, SIGNAL = 1.1; EXPRESSED IN ADULT LIVER, SIGNAL = 0.76; EXPRESSED IN BONE MARROW, SIGNAL = 0.75; SWISSPROT HIT: P48664, EVALUE 5.00e-45
SMPPPFSVENGTSFLENVTRALGTLQEMLSFEETVPVPGSANGINALGLVVFSVAFGLVIGGMKHKGRVLRDFFDSLNEAIMRLVGIII

SEQ ID NO: 43968 - protein, 31 aa, Homo sapiens
  MAP TO AC004659.1; EXPRESSED IN PLACENTA, SIGNAL = 0.76; EXPRESSED IN LUNG, SIGNAL = 0.67; EXPRESSED IN BRAIN, SIGNAL = 1.1; EXPRESSED IN ADULT LIVER, SIGNAL = 0.76; EXPRESSED IN BONE MARROW, SIGNAL = 0.75; SWISSPROT HIT: O95644, EVALUE 6.50e+00
LHASSILSGERNQLPGKCHSGLGYPAGDAEL

SEQ ID NO: 43969 - protein, 60 aa, Homo sapiens
  MAP TO AC004796.2; EXPRESSED IN PLACENTA, SIGNAL = 1.7; EXPRESSED IN LUNG, SIGNAL = 1.4; EXPRESSED IN FETAL LIVER, SIGNAL =   1; EXPRESSED IN BRAIN, SIGNAL = 1.1; EXPRESSED IN BONE MARROW, SIGNAL = 1.1; EXPRESSED IN ADULT LIVER, SIGNAL = 1.1; SWISSPROT HIT: P54674, EVALUE 1.00e-01
LLKDALHDVQFSTRYEHVLGALLSVGGKRLREELLKQTKLVQLLGGVAEKVRQASGSARQ

SEQ ID NO: 43970 - protein, 35 aa, Homo sapiens
  MAP TO AC005206.1; EXPRESSED IN PLACENTA, SIGNAL = 0.66; EXPRESSED IN LUNG, SIGNAL = 0.78; EXPRESSED IN FETAL LIVER, SIGNAL = 0.76; EXPRESSED IN BRAIN, SIGNAL = 0.93; EXPRESSED IN BONE MARROW, SIGNAL = 0.76; EXPRESSED IN ADULT LIVER, SIGNAL = 0.75
MARHISQDPHTGPLDPHRHLLSAEAIAHKAFHLKP

SEQ ID NO: 43971 - protein, 36 aa, Homo sapiens
  MAP TO AC004662.1; EXPRESSED IN LUNG, SIGNAL = 0.92; EXPRESSED IN BRAIN, SIGNAL = 0.68; EXPRESSED IN ADULT LIVER, SIGNAL = 0.78; EXPRESSED IN PLACENTA, SIGNAL = 1.6; EXPRESSED IN FETAL LIVER, SIGNAL = 0.88; EXPRESSED IN BONE MARROW, SIGNAL = 0.77; SWISSPROT HIT: Q04322, EVALUE 2.50e-01
MPEEEAFCVFVKLMQDYRLRELFKPSMAELGLCMYQ

SEQ ID NO: 43972 - protein, 40 aa, Homo sapiens
  MAP TO AC005283.1; EXPRESSED IN ADULT LIVER, SIGNAL = 0.96; EXPRESSED IN PLACENTA, SIGNAL = 1.1; EXPRESSED IN LUNG, SIGNAL = 1.1; EXPRESSED IN BRAIN, SIGNAL = 0.89; EXPRESSED IN BONE MARROW, SIGNAL = 0.91; EXPRESSED IN FETAL LIVER, SIGNAL = 0.93; SWISSPROT HIT: Q62786, EVALUE 7.00e-03
PSDQGEFYCEAAEWIQNPDGSWYAMTRKRSEGAVVNVQPT

SEQ ID NO: 43973 - protein, 53 aa, Homo sapiens
  MAP TO AC005209.1; EXPRESSED IN PLACENTA, SIGNAL = 0.66; EXPRESSED IN LUNG, SIGNAL = 0.75; EXPRESSED IN FETAL LIVER, SIGNAL = 0.79; EXPRESSED IN BRAIN, SIGNAL = 0.68; EXPRESSED IN ADULT LIVER, SIGNAL = 0.79; EXPRESSED IN BONE MARROW, SIGNAL = 0.67; SWISSPROT HIT: Q04912, EVALUE 5.40e-01
ALWLPSFTLITYSRESSFNGADKSCGVVCGVEQEAPGDWSSGPSTTTFEPVDL

SEQ ID NO: 43974 - protein, 45 aa, Homo sapiens
  MAP TO AC003958.1; EXPRESSED IN LUNG, SIGNAL = 1.3; EXPRESSED IN FETAL LIVER, SIGNAL = 1.8; EXPRESSED IN BRAIN, SIGNAL = 1.4; EXPRESSED IN PLACENTA, SIGNAL = 1.4; EXPRESSED IN BONE MARROW, SIGNAL = 1.1; EXPRESSED IN ADULT LIVER, SIGNAL = 1.6; SWISSPROT HIT: O76015, EVALUE 6.00e-04
MAPGARNVFVSPIDVGCQPVAEANAASMCLLANVAHANRVRVGST

SEQ ID NO: 43975 - protein, 41 aa, Homo sapiens
  MAP TO AC005215.1; EXPRESSED IN PLACENTA, SIGNAL = 0.9; EXPRESSED IN LUNG, SIGNAL = 0.7; EXPRESSED IN BRAIN, SIGNAL = 1.1; EXPRESSED IN FETAL LIVER, SIGNAL = 0.93; EXPRESSED IN BONE MARROW, SIGNAL = 0.92; EXPRESSED IN ADULT LIVER, SIGNAL = 0.92; SWISSPROT HIT: P53233, EVALUE 4.80e+00
VTSTRVEHVSKEHSWRWGWEDLPCPQDVLRKKKIDCTNHRR

SEQ ID NO: 43976 - protein, 23 aa, Homo sapiens
  MAP TO AC005094.1; EXPRESSED IN BRAIN, SIGNAL = 0.76; EXPRESSED IN ADULT LIVER, SIGNAL = 0.8; EXPRESSED IN PLACENTA, SIGNAL = 0.9; EXPRESSED IN LUNG, SIGNAL = 0.96; EXPRESSED IN BONE MARROW, SIGNAL = 0.98; EXPRESSED IN FETAL LIVER, SIGNAL = 0.79
KHKNGQQVYEKVVNIINHQENAN

SEQ ID NO: 43977 - protein, 35 aa, Homo sapiens
  MAP TO AC005021.1; EXPRESSED IN LUNG, SIGNAL = 0.59; EXPRESSED IN PLACENTA, SIGNAL = 1.1; EXPRESSED IN FETAL LIVER, SIGNAL = 2.2; EXPRESSED IN BRAIN, SIGNAL = 1.3; EXPRESSED IN ADULT LIVER, SIGNAL = 1.9; SWISSPROT HIT: Q15165, EVALUE 1.00e-14
PGGILMMDLKEEKPRARELRISRGFDLASFNPHGI

SEQ ID NO: 43978 - protein, 25 aa, Homo sapiens
  MAP TO AC005021.1; EXPRESSED IN LUNG, SIGNAL = 0.59; EXPRESSED IN PLACENTA, SIGNAL = 1.1; EXPRESSED IN FETAL LIVER, SIGNAL = 2.2; EXPRESSED IN BRAIN, SIGNAL = 1.3; EXPRESSED IN ADULT LIVER, SIGNAL = 1.9
AWRNTNDGSKRRKTKGTGIKNQSWV

SEQ ID NO: 43979 - protein, 28 aa, Homo sapiens
  MAP TO AC002457.1; EXPRESSED IN PLACENTA, SIGNAL = 0.74; EXPRESSED IN BRAIN, SIGNAL = 0.73; EXPRESSED IN BONE MARROW, SIGNAL = 0.6; EXPRESSED IN ADULT LIVER, SIGNAL = 0.65; EXPRESSED IN LUNG, SIGNAL = 0.68
HIIIDNCENLQKKTIWNYNFTFLRKACS

SEQ ID NO: 43980 - protein, 22 aa, Homo sapiens
  MAP TO AC002457.1; EXPRESSED IN PLACENTA, SIGNAL = 0.74; EXPRESSED IN BRAIN, SIGNAL = 0.73; EXPRESSED IN BONE MARROW, SIGNAL = 0.6; EXPRESSED IN ADULT LIVER, SIGNAL = 0.65; EXPRESSED IN LUNG, SIGNAL = 0.68
TLSLTTVRICRKKQYGTTTSRS

SEQ ID NO: 43981 - protein, 27 aa, Homo sapiens
  MAP TO AC005243.1; EXPRESSED IN BRAIN, SIGNAL = 1.3; EXPRESSED IN PLACENTA, SIGNAL = 1.1; EXPRESSED IN LUNG, SIGNAL = 1.3; EXPRESSED IN BONE MARROW, SIGNAL = 0.87; EXPRESSED IN ADULT LIVER, SIGNAL = 1.3; EXPRESSED IN FETAL LIVER, SIGNAL =   1
LNAFSSMKTSLITPVFTDERLTGIPTE

SEQ ID NO: 43982 - protein, 90 aa, Homo sapiens
  MAP TO AC004031.1; EXPRESSED IN ADULT LIVER, SIGNAL = 0.63; EXPRESSED IN PLACENTA, SIGNAL = 0.58; EXPRESSED IN LUNG, SIGNAL = 0.74; EXPRESSED IN BRAIN, SIGNAL = 1.9; EXPRESSED IN BONE MARROW, SIGNAL = 0.64; EXPRESSED IN FETAL LIVER, SIGNAL = 0.73; SWISSPROT HIT: P35396, EVALUE 9.30e+00
NFLWTTDMAACVKELVFHLLAELLRTVHTLEQRRHPAGLSSSIALQLNPCLAMLMALQSELHKLYDEETQNWVSGGACGGSGGAAAGDQG

SEQ ID NO: 43983 - protein, 30 aa, Homo sapiens
  MAP TO AC004031.1; EXPRESSED IN ADULT LIVER, SIGNAL = 0.63; EXPRESSED IN PLACENTA, SIGNAL = 0.58; EXPRESSED IN LUNG, SIGNAL = 0.74; EXPRESSED IN BRAIN, SIGNAL = 1.9; EXPRESSED IN BONE MARROW, SIGNAL = 0.64; EXPRESSED IN FETAL LIVER, SIGNAL = 0.73
SISWQSSCARCTPWSRGGTPLACPPQSPSS

SEQ ID NO: 43984 - protein, 31 aa, Homo sapiens
  MAP TO AC005386.1; EXPRESSED IN BONE MARROW, SIGNAL = 0.68; EXPRESSED IN PLACENTA, SIGNAL = 0.79; EXPRESSED IN LUNG, SIGNAL = 0.86; EXPRESSED IN FETAL LIVER, SIGNAL = 0.76; EXPRESSED IN ADULT LIVER, SIGNAL = 0.74; EXPRESSED IN BRAIN, SIGNAL = 0.72
FLYKNENMISKQSRKKKWNCQYVEEKTLSQS

SEQ ID NO: 43985 - protein, 43 aa, Homo sapiens
  MAP TO AC005393.1; EXPRESSED IN PLACENTA, SIGNAL = 0.79; EXPRESSED IN FETAL LIVER, SIGNAL = 0.68; EXPRESSED IN BRAIN, SIGNAL = 0.61; EXPRESSED IN LUNG, SIGNAL = 0.78; EXPRESSED IN BONE MARROW, SIGNAL = 0.72; EXPRESSED IN ADULT LIVER, SIGNAL = 0.64; SWISSPROT HIT: P22544, EVALUE 2.80e+00
RAKWKRQQRQQMQTRPSLGPANQTTSVKKEETPSAITTANIRP

SEQ ID NO: 43986 - protein, 67 aa, Homo sapiens
  MAP TO AC006021.2; EXPRESSED IN LUNG, SIGNAL = 0.61; EXPRESSED IN BRAIN, SIGNAL = 0.79; EXPRESSED IN BONE MARROW, SIGNAL = 0.69; EXPRESSED IN ADULT LIVER, SIGNAL = 0.75; EXPRESSED IN PLACENTA, SIGNAL = 0.69; SWISSPROT HIT: P17442, EVALUE 3.00e+00
IPGAFLFDSEEHKVHLTIRQNKTKFLITPPRRIEHAGGHVNMRENPCRAFIVHLRLQEGATVNAPTV

SEQ ID NO: 43987 - protein, 68 aa, Homo sapiens
  MAP TO AC002486.1; EXPRESSED IN LUNG, SIGNAL = 1.1; EXPRESSED IN FETAL LIVER, SIGNAL =   1; EXPRESSED IN BRAIN, SIGNAL = 1.2; EXPRESSED IN BONE MARROW, SIGNAL = 0.95; EXPRESSED IN PLACENTA, SIGNAL = 0.96; EXPRESSED IN ADULT LIVER, SIGNAL = 1.1; SWISSPROT HIT: P21447, EVALUE 5.00e-15
IMVDENDIRALNVRHYRDHIGVVSQEPVLFGTTISNNIKYGRDDVTDEEMERAAREANAYDFIMEFPN

SEQ ID NO: 43988 - protein, 57 aa, Homo sapiens
  MAP TO AC004139.1; EXPRESSED IN LUNG, SIGNAL = 1.1; EXPRESSED IN FETAL LIVER, SIGNAL = 1.2; EXPRESSED IN BRAIN, SIGNAL =   1; EXPRESSED IN BONE MARROW, SIGNAL = 0.99; EXPRESSED IN PLACENTA, SIGNAL = 0.97; EXPRESSED IN ADULT LIVER, SIGNAL = 1.1; SWISSPROT HIT: P49695, EVALUE 5.30e-01
TRPDRTHRQHLDDVGAVPMVERVTAPKAERLLNPPPPVHDPNHSKMRLRDHSSERSE

SEQ ID NO: 43989 - protein, 26 aa, Homo sapiens
  MAP TO AC005247.1; EXPRESSED IN PLACENTA, SIGNAL = 0.72; EXPRESSED IN BRAIN, SIGNAL = 0.73; EXPRESSED IN BONE MARROW, SIGNAL = 0.7; EXPRESSED IN ADULT LIVER, SIGNAL = 0.7; EXPRESSED IN LUNG, SIGNAL = 0.84; EXPRESSED IN FETAL LIVER, SIGNAL = 0.7; SWISSPROT HIT: P49754, EVALUE 4.00e-09
FLALGTHYGKVYLLDVQGNITQKFDV

SEQ ID NO: 43990 - protein, 45 aa, Homo sapiens
  MAP TO AC004040.1; EXPRESSED IN PLACENTA, SIGNAL = 0.79; EXPRESSED IN BONE MARROW, SIGNAL = 0.88; EXPRESSED IN ADULT LIVER, SIGNAL = 0.62; EXPRESSED IN LUNG, SIGNAL = 0.66; EXPRESSED IN FETAL LIVER, SIGNAL = 0.81; EXPRESSED IN BRAIN, SIGNAL = 3.9; SWISSPROT HIT: P46616, EVALUE 3.60e+00
HGAKGCGKQLTEEPLPGSQTGALSENIIHPKNRPAIQWDCRIAMY

SEQ ID NO: 43991 - protein, 55 aa, Homo sapiens
  MAP TO AC005255.1; EXPRESSED IN PLACENTA, SIGNAL = 0.86; EXPRESSED IN BONE MARROW, SIGNAL = 0.85; EXPRESSED IN FETAL LIVER, SIGNAL = 0.95; EXPRESSED IN LUNG, SIGNAL = 0.96; EXPRESSED IN BRAIN, SIGNAL = 1.3; EXPRESSED IN ADULT LIVER, SIGNAL =   1; SWISSPROT HIT: Q60953, EVALUE 7.00e-01
PTCSSPAPDQEHLLYASLKCPSTPENQPLTPTPLPCLHRLCKEGRSTEPSPLRDI

SEQ ID NO: 43992 - protein, 38 aa, Homo sapiens
  MAP TO AC004605.1; EXPRESSED IN LUNG, SIGNAL = 0.58; EXPRESSED IN FETAL LIVER, SIGNAL = 0.72; EXPRESSED IN BRAIN, SIGNAL = 0.55; EXPRESSED IN BONE MARROW, SIGNAL = 0.67; EXPRESSED IN ADULT LIVER, SIGNAL = 0.92; EXPRESSED IN PLACENTA, SIGNAL = 0.7
SHRVIKLQNDCTKKVMRKRNRKKKGKKMRKQRRSYRCC

SEQ ID NO: 43993 - protein, 82 aa, Homo sapiens
  MAP TO AC004774.1; EXPRESSED IN LUNG, SIGNAL = 1.3; EXPRESSED IN FETAL LIVER, SIGNAL = 1.3; EXPRESSED IN BRAIN, SIGNAL = 1.7; EXPRESSED IN BONE MARROW, SIGNAL = 1.5; EXPRESSED IN PLACENTA, SIGNAL = 1.3; EXPRESSED IN ADULT LIVER, SIGNAL = 1.3; SWISSPROT HIT: P70397, EVALUE 5.00e-36
VKIWFQNKRSKFKKLLKQGSNPHESDPLQGSAALSPRSPALPPVWDVSASAKGVSMPPNSYMPGYSHWYSSPHQDTMQRPQM

SEQ ID NO: 43994 - protein, 62 aa, Homo sapiens
  MAP TO AC004638.1; EXPRESSED IN PLACENTA, SIGNAL = 0.96; EXPRESSED IN ADULT LIVER, SIGNAL = 1.1; EXPRESSED IN LUNG, SIGNAL = 1.2; EXPRESSED IN FETAL LIVER, SIGNAL = 1.1; EXPRESSED IN BRAIN, SIGNAL = 1.3; EXPRESSED IN BONE MARROW, SIGNAL = 1.2; SWISSPROT HIT: P43166, EVALUE 2.00e-31
WHKLYPIAQGDRQSPINIISSQAVYSPSLQPLELSYEACMSLSITNNGHSVQVDFNDSDDRT

SEQ ID NO: 43995 - protein, 24 aa, Homo sapiens
  MAP TO AC004051.1; EXPRESSED IN BRAIN, SIGNAL = 0.71; EXPRESSED IN PLACENTA, SIGNAL = 0.73; EXPRESSED IN LUNG, SIGNAL = 0.95; EXPRESSED IN BONE MARROW, SIGNAL = 0.86; EXPRESSED IN ADULT LIVER, SIGNAL = 0.98; EXPRESSED IN FETAL LIVER, SIGNAL =   1
VSASASPSIRSASSTATTSWCSTA

SEQ ID NO: 43996 - protein, 54 aa, Homo sapiens; identical to SEQ ID NO: 39958
  MAP TO AC004166.4; EXPRESSED IN PLACENTA, SIGNAL = 0.79; EXPRESSED IN LUNG, SIGNAL = 0.83; EXPRESSED IN BONE MARROW, SIGNAL = 1.1; EXPRESSED IN FETAL LIVER, SIGNAL = 2.1; EXPRESSED IN BRAIN, SIGNAL = 0.69; EXPRESSED IN ADULT LIVER, SIGNAL = 0.8

SEQ ID NO: 43997 - protein, 47 aa, Homo sapiens
  MAP TO AC004222.1; EXPRESSED IN PLACENTA, SIGNAL = 1.3; EXPRESSED IN FETAL LIVER, SIGNAL = 1.5; EXPRESSED IN BRAIN, SIGNAL = 1.9; EXPRESSED IN ADULT LIVER, SIGNAL =   4; EXPRESSED IN LUNG, SIGNAL = 0.91; EXPRESSED IN BONE MARROW, SIGNAL = 0.97; SWISSPROT HIT: Q04690, EVALUE 2.00e-21
VVSQRFPQNSIGAVGSAMFLRFINPAIVSPYEAGILDKKPPPRIERG

SEQ ID NO: 43998 - protein, 31 aa, Homo sapiens
  MAP TO AC002482.1; EXPRESSED IN PLACENTA, SIGNAL = 0.77; EXPRESSED IN FETAL LIVER, SIGNAL = 0.85; EXPRESSED IN BONE MARROW, SIGNAL = 0.7; EXPRESSED IN LUNG, SIGNAL = 0.65; EXPRESSED IN BRAIN, SIGNAL = 0.73; EXPRESSED IN ADULT LIVER, SIGNAL = 0.59
RWEIMNPKRRQLKVWNPMLHQESSLQRSLVT

SEQ ID NO: 43999 - protein, 39 aa, Homo sapiens
  MAP TO AC004056.1; EXPRESSED IN PLACENTA, SIGNAL =   1; EXPRESSED IN BRAIN, SIGNAL = 1.1; EXPRESSED IN BONE MARROW, SIGNAL = 0.97; EXPRESSED IN ADULT LIVER, SIGNAL = 1.2; EXPRESSED IN LUNG, SIGNAL =   1; EXPRESSED IN FETAL LIVER, SIGNAL = 1.1; SWISSPROT HIT: P53395, EVALUE 2.80e+00
LSITERYRKAQEKKMFGKCKIPHFYYCNIGKKAVINYHS

SEQ ID NO: 44000 - protein, 18 aa, Homo sapiens
  MAP TO AC005208.1; EXPRESSED IN PLACENTA, SIGNAL = 0.92; EXPRESSED IN BONE MARROW, SIGNAL = 0.82; EXPRESSED IN ADULT LIVER, SIGNAL = 0.78; EXPRESSED IN LUNG, SIGNAL = 0.7; EXPRESSED IN FETAL LIVER, SIGNAL = 0.72; EXPRESSED IN BRAIN, SIGNAL = 0.81
ALPDQYQLQRLKVVPGNE

SEQ ID NO: 44001 - protein, 41 aa, Homo sapiens
  MAP TO AC004804.1; EXPRESSED IN PLACENTA, SIGNAL = 0.96; EXPRESSED IN LUNG, SIGNAL =   1; EXPRESSED IN BRAIN, SIGNAL = 0.99; EXPRESSED IN BONE MARROW, SIGNAL =   1; EXPRESSED IN FETAL LIVER, SIGNAL = 0.89; EXPRESSED IN ADULT LIVER, SIGNAL = 0.95; SWISSPROT HIT: P98060, EVALUE 7.30e-01
QVKDQNKKVANLKHKEQVEKKKSAQMLEEARRREDNLNDSS

SEQ ID NO: 44002 - protein, 86 aa, Homo sapiens
  MAP TO AC005212.1; EXPRESSED IN PLACENTA, SIGNAL = 2.4; EXPRESSED IN LUNG, SIGNAL = 0.93; EXPRESSED IN BRAIN, SIGNAL = 1.4; EXPRESSED IN BONE MARROW, SIGNAL =   1; EXPRESSED IN FETAL LIVER, SIGNAL = 0.91; EXPRESSED IN ADULT LIVER, SIGNAL = 0.83; SWISSPROT HIT: Q99758, EVALUE 7.00e-39
YIREGFLAVQHAVDRAIMEYHADAATRQLFQRLTVTIKRFPYPPFIADPFLVAIQYQLPLLLLLSFTYTALTIARAVVQEKERRLK

SEQ ID NO: 44003 - protein, 86 aa, Homo sapiens
  MAP TO AC005212.1; EXPRESSED IN PLACENTA, SIGNAL = 2.4; EXPRESSED IN LUNG, SIGNAL = 0.93; EXPRESSED IN BRAIN, SIGNAL = 1.4; EXPRESSED IN BONE MARROW, SIGNAL =   1; EXPRESSED IN FETAL LIVER, SIGNAL = 0.91; EXPRESSED IN ADULT LIVER, SIGNAL = 0.83; SWISSPROT HIT: P17998, EVALUE 6.70e+00
GRAACCGPGHHGVPCRCRHTPAVPETDGDHQEVPVPAVHRRPLPRGHPVPAAPAAAAQLHLHRAHHCPCCRAGEGKEAEGDCPLWL

SEQ ID NO: 44004 - protein, 38 aa, Homo sapiens
  MAP TO AC005365.1; EXPRESSED IN BONE MARROW, SIGNAL = 0.92; EXPRESSED IN PLACENTA, SIGNAL = 1.1; EXPRESSED IN LUNG, SIGNAL = 0.94; EXPRESSED IN FETAL LIVER, SIGNAL = 0.89; EXPRESSED IN BRAIN, SIGNAL = 0.96; EXPRESSED IN ADULT LIVER, SIGNAL =   1; SWISSPROT HIT: O60673, EVALUE 4.00e-15
MFVLLKGATKEQSFKIGQEIAEAVTATNPKPVKLKFEK

SEQ ID NO: 44005 - protein, 40 aa, Homo sapiens
  MAP TO AC004691.1; EXPRESSED IN PLACENTA, SIGNAL = 0.78; EXPRESSED IN LUNG, SIGNAL = 0.58; EXPRESSED IN BRAIN, SIGNAL = 0.72; EXPRESSED IN BONE MARROW, SIGNAL = 1.2; EXPRESSED IN FETAL LIVER, SIGNAL = 0.7; EXPRESSED IN ADULT LIVER, SIGNAL = 0.71
DVEDELIREEVILSPVPSVLKLQTASKPIDLSVAKVSVRR

SEQ ID NO: 44006 - protein, 33 aa, Homo sapiens
  MAP TO AC005532.1; EXPRESSED IN PLACENTA, SIGNAL = 0.91; EXPRESSED IN BONE MARROW, SIGNAL = 0.88; EXPRESSED IN ADULT LIVER, SIGNAL =   1; EXPRESSED IN LUNG, SIGNAL = 0.94; EXPRESSED IN FETAL LIVER, SIGNAL =   1; EXPRESSED IN BRAIN, SIGNAL = 0.67; SWISSPROT HIT: P48357, EVALUE 8.50e+00
SCEYCCNDHECTNTFLKPCSHWVYIQKWNCWII

SEQ ID NO: 44007 - protein, 43 aa, Homo sapiens
  MAP TO AC002537.1; EXPRESSED IN PLACENTA, SIGNAL = 1.1; EXPRESSED IN BRAIN, SIGNAL = 1.3; EXPRESSED IN ADULT LIVER, SIGNAL = 0.95; EXPRESSED IN LUNG, SIGNAL = 1.3; EXPRESSED IN FETAL LIVER, SIGNAL =   1; EXPRESSED IN BONE MARROW, SIGNAL = 1.1; SWISSPROT HIT: Q93050, EVALUE 2.00e-18
ANFEKIENELKEINTNQEALKRNFLELTELKFILRKTQQFFDE

SEQ ID NO: 44008 - protein, 38 aa, Homo sapiens
  MAP TO AC004503.1; EXPRESSED IN BONE MARROW, SIGNAL = 1.5; EXPRESSED IN ADULT LIVER, SIGNAL = 1.2; EXPRESSED IN PLACENTA, SIGNAL = 1.1; EXPRESSED IN LUNG, SIGNAL = 1.1; EXPRESSED IN FETAL LIVER, SIGNAL = 1.3; EXPRESSED IN BRAIN, SIGNAL = 0.95
RAGALEVLRVLEVLEVLGVLEVLRVLEQRQGKGEPGSP

SEQ ID NO: 44009 - protein, 43 aa, Homo sapiens
  MAP TO AC003025.1; EXPRESSED IN BONE MARROW, SIGNAL = 0.67; EXPRESSED IN LUNG, SIGNAL = 0.66; EXPRESSED IN ADULT LIVER, SIGNAL = 0.77; EXPRESSED IN BRAIN, SIGNAL = 0.61
VDTILFAEFQAWRESPTLDKTCPFLERVYREDVGPCLDFTMQE

SEQ ID NO: 44010 - protein, 42 aa, Homo sapiens
  MAP TO AC003025.1; EXPRESSED IN BONE MARROW, SIGNAL = 0.67; EXPRESSED IN LUNG, SIGNAL = 0.66; EXPRESSED IN ADULT LIVER, SIGNAL = 0.77; EXPRESSED IN BRAIN, SIGNAL = 0.61; SWISSPROT HIT: Q41364, EVALUE 1.20e+00
PPPSLALPHRWTQSCLQSSRPGGNPPPWTRPAPSWKGCTERT

SEQ ID NO: 44011 - protein, 82 aa, Homo sapiens
  MAP TO AC002060.2; EXPRESSED IN BRAIN, SIGNAL = 0.55; EXPRESSED IN ADULT LIVER, SIGNAL = 0.58; EXPRESSED IN LUNG, SIGNAL = 0.66; EXPRESSED IN BONE MARROW, SIGNAL = 0.63; SWISSPROT HIT: P01709, EVALUE 2.00e-24
SWAQSALIQPPSVSGSPGQSVTISCTGTSSDVGSYDYVSWYQQHPGTVPKPMIYNVNTQPSRVPDRFSGSKSGNTASMTISG

SEQ ID NO: 44012 - protein, 25 aa, Homo sapiens
  MAP TO AC005384.1; EXPRESSED IN PLACENTA, SIGNAL = 0.77; EXPRESSED IN LUNG, SIGNAL = 0.71; EXPRESSED IN FETAL LIVER, SIGNAL = 0.73; EXPRESSED IN BRAIN, SIGNAL = 0.64; EXPRESSED IN ADULT LIVER, SIGNAL = 0.68; EXPRESSED IN BONE MARROW, SIGNAL = 0.66
YKADDPTYMSYLPKLMPRGLNEVNC

SEQ ID NO: 44013 - protein, 56 aa, Homo sapiens
  MAP TO AC002090.1; EXPRESSED IN PLACENTA, SIGNAL = 0.95; EXPRESSED IN LUNG, SIGNAL = 0.76; EXPRESSED IN ADULT LIVER, SIGNAL = 0.57; EXPRESSED IN BRAIN, SIGNAL = 0.74; EXPRESSED IN BONE MARROW, SIGNAL = 0.73; SWISSPROT HIT: O70354, EVALUE 9.00e-14
VSGTMYNTGRHVSLRLDKEHLVNISGGPMTYSHRLEEIRLHFGSEDSQGSEHLLNG

SEQ ID NO: 44014 - protein, 28 aa, Homo sapiens
  MAP TO AC002090.1; EXPRESSED IN PLACENTA, SIGNAL = 0.95; EXPRESSED IN LUNG, SIGNAL = 0.76; EXPRESSED IN ADULT LIVER, SIGNAL = 0.57; EXPRESSED IN BRAIN, SIGNAL = 0.74; EXPRESSED IN BONE MARROW, SIGNAL = 0.73
SVGPCTTLEDTYPFAWTRSTWSTYLEGP

SEQ ID NO: 44015 - protein, 64 aa, Homo sapiens
  MAP TO AC004513.1; EXPRESSED IN BRAIN, SIGNAL = 0.73; EXPRESSED IN ADULT LIVER, SIGNAL = 0.92; EXPRESSED IN BONE MARROW, SIGNAL = 0.73; EXPRESSED IN PLACENTA, SIGNAL = 0.8; EXPRESSED IN LUNG, SIGNAL = 0.73; EXPRESSED IN FETAL LIVER, SIGNAL = 0.68; SWISSPROT HIT: O19072, EVALUE 5.90e+00
TTTIAVTIIIIILHFWRLASSNGVSFHYVLYIGVDLRFSPKTHQEFLCILKMKAKLSHGTQSPK

SEQ ID NO: 44016 - protein, 36 aa, Homo sapiens
  MAP TO AC005592.1; EXPRESSED IN LUNG, SIGNAL = 0.95; EXPRESSED IN BRAIN, SIGNAL = 1.5; EXPRESSED IN BONE MARROW, SIGNAL = 0.96; EXPRESSED IN PLACENTA, SIGNAL = 0.93; EXPRESSED IN FETAL LIVER, SIGNAL = 1.1; EXPRESSED IN ADULT LIVER, SIGNAL =   1; SWISSPROT HIT: P43473, EVALUE 3.70e+00
RLPFWRSHMEKRGPGGWEATWRTEASQLTASTNCQP

SEQ ID NO: 44017 - protein, 23 aa, Homo sapiens
  MAP TO AC005592.1; EXPRESSED IN LUNG, SIGNAL = 0.95; EXPRESSED IN BRAIN, SIGNAL = 1.5; EXPRESSED IN BONE MARROW, SIGNAL = 0.96; EXPRESSED IN PLACENTA, SIGNAL = 0.93; EXPRESSED IN FETAL LIVER, SIGNAL = 1.1; EXPRESSED IN ADULT LIVER, SIGNAL =   1
QATFLEKPHGEERSWRLGGHMEN

SEQ ID NO: 44018 - protein, 50 aa, Homo sapiens
  MAP TO AC002066.1; EXPRESSED IN LUNG, SIGNAL = 1.1; EXPRESSED IN ADULT LIVER, SIGNAL = 0.94; EXPRESSED IN PLACENTA, SIGNAL = 1.1; EXPRESSED IN FETAL LIVER, SIGNAL = 0.73; EXPRESSED IN BRAIN, SIGNAL = 0.87; EXPRESSED IN BONE MARROW, SIGNAL = 1.3
KTFDDNLDDIHFTFKCKKRKFYHRGTVFSLKKILREKYLLLQITEEIRQH

SEQ ID NO: 44019 - protein, 20 aa, Homo sapiens
  MAP TO AC005342.1; EXPRESSED IN PLACENTA, SIGNAL = 0.68; EXPRESSED IN BONE MARROW, SIGNAL = 0.83; EXPRESSED IN ADULT LIVER, SIGNAL = 0.9; EXPRESSED IN LUNG, SIGNAL = 0.83; EXPRESSED IN FETAL LIVER, SIGNAL = 0.89; EXPRESSED IN BRAIN, SIGNAL = 0.99
EEEPGVGCRNLAWELAWGCP

SEQ ID NO: 44020 - protein, 49 aa, Homo sapiens
  MAP TO AC005229.1; EXPRESSED IN PLACENTA, SIGNAL = 0.84; EXPRESSED IN LUNG, SIGNAL = 0.86; EXPRESSED IN BONE MARROW, SIGNAL = 0.8; EXPRESSED IN ADULT LIVER, SIGNAL = 0.83; EXPRESSED IN FETAL LIVER, SIGNAL = 0.76; EXPRESSED IN BRAIN, SIGNAL = 0.67; SWISSPROT HIT: P01138, EVALUE 6.20e+00
DLTYGDANPVVRSEAPSLCLNPPTDPGDPCDLILDIGGEAPLSLTASRK

SEQ ID NO: 44021 - protein, 52 aa, Homo sapiens
  MAP TO AC002428.1; EXPRESSED IN PLACENTA, SIGNAL = 0.72; EXPRESSED IN LUNG, SIGNAL = 0.54; EXPRESSED IN BRAIN, SIGNAL = 1.1; EXPRESSED IN ADULT LIVER, SIGNAL = 0.44
VCRRWNEVFHISDLWRKFEFELNQSATSSFKSTHPDLIQQIIKKHFAHLQYV

SEQ ID NO: 44022 - protein, 37 aa, Homo sapiens
  MAP TO AC004738.1; EXPRESSED IN PLACENTA, SIGNAL = 0.6; EXPRESSED IN LUNG, SIGNAL = 0.51; EXPRESSED IN BRAIN, SIGNAL = 0.61; EXPRESSED IN BONE MARROW, SIGNAL = 0.57; EXPRESSED IN ADULT LIVER, SIGNAL = 0.55
RTTFIGLYHESPSFYGSVEQLRILSDNKYVYYNSHSG

SEQ ID NO: 44023 - protein, 40 aa, Homo sapiens
  MAP TO AC005599.5; EXPRESSED IN PLACENTA, SIGNAL = 0.72; EXPRESSED IN BRAIN, SIGNAL = 0.88; EXPRESSED IN ADULT LIVER, SIGNAL = 0.68; EXPRESSED IN LUNG, SIGNAL = 0.47; EXPRESSED IN FETAL LIVER, SIGNAL = 0.87; EXPRESSED IN BONE MARROW, SIGNAL = 0.81; SWISSPROT HIT: P25502, EVALUE 3.70e+00
RNFAAVLDGAKGHSDDDYDDPELRMEETWQSIKILPARPI

SEQ ID NO: 44024 - protein, 40 aa, Homo sapiens
  MAP TO AC005599.5; EXPRESSED IN PLACENTA, SIGNAL = 0.72; EXPRESSED IN BRAIN, SIGNAL = 0.88; EXPRESSED IN ADULT LIVER, SIGNAL = 0.68; EXPRESSED IN LUNG, SIGNAL = 0.47; EXPRESSED IN FETAL LIVER, SIGNAL = 0.87; EXPRESSED IN BONE MARROW, SIGNAL = 0.81
KETLLQSWMEQKATVMMTMMTLSFGWKRHGSRLKFYQPGL

SEQ ID NO: 44025 - protein, 36 aa, Homo sapiens
  MAP TO AC002112.1; EXPRESSED IN LUNG, SIGNAL = 1.1; EXPRESSED IN BRAIN, SIGNAL = 1.5; EXPRESSED IN BONE MARROW, SIGNAL = 0.77; EXPRESSED IN PLACENTA, SIGNAL = 0.9; EXPRESSED IN FETAL LIVER, SIGNAL = 0.84; EXPRESSED IN ADULT LIVER, SIGNAL = 0.91
GIQNKPRGAAARATAAARHCFSPSAPPSPRNPRSIY

SEQ ID NO: 44026 - protein, 56 aa, Homo sapiens
  MAP TO AC004744.1; EXPRESSED IN BRAIN, SIGNAL =   1; EXPRESSED IN BONE MARROW, SIGNAL = 1.2; EXPRESSED IN LUNG, SIGNAL = 0.84; EXPRESSED IN FETAL LIVER, SIGNAL = 1.5e+02; EXPRESSED IN ADULT LIVER, SIGNAL = 1.4; EXPRESSED IN PLACENTA, SIGNAL =   1; SWISSPROT HIT: Q05600, EVALUE 1.60e+00
MDVFPRQVLEVSKDGGCAKGLCSGWCSVARGDRDRFCPGLPNSGCGTALCSGRQQV

SEQ ID NO: 44027 - protein, 46 aa, Homo sapiens
  MAP TO AC004464.1; EXPRESSED IN BRAIN, SIGNAL = 1.4; EXPRESSED IN ADULT LIVER, SIGNAL = 1.5; EXPRESSED IN PLACENTA, SIGNAL = 1.4; EXPRESSED IN BONE MARROW, SIGNAL = 1.2; EXPRESSED IN LUNG, SIGNAL = 1.5; EXPRESSED IN FETAL LIVER, SIGNAL = 1.3; SWISSPROT HIT: P35172, EVALUE 6.20e+00
FLLIFKEMKIKPFSWAPRNVVGYKSVSAVPDGYISPESASTQIAHM

SEQ ID NO: 44028 - protein, 35 aa, Homo sapiens
  MAP TO AC003044.1; EXPRESSED IN PLACENTA, SIGNAL = 1.2; EXPRESSED IN LUNG, SIGNAL = 0.95; EXPRESSED IN FETAL LIVER, SIGNAL = 1.3; EXPRESSED IN BRAIN, SIGNAL = 1.2; EXPRESSED IN BONE MARROW, SIGNAL = 1.2; EXPRESSED IN ADULT LIVER, SIGNAL = 1.1
GNKNFGPSSFSLSSYSTGNFQQFVKVTTCMLLPVY

SEQ ID NO: 44029 - protein, 17 aa, Homo sapiens
  MAP TO AC003044.1; EXPRESSED IN PLACENTA, SIGNAL = 1.2; EXPRESSED IN LUNG, SIGNAL = 0.95; EXPRESSED IN FETAL LIVER, SIGNAL = 1.3; EXPRESSED IN BRAIN, SIGNAL = 1.2; EXPRESSED IN BONE MARROW, SIGNAL = 1.2; EXPRESSED IN ADULT LIVER, SIGNAL = 1.1
KISPHLTFAWFLTRILL

SEQ ID NO: 44030 - protein, 25 aa, Homo sapiens
  MAP TO AC006116.1; EXPRESSED IN LUNG, SIGNAL = 0.67; EXPRESSED IN BRAIN, SIGNAL = 0.55; EXPRESSED IN ADULT LIVER, SIGNAL = 0.9; EXPRESSED IN FETAL LIVER, SIGNAL = 0.92; EXPRESSED IN BONE MARROW, SIGNAL = 0.71
VSKMIGNAETSLTDNREIQTDISIR

SEQ ID NO: 44031 - protein, 27 aa, Homo sapiens
  MAP TO AC004104.1; EXPRESSED IN ADULT LIVER, SIGNAL = 0.74; EXPRESSED IN LUNG, SIGNAL = 0.64; EXPRESSED IN FETAL LIVER, SIGNAL = 0.78; EXPRESSED IN BRAIN, SIGNAL = 0.94; EXPRESSED IN BONE MARROW, SIGNAL = 0.92; EXPRESSED IN PLACENTA, SIGNAL = 0.84
MQAPIFTFSMLTVSNQKLTAGPTFLKL

SEQ ID NO: 44032 - protein, 26 aa, Homo sapiens
  MAP TO AC005666.1; EXPRESSED IN LUNG, SIGNAL =   1; EXPRESSED IN BRAIN, SIGNAL = 0.94; EXPRESSED IN PLACENTA, SIGNAL = 1.1; EXPRESSED IN BONE MARROW, SIGNAL =   1; EXPRESSED IN ADULT LIVER, SIGNAL = 0.94; EXPRESSED IN FETAL LIVER, SIGNAL = 1.1
QRHLEEQETDSKKEDSSMLLSKETED

SEQ ID NO: 44033 - protein, 50 aa, Homo sapiens
  MAP TO AC000002.1; EXPRESSED IN BONE MARROW, SIGNAL = 0.63; EXPRESSED IN PLACENTA, SIGNAL = 0.57; EXPRESSED IN LUNG, SIGNAL = 0.67; EXPRESSED IN ADULT LIVER, SIGNAL = 0.69; EXPRESSED IN BRAIN, SIGNAL = 0.71; SWISSPROT HIT: Q50719, EVALUE 8.10e+00
SAGSLGRVLDLPSSFALAKEAPVLTIPTALEGCHSGDWCPQQMRWVLTLV

SEQ ID NO: 44034 - protein, 20 aa, Homo sapiens
  MAP TO AC005217.1; EXPRESSED IN PLACENTA, SIGNAL = 0.64; EXPRESSED IN LUNG, SIGNAL = 0.71; EXPRESSED IN BRAIN, SIGNAL = 0.79; EXPRESSED IN BONE MARROW, SIGNAL = 0.8; EXPRESSED IN ADULT LIVER, SIGNAL = 0.71
TLILQSQNGLPLKSCPGCQH

SEQ ID NO: 44035 - protein, 60 aa, Homo sapiens
  MAP TO AC002064.1; EXPRESSED IN PLACENTA, SIGNAL = 0.74; EXPRESSED IN LUNG, SIGNAL = 0.64; EXPRESSED IN ADULT LIVER, SIGNAL = 0.61; EXPRESSED IN BRAIN, SIGNAL = 0.7; EXPRESSED IN BONE MARROW, SIGNAL = 0.65; SWISSPROT HIT: P16379, EVALUE 2.00e+00
NMCFATRRWFYLHLGCMMLINLVNADFEFQKGVLASISPGITKDIDLQCWKACSLTLIDL

SEQ ID NO: 44036 - protein, 22 aa, Homo sapiens
  MAP TO AC002064.1; EXPRESSED IN PLACENTA, SIGNAL = 0.74; EXPRESSED IN LUNG, SIGNAL = 0.64; EXPRESSED IN ADULT LIVER, SIGNAL = 0.61; EXPRESSED IN BRAIN, SIGNAL = 0.7; EXPRESSED IN BONE MARROW, SIGNAL = 0.65
YVFCYKKMVLSTFGLHDADQSG

SEQ ID NO: 44037 - protein, 60 aa, Homo sapiens
  MAP TO AC005079.1; EXPRESSED IN BONE MARROW, SIGNAL = 0.55; EXPRESSED IN ADULT LIVER, SIGNAL = 0.67; EXPRESSED IN PLACENTA, SIGNAL = 0.71; EXPRESSED IN LUNG, SIGNAL = 0.75; EXPRESSED IN BRAIN, SIGNAL = 0.67; SWISSPROT HIT: P34578, EVALUE 5.00e-05
QELIYFTFSRQGSGEHTANLSLLLQRCNEVQLWVATEILLCSQLGKRVQLVKKFIKIAAQ

SEQ ID NO: 44038 - protein, 40 aa, Homo sapiens
  MAP TO AC002458.1; EXPRESSED IN PLACENTA, SIGNAL = 1.3; EXPRESSED IN LUNG, SIGNAL = 1.5; EXPRESSED IN FETAL LIVER, SIGNAL = 1.1; EXPRESSED IN BONE MARROW, SIGNAL = 1.3; EXPRESSED IN ADULT LIVER, SIGNAL = 1.1; EXPRESSED IN BRAIN, SIGNAL = 1.3
MMTVIFNTTTSLSKKLHFTKHNQSSTGLDKWQCTIIQNLD

SEQ ID NO: 44039 - protein, 30 aa, Homo sapiens
  MAP TO AC005738.1; EXPRESSED IN PLACENTA, SIGNAL = 0.84; EXPRESSED IN LUNG, SIGNAL = 0.88; EXPRESSED IN BRAIN, SIGNAL = 0.88; EXPRESSED IN ADULT LIVER, SIGNAL = 0.93; EXPRESSED IN FETAL LIVER, SIGNAL = 0.98; EXPRESSED IN BONE MARROW, SIGNAL = 0.89
DPISPSNKDDHTAEGAGSRAMSYFHLSNSV

SEQ ID NO: 44040 - protein, 30 aa, Homo sapiens
  MAP TO AC002117.1; EXPRESSED IN PLACENTA, SIGNAL = 0.6; EXPRESSED IN LUNG, SIGNAL = 0.74; EXPRESSED IN BRAIN, SIGNAL = 0.65; EXPRESSED IN BONE MARROW, SIGNAL = 0.59; EXPRESSED IN ADULT LIVER, SIGNAL = 0.63; SWISSPROT HIT: O70310, EVALUE 6.50e+00
DTGAKKKKKKQKKKKEKGSETDSAQDQPVK

SEQ ID NO: 44041 - protein, 28 aa, Homo sapiens
  MAP TO AC002117.1; EXPRESSED IN PLACENTA, SIGNAL = 0.6; EXPRESSED IN LUNG, SIGNAL = 0.74; EXPRESSED IN BRAIN, SIGNAL = 0.65; EXPRESSED IN BONE MARROW, SIGNAL = 0.59; EXPRESSED IN ADULT LIVER, SIGNAL = 0.63
TLEPKRRKRNKKRRKKKAVRQIQPRISL

SEQ ID NO: 44042 - protein, 57 aa, Homo sapiens
  MAP TO AC005865.1; EXPRESSED IN ADULT LIVER, SIGNAL = 1.2; EXPRESSED IN PLACENTA, SIGNAL = 0.97; EXPRESSED IN LUNG, SIGNAL =   1; EXPRESSED IN BRAIN, SIGNAL = 1.2; EXPRESSED IN FETAL LIVER, SIGNAL =   1; EXPRESSED IN BONE MARROW, SIGNAL = 1.1; SWISSPROT HIT: Q40288, EVALUE 7.90e+00
LLIAQVAQDALSFSHSQAWPAHAEASFSAATDITHLRLAGSGCSVHDTRTLSWSCDG

SEQ ID NO: 44043 - protein, 47 aa, Homo sapiens
  MAP TO AC003049.1; EXPRESSED IN PLACENTA, SIGNAL = 1.2; EXPRESSED IN LUNG, SIGNAL = 0.97; EXPRESSED IN FETAL LIVER, SIGNAL = 1.1; EXPRESSED IN BRAIN, SIGNAL = 1.8; EXPRESSED IN ADULT LIVER, SIGNAL = 0.93; EXPRESSED IN BONE MARROW, SIGNAL = 1.1; SWISSPROT HIT: P21249, EVALUE 1.60e+00
ETEKLFNCYREKFQEEENVSSIPQELQKKQTVYLHHKLLQRQDGENI

SEQ ID NO: 44044 - protein, 35 aa, Homo sapiens
  MAP TO AC005188.1; EXPRESSED IN BRAIN, SIGNAL = 0.59; EXPRESSED IN ADULT LIVER, SIGNAL = 0.48; EXPRESSED IN PLACENTA, SIGNAL = 0.6; EXPRESSED IN BONE MARROW, SIGNAL = 0.61; EXPRESSED IN LUNG, SIGNAL = 0.58
FSHSNHLKNLGGDIVQKAKSYIPLTVMTLSSLLFT

SEQ ID NO: 44045 - protein, 75 aa, Homo sapiens
  MAP TO AC002067.1; EXPRESSED IN PLACENTA, SIGNAL = 0.81; EXPRESSED IN LUNG, SIGNAL = 0.76; EXPRESSED IN FETAL LIVER, SIGNAL = 0.85; EXPRESSED IN BRAIN, SIGNAL = 0.81; EXPRESSED IN BONE MARROW, SIGNAL = 1.1; EXPRESSED IN ADULT LIVER, SIGNAL = 0.81; SWISSPROT HIT: P35446, EVALUE 3.50e+00
MERSGWARQTFLLALLLGATLRARAAAGYYPRFSPFFFLCTHHGELEGDGEQGEVLISLHIAGNPTYYVPGQEYH

SEQ ID NO: 44046 - protein, 34 aa, Homo sapiens
  MAP TO AC002478.1; EXPRESSED IN LUNG, SIGNAL = 0.66; EXPRESSED IN FETAL LIVER, SIGNAL = 0.74; EXPRESSED IN PLACENTA, SIGNAL = 0.73; EXPRESSED IN BRAIN, SIGNAL = 0.88; EXPRESSED IN BONE MARROW, SIGNAL = 0.65; EXPRESSED IN ADULT LIVER, SIGNAL = 0.78
MNSDDDDDDDDIYVPTMCQTLNKLLCNNYFIHSS

SEQ ID NO: 44047 - protein, 60 aa, Homo sapiens
  MAP TO AC000111.1; EXPRESSED IN PLACENTA, SIGNAL = 0.92; EXPRESSED IN BONE MARROW, SIGNAL = 0.94; EXPRESSED IN ADULT LIVER, SIGNAL = 0.94; EXPRESSED IN LUNG, SIGNAL = 1.1; EXPRESSED IN FETAL LIVER, SIGNAL =   1; EXPRESSED IN BRAIN, SIGNAL = 1.1; SWISSPROT HIT: P13569, EVALUE 6.00e-30
MVIMGELEPSEGKIKHSGRISFCSQFSWIMPGTIKENIIFGVSYDEYRYRSVIKACQLEE

SEQ ID NO: 44048 - protein, 37 aa, Homo sapiens
  MAP TO AC005370.1; EXPRESSED IN BONE MARROW, SIGNAL = 1.2; EXPRESSED IN PLACENTA, SIGNAL = 1.1; EXPRESSED IN LUNG, SIGNAL = 1.1; EXPRESSED IN FETAL LIVER, SIGNAL = 1.1; EXPRESSED IN BRAIN, SIGNAL = 0.99; EXPRESSED IN ADULT LIVER, SIGNAL =   1
RREAPSPSFSLSVPCECLGPTRQAKGDWPLEGANPKE

SEQ ID NO: 44049 - protein, 25 aa, Homo sapiens
  MAP TO AC005370.1; EXPRESSED IN BONE MARROW, SIGNAL = 1.2; EXPRESSED IN PLACENTA, SIGNAL = 1.1; EXPRESSED IN LUNG, SIGNAL = 1.1; EXPRESSED IN FETAL LIVER, SIGNAL = 1.1; EXPRESSED IN BRAIN, SIGNAL = 0.99; EXPRESSED IN ADULT LIVER, SIGNAL =   1
LFRVGSFQGPISLCLASGPQAFTRD

SEQ ID NO: 44050 - protein, 87 aa, Homo sapiens
  MAP TO AC002483.1; EXPRESSED IN FETAL LIVER, SIGNAL = 1.1; EXPRESSED IN BRAIN, SIGNAL = 1.2; EXPRESSED IN BONE MARROW, SIGNAL = 1.2; EXPRESSED IN PLACENTA, SIGNAL = 1.2; EXPRESSED IN ADULT LIVER, SIGNAL = 0.94; EXPRESSED IN LUNG, SIGNAL = 1.1
ATLPLTHNVDLQWLVEWNAVLVNSHYDVKSPSHVWIFAQSVKDPWVLCLFSFLRQENLPKHCPTALSYAWPYAFTRLQSVMPLVDPK

SEQ ID NO: 44051 - protein, 55 aa, Homo sapiens
  MAP TO AC005483.1; EXPRESSED IN LUNG, SIGNAL = 0.81; EXPRESSED IN BRAIN, SIGNAL = 0.66; EXPRESSED IN BONE MARROW, SIGNAL = 0.67; EXPRESSED IN ADULT LIVER, SIGNAL = 0.67; EXPRESSED IN PLACENTA, SIGNAL = 0.73; EXPRESSED IN FETAL LIVER, SIGNAL = 0.68; SWISSPROT HIT: P56223, EVALUE 4.00e-20
PQTAAGEVDGVNLEEIREFAKAFKIRRLSLGLTQTQVGQALSATEGPAYSQSAIC

SEQ ID NO: 44052 - protein, 53 aa, Homo sapiens
  MAP TO AC005587.1; EXPRESSED IN LUNG, SIGNAL = 1.1; EXPRESSED IN BRAIN, SIGNAL = 0.69; EXPRESSED IN BONE MARROW, SIGNAL = 0.81; EXPRESSED IN PLACENTA, SIGNAL = 0.78; EXPRESSED IN FETAL LIVER, SIGNAL = 0.86; EXPRESSED IN ADULT LIVER, SIGNAL = 0.83; SWISSPROT HIT: P22413, EVALUE 2.00e-10
LLRIQPAPNNGTHGSLNHLLKVPFYEPSHAEEVSKFSVCGFANPLPTESLDCF

SEQ ID NO: 44053 - protein, 19 aa, Homo sapiens
  MAP TO AC000115.1; EXPRESSED IN PLACENTA, SIGNAL = 1.1; EXPRESSED IN LUNG, SIGNAL = 1.3; EXPRESSED IN BRAIN, SIGNAL = 0.88; EXPRESSED IN BONE MARROW, SIGNAL = 1.3; EXPRESSED IN FETAL LIVER, SIGNAL = 1.3; EXPRESSED IN ADULT LIVER, SIGNAL = 1.2
KWVTMVLFSLFRITNSISF

SEQ ID NO: 44054 - protein, 21 aa, Homo sapiens
  MAP TO AC000115.1; EXPRESSED IN PLACENTA, SIGNAL = 1.1; EXPRESSED IN LUNG, SIGNAL = 1.3; EXPRESSED IN BRAIN, SIGNAL = 0.88; EXPRESSED IN BONE MARROW, SIGNAL = 1.3; EXPRESSED IN FETAL LIVER, SIGNAL = 1.3; EXPRESSED IN ADULT LIVER, SIGNAL = 1.2
GLFSLGYYSLLPEADGVGNSE

SEQ ID NO: 44055 - protein, 22 aa, Homo sapiens
  MAP TO AC005754.1; EXPRESSED IN PLACENTA, SIGNAL = 0.9; EXPRESSED IN LUNG, SIGNAL =   1; EXPRESSED IN ADULT LIVER, SIGNAL = 0.96; EXPRESSED IN FETAL LIVER, SIGNAL = 1.2; EXPRESSED IN BRAIN, SIGNAL = 1.2; EXPRESSED IN BONE MARROW, SIGNAL = 1.1
QMKSSQKCSRMRQISVNMTNSM

SEQ ID NO: 44056 - protein, 63 aa, Homo sapiens
  MAP TO AC005071.2; EXPRESSED IN BRAIN, SIGNAL = 2.2; EXPRESSED IN LUNG, SIGNAL = 1.5; EXPRESSED IN FETAL LIVER, SIGNAL = 1.7; EXPRESSED IN BONE MARROW, SIGNAL = 1.6; EXPRESSED IN ADULT LIVER, SIGNAL = 1.3; EXPRESSED IN PLACENTA, SIGNAL = 1.4
LPSSEHLSVADATWLALNVVSGGGSFSSSQPIGMTKIAKSVIAPLADQNISVFMLSTYQTDFI

SEQ ID NO: 44057 - protein, 47 aa, Homo sapiens
  MAP TO AC005071.2; EXPRESSED IN BRAIN, SIGNAL = 2.2; EXPRESSED IN LUNG, SIGNAL = 1.5; EXPRESSED IN FETAL LIVER, SIGNAL = 1.7; EXPRESSED IN BONE MARROW, SIGNAL = 1.6; EXPRESSED IN ADULT LIVER, SIGNAL = 1.3; EXPRESSED IN PLACENTA, SIGNAL = 1.4
RAALLGAPECGGCHLAGPERGVRRWQLLQLPAYWHDQDRQVSHRPTG

SEQ ID NO: 44058 - protein, 103 aa, Homo sapiens
  MAP TO AC002300.1; EXPRESSED IN PLACENTA, SIGNAL = 1.1; EXPRESSED IN ADULT LIVER, SIGNAL =   1; EXPRESSED IN LUNG, SIGNAL = 1.2; EXPRESSED IN FETAL LIVER, SIGNAL = 1.1; EXPRESSED IN BRAIN, SIGNAL = 1.1; EXPRESSED IN BONE MARROW, SIGNAL = 0.91; SWISSPROT HIT: P51168, EVALUE 6.00e-60
MHVKKYLLKGLHRLQKGPGYTYKELLVWYCDNTNTHGPKRIICEGPKKKAMWFLLTLLFAALVCWQWGIFIRTYLSWEVSVSLSVGFKTMDFPAVTICNASPF

SEQ ID NO: 44059 - protein, 83 aa, Homo sapiens
  MAP TO AC003108.1; EXPRESSED IN BRAIN, SIGNAL = 0.6; EXPRESSED IN BONE MARROW, SIGNAL = 0.76; EXPRESSED IN LUNG, SIGNAL = 0.53; SWISSPROT HIT: P37965, EVALUE 2.60e-01
MWLWEDQGGLLGPFSFLLLVLLLVTRSPVNACLLTGSLFVLLRVFSFEPVPSCRALQVLKPRDRISAIAHRGGSHDAPENTLA

SEQ ID NO: 44060 - protein, 46 aa, Homo sapiens
  MAP TO AC003108.1; EXPRESSED IN BRAIN, SIGNAL = 0.6; EXPRESSED IN BONE MARROW, SIGNAL = 0.76; EXPRESSED IN LUNG, SIGNAL = 0.53
VAVGGPGRPPGPFLLPAASAAAGDAEPGQCLPPHRQPLRSTARLQL

SEQ ID NO: 44061 - protein, 35 aa, Homo sapiens
  MAP TO AC005875.1; EXPRESSED IN PLACENTA, SIGNAL =   1; EXPRESSED IN LUNG, SIGNAL = 1.2; EXPRESSED IN BRAIN, SIGNAL = 1.1; EXPRESSED IN BONE MARROW, SIGNAL = 0.94; EXPRESSED IN ADULT LIVER, SIGNAL = 1.2; EXPRESSED IN FETAL LIVER, SIGNAL = 1.3; SWISSPROT HIT: O66592, EVALUE 6.50e-02
AAKEVTVLPGRTDPDYQGEIGVLLHNGGKEEYVWN

SEQ ID NO: 44062 - protein, 44 aa, Homo sapiens
  MAP TO AC005210.2; EXPRESSED IN BRAIN, SIGNAL = 1.2; EXPRESSED IN ADULT LIVER, SIGNAL =   1; EXPRESSED IN LUNG, SIGNAL = 1.3; EXPRESSED IN FETAL LIVER, SIGNAL = 1.2; EXPRESSED IN BONE MARROW, SIGNAL = 1.2; EXPRESSED IN PLACENTA, SIGNAL = 1.7; SWISSPROT HIT: P54823, EVALUE 6.30e+00
QRGGKQPKPTEGELKNVNSEQRLTNKTPSQVKAALQAMGGAGVA

SEQ ID NO: 44063 - protein, 102 aa, Homo sapiens
  MAP TO AC002993.1; EXPRESSED IN BRAIN, SIGNAL = 0.56; EXPRESSED IN ADULT LIVER, SIGNAL = 0.41; EXPRESSED IN LUNG, SIGNAL = 0.59
LVNVPEEPIEEEEEEEEEEEEEEEEDQDMDADDRVVVEYHEELPALKQPRERSASRRSSASSSDSDEMDYDLELKMISTPSPKKSMKMTMYADEVESQLKNI

SEQ ID NO: 44064 - protein, 24 aa, Homo sapiens
  MAP TO AC002993.1; EXPRESSED IN BRAIN, SIGNAL = 0.56; EXPRESSED IN ADULT LIVER, SIGNAL = 0.41; EXPRESSED IN LUNG, SIGNAL = 0.59
KRRRRRKRKRKKKTRTWMQMTEWW

SEQ ID NO: 44065 - protein, 57 aa, Homo sapiens
  MAP TO AC006195.1; EXPRESSED IN LUNG, SIGNAL = 1.2; EXPRESSED IN ADULT LIVER, SIGNAL = 1.2; EXPRESSED IN PLACENTA, SIGNAL = 7.6; EXPRESSED IN FETAL LIVER, SIGNAL = 1.4; EXPRESSED IN BRAIN, SIGNAL = 1.1; EXPRESSED IN BONE MARROW, SIGNAL = 1.1; SWISSPROT HIT: P56092, EVALUE 4.60e+00
RYRIQSEQFEDLWLITNELILRLQEYFEKQGVKDFACSFSGSIPLQEYFELIDHHFE

SEQ ID NO: 44066 - protein, 45 aa, Homo sapiens
  MAP TO AC005722.1; EXPRESSED IN LUNG, SIGNAL =   1; EXPRESSED IN FETAL LIVER, SIGNAL = 0.8; EXPRESSED IN BRAIN, SIGNAL = 1.4; EXPRESSED IN BONE MARROW, SIGNAL = 0.72; EXPRESSED IN PLACENTA, SIGNAL = 0.94; EXPRESSED IN ADULT LIVER, SIGNAL = 0.95; SWISSPROT HIT: O75385, EVALUE 5.00e-11
VQSAALDEMFQQTEDIVYRYHKAALLLEGLSRILQDPADIENVHK

SEQ ID NO: 44067 - protein, 65 aa, Homo sapiens
  MAP TO AC002303.1; EXPRESSED IN LUNG, SIGNAL = 0.62; EXPRESSED IN BRAIN, SIGNAL = 1.5; EXPRESSED IN BONE MARROW, SIGNAL = 0.63; EXPRESSED IN ADULT LIVER, SIGNAL = 0.5; SWISSPROT HIT: Q22498, EVALUE 6.80e-01
MPRLRVVHMFLWYLIYGHPASNTVEKPSFISERRTIKQESGRAGVRPSSSGSAWEACSEAPSKGS

SEQ ID NO: 44068 - protein, 30 aa, Homo sapiens
  MAP TO AC002303.1; EXPRESSED IN LUNG, SIGNAL = 0.62; EXPRESSED IN BRAIN, SIGNAL = 1.5; EXPRESSED IN BONE MARROW, SIGNAL = 0.63; EXPRESSED IN ADULT LIVER, SIGNAL = 0.5
ASPAGGPHVSVVPHLRAPCQQHRGEAKLHQ

SEQ ID NO: 44069 - protein, 43 aa, Homo sapiens; identical to SEQ ID NO: 43379
  MAP TO AC004738.1; EXPRESSED IN LUNG, SIGNAL =   1; EXPRESSED IN BONE MARROW, SIGNAL = 0.96; EXPRESSED IN PLACENTA, SIGNAL = 1.1; EXPRESSED IN FETAL LIVER, SIGNAL = 0.96; EXPRESSED IN BRAIN, SIGNAL = 0.85; EXPRESSED IN ADULT LIVER, SIGNAL =   1

SEQ ID NO: 44070 - protein, 38 aa, Homo sapiens
  MAP TO AC005586.1; EXPRESSED IN LUNG, SIGNAL = 0.82; EXPRESSED IN FETAL LIVER, SIGNAL =   1; EXPRESSED IN BONE MARROW, SIGNAL = 0.83; EXPRESSED IN PLACENTA, SIGNAL = 0.83; EXPRESSED IN BRAIN, SIGNAL = 1.1; EXPRESSED IN ADULT LIVER, SIGNAL = 0.89; SWISSPROT HIT: P09269, EVALUE 6.40e+00
KLRKSRSCWASSGCGPSVGRRPRWPLAHVGHFAWKGSA

SEQ ID NO: 44071 - protein, 51 aa, Homo sapiens
  MAP TO AC004746.1; EXPRESSED IN PLACENTA, SIGNAL = 1.1; EXPRESSED IN LUNG, SIGNAL = 1.2; EXPRESSED IN FETAL LIVER, SIGNAL = 1.2; EXPRESSED IN ADULT LIVER, SIGNAL = 1.2; EXPRESSED IN BRAIN, SIGNAL = 1.1; EXPRESSED IN BONE MARROW, SIGNAL = 1.1
STYFNYFGEGRNAECSSSYHNNPCIFFSSIRLELWEQEGDAAMWDGGEARE

SEQ ID NO: 44072 - protein, 29 aa, Homo sapiens
  MAP TO AC004746.1; EXPRESSED IN PLACENTA, SIGNAL = 1.1; EXPRESSED IN LUNG, SIGNAL = 1.2; EXPRESSED IN FETAL LIVER, SIGNAL = 1.2; EXPRESSED IN ADULT LIVER, SIGNAL = 1.2; EXPRESSED IN BRAIN, SIGNAL = 1.1; EXPRESSED IN BONE MARROW, SIGNAL = 1.1
AHTLTILEKGEMLSVPAAIIITLAYFSVA

SEQ ID NO: 44073 - protein, 36 aa, Homo sapiens
  MAP TO AC002119.1; EXPRESSED IN BRAIN, SIGNAL = 1.7; EXPRESSED IN ADULT LIVER, SIGNAL = 0.65; EXPRESSED IN PLACENTA, SIGNAL = 1.1; EXPRESSED IN LUNG, SIGNAL = 1.1; EXPRESSED IN BONE MARROW, SIGNAL = 0.93; EXPRESSED IN FETAL LIVER, SIGNAL = 1.2
SHSDADAIAMETIPLRGALSVFVEEHSSSIITVTPK

SEQ ID NO: 44074 - protein, 30 aa, Homo sapiens
  MAP TO AC002119.1; EXPRESSED IN BRAIN, SIGNAL = 1.7; EXPRESSED IN ADULT LIVER, SIGNAL = 0.65; EXPRESSED IN PLACENTA, SIGNAL = 1.1; EXPRESSED IN LUNG, SIGNAL = 1.1; EXPRESSED IN BONE MARROW, SIGNAL = 0.93; EXPRESSED IN FETAL LIVER, SIGNAL = 1.2
EVIQMLMLLPWKPSLCEELCLSLSRSTPAP

SEQ ID NO: 44075 - protein, 57 aa, Homo sapiens
  MAP TO AC004848.1; EXPRESSED IN BONE MARROW, SIGNAL = 1.2; EXPRESSED IN PLACENTA, SIGNAL = 1.1; EXPRESSED IN LUNG, SIGNAL = 1.3; EXPRESSED IN FETAL LIVER, SIGNAL = 1.1; EXPRESSED IN ADULT LIVER, SIGNAL = 1.2; EXPRESSED IN BRAIN, SIGNAL = 1.2; SWISSPROT HIT: Q14563, EVALUE 5.00e-25
CYLAEMLESNNVITFNGLANSSSYHTFLLDEERSRLYVGAKDHIFSFDLVNIKDFQK

SEQ ID NO: 44076 - protein, 31 aa, Homo sapiens
  MAP TO AC006463.3; EXPRESSED IN PLACENTA, SIGNAL = 0.74; EXPRESSED IN LUNG, SIGNAL = 0.93; EXPRESSED IN BRAIN, SIGNAL = 0.95; EXPRESSED IN BONE MARROW, SIGNAL = 0.77; EXPRESSED IN FETAL LIVER, SIGNAL = 0.79; EXPRESSED IN ADULT LIVER, SIGNAL = 0.73
NRQTHGWPSSNVEAVLLHIKSTWQQRREQMG

SEQ ID NO: 44077 - protein, 101 aa, Homo sapiens
  MAP TO AC005317.1; EXPRESSED IN FETAL LIVER, SIGNAL = 0.69; EXPRESSED IN PLACENTA, SIGNAL = 0.75; EXPRESSED IN LUNG, SIGNAL = 0.49; EXPRESSED IN BRAIN, SIGNAL = 0.83; EXPRESSED IN BONE MARROW, SIGNAL = 0.57; EXPRESSED IN ADULT LIVER, SIGNAL = 0.8; SWISSPROT HIT: P54098, EVALUE 6.00e-35
FMTSRVNWVVQSSAVDYLHLMLVAMKWLFEEFAIDGRFCISIHDEVRYLVREEDRYRAALALQITNLLTRYAGPMASSLAMCSYVGLWVSVPWARLVSFDF

SEQ ID NO: 44078 - protein, 25 aa, Homo sapiens
  MAP TO AC005696.1; EXPRESSED IN LUNG, SIGNAL = 0.98; EXPRESSED IN FETAL LIVER, SIGNAL = 0.74; EXPRESSED IN BRAIN, SIGNAL = 0.77; EXPRESSED IN BONE MARROW, SIGNAL = 0.94; EXPRESSED IN ADULT LIVER, SIGNAL = 0.96; EXPRESSED IN PLACENTA, SIGNAL = 0.93
MCNLEVHTGANVHRATLVWQGMGLM

SEQ ID NO: 44079 - protein, 34 aa, Homo sapiens
  MAP TO AC005696.1; EXPRESSED IN LUNG, SIGNAL = 0.98; EXPRESSED IN FETAL LIVER, SIGNAL = 0.74; EXPRESSED IN BRAIN, SIGNAL = 0.77; EXPRESSED IN BONE MARROW, SIGNAL = 0.94; EXPRESSED IN ADULT LIVER, SIGNAL = 0.96; EXPRESSED IN PLACENTA, SIGNAL = 0.93; SWISSPROT HIT: O62653, EVALUE 3.80e+00
TFAPVWTSRLHMCGAQVVPCGYSTRQLPRRPSVA

SEQ ID NO: 44080 - protein, 53 aa, Homo sapiens
  MAP TO AC005358.1; EXPRESSED IN FETAL LIVER, SIGNAL = 1.3; EXPRESSED IN BONE MARROW, SIGNAL = 1.2; EXPRESSED IN ADULT LIVER, SIGNAL = 1.2; EXPRESSED IN PLACENTA, SIGNAL = 1.4; EXPRESSED IN LUNG, SIGNAL = 1.5; EXPRESSED IN BRAIN, SIGNAL = 1.2; SWISSPROT HIT: Q49640, EVALUE 2.70e+00
STAERSIPTAQMKLKRARLADDLNEKIALRPGPLELVEKNILPVDSAVKEAIK

SEQ ID NO: 44081 - protein, 25 aa, Homo sapiens
  MAP TO AC006251.3; EXPRESSED IN BONE MARROW, SIGNAL = 0.71; EXPRESSED IN ADULT LIVER, SIGNAL = 0.69; EXPRESSED IN LUNG, SIGNAL = 0.69; EXPRESSED IN FETAL LIVER, SIGNAL = 0.75; EXPRESSED IN BRAIN, SIGNAL = 0.74
LPTRIHSSTLNNSRKVEATQASIYR

SEQ ID NO: 44082 - protein, 17 aa, Homo sapiens
  MAP TO AC005681.1; EXPRESSED IN LUNG, SIGNAL = 0.92; EXPRESSED IN FETAL LIVER, SIGNAL = 0.79; EXPRESSED IN PLACENTA, SIGNAL = 0.98; EXPRESSED IN BRAIN, SIGNAL = 0.79; EXPRESSED IN BONE MARROW, SIGNAL = 0.75; EXPRESSED IN ADULT LIVER, SIGNAL = 0.82
EHVGKLGKEHECQFTKQ

SEQ ID NO: 44083 - protein, 38 aa, Homo sapiens
  MAP TO AC004677.1; EXPRESSED IN PLACENTA, SIGNAL = 0.87; EXPRESSED IN LUNG, SIGNAL = 0.74; EXPRESSED IN FETAL LIVER, SIGNAL = 0.73; EXPRESSED IN BRAIN, SIGNAL = 0.8; EXPRESSED IN ADULT LIVER, SIGNAL =   1; EXPRESSED IN BONE MARROW, SIGNAL = 0.64
LISSVDPQFLKLTKVDDQIYSEFRKNFETLRIDVLDPE

SEQ ID NO: 44084 - protein, 53 aa, Homo sapiens
  MAP TO AC005161.1; EXPRESSED IN PLACENTA, SIGNAL = 0.82; EXPRESSED IN FETAL LIVER, SIGNAL = 0.84; EXPRESSED IN BONE MARROW, SIGNAL = 0.73; EXPRESSED IN LUNG, SIGNAL = 0.97; EXPRESSED IN BRAIN, SIGNAL = 0.8; EXPRESSED IN ADULT LIVER, SIGNAL =   1; SWISSPROT HIT: P48434, EVALUE 6.10e+00
ALIKEVLENFLALFPPCEDRKKVPTINQETGPQQTLNLPAHSSCTFQPAQLWR

SEQ ID NO: 44085 - protein, 71 aa, Homo sapiens
  MAP TO AC003071.1; EXPRESSED IN PLACENTA, SIGNAL = 0.61; EXPRESSED IN LUNG, SIGNAL = 0.54; EXPRESSED IN BRAIN, SIGNAL = 0.59; EXPRESSED IN BONE MARROW, SIGNAL = 0.51; EXPRESSED IN ADULT LIVER, SIGNAL = 0.56; SWISSPROT HIT: Q99439, EVALUE 2.00e-30
QCILGLQMGTNKCASQSGMTAYGMRRHFYDPNNYILPPMDHSIISVQMRINKCVSQVAMTAPGTQRHISDT

SEQ ID NO: 44086 - protein, 42 aa, Homo sapiens
  MAP TO AC005069.2; EXPRESSED IN FETAL LIVER, SIGNAL = 0.68; EXPRESSED IN BRAIN, SIGNAL = 0.84; EXPRESSED IN ADULT LIVER, SIGNAL = 0.66; EXPRESSED IN PLACENTA, SIGNAL = 0.99; EXPRESSED IN LUNG, SIGNAL = 0.95; EXPRESSED IN BONE MARROW, SIGNAL = 0.7
KFNTIHKHEVMTKKRMKIVFSVGLEMKQSTVLGQGFKSHFIR

SEQ ID NO: 44087 - protein, 28 aa, Homo sapiens
  MAP TO AC005690.7; EXPRESSED IN PLACENTA, SIGNAL = 0.59; EXPRESSED IN LUNG, SIGNAL = 0.64; EXPRESSED IN BRAIN, SIGNAL = 0.61; EXPRESSED IN ADULT LIVER, SIGNAL = 0.64; EXPRESSED IN BONE MARROW, SIGNAL = 0.96
NDCFYLKMPRHLKGLNEVFGEEGGGWEE

SEQ ID NO: 44088 - protein, 24 aa, Homo sapiens
  MAP TO AC005690.7; EXPRESSED IN PLACENTA, SIGNAL = 0.59; EXPRESSED IN LUNG, SIGNAL = 0.64; EXPRESSED IN BRAIN, SIGNAL = 0.61; EXPRESSED IN ADULT LIVER, SIGNAL = 0.64; EXPRESSED IN BONE MARROW, SIGNAL = 0.96
PSSQPPPSSPKTSFRPLRCLGIFR

SEQ ID NO: 44089 - protein, 44 aa, Homo sapiens
  MAP TO AC004685.1; EXPRESSED IN LUNG, SIGNAL = 0.55; EXPRESSED IN PLACENTA, SIGNAL = 0.61; EXPRESSED IN BRAIN, SIGNAL = 1.1; EXPRESSED IN BONE MARROW, SIGNAL = 0.62; EXPRESSED IN ADULT LIVER, SIGNAL = 0.44; SWISSPROT HIT: P05844, EVALUE 4.80e+00
DLVDWRKPLLWQVGHLGEKYDEWVHQPVTRPIRLFHSDLIEGLS

SEQ ID NO: 44090 - protein, 24 aa, Homo sapiens
  MAP TO AC004685.1; EXPRESSED IN LUNG, SIGNAL = 0.55; EXPRESSED IN PLACENTA, SIGNAL = 0.61; EXPRESSED IN BRAIN, SIGNAL = 1.1; EXPRESSED IN BONE MARROW, SIGNAL = 0.62; EXPRESSED IN ADULT LIVER, SIGNAL = 0.44
SLAGPGGLAKASPVAGGPLGREVR

SEQ ID NO: 44091 - protein, 32 aa, Homo sapiens
  MAP TO AC005592.1; EXPRESSED IN BONE MARROW, SIGNAL = 1.2; EXPRESSED IN PLACENTA, SIGNAL = 1.1; EXPRESSED IN LUNG, SIGNAL = 1.2; EXPRESSED IN FETAL LIVER, SIGNAL = 1.2; EXPRESSED IN BRAIN, SIGNAL = 1.4; EXPRESSED IN ADULT LIVER, SIGNAL = 1.1
MYQRGVIGSEQRKTVYIVIVKTSSLPEVTNSN

SEQ ID NO: 44092 - protein, 24 aa, Homo sapiens
  MAP TO AC005599.5; EXPRESSED IN LUNG, SIGNAL = 1.3; EXPRESSED IN BRAIN, SIGNAL = 1.2; EXPRESSED IN BONE MARROW, SIGNAL = 0.77; EXPRESSED IN ADULT LIVER, SIGNAL = 0.76; EXPRESSED IN PLACENTA, SIGNAL =   1; EXPRESSED IN FETAL LIVER, SIGNAL = 0.9
TTLVCTCSRHCVRHQTSHLGARGS

SEQ ID NO: 44093 - protein, 34 aa, Homo sapiens
  MAP TO AC004749.1; EXPRESSED IN ADULT LIVER, SIGNAL = 0.72; EXPRESSED IN PLACENTA, SIGNAL = 0.82; EXPRESSED IN LUNG, SIGNAL = 0.73; EXPRESSED IN BRAIN, SIGNAL = 0.97; EXPRESSED IN FETAL LIVER, SIGNAL = 0.71; EXPRESSED IN BONE MARROW, SIGNAL =   1; SWISSPROT HIT: P70315, EVALUE 4.90e+00
KRRRRIDRSMIGEPTNFVHTAHVGSGDLFSGMNS

SEQ ID NO: 44094 - protein, 63 aa, Homo sapiens
  MAP TO AC004849.1; EXPRESSED IN LUNG, SIGNAL = 0.68; EXPRESSED IN FETAL LIVER, SIGNAL = 0.72; EXPRESSED IN BRAIN, SIGNAL = 0.75; EXPRESSED IN BONE MARROW, SIGNAL =   1; EXPRESSED IN PLACENTA, SIGNAL = 0.74; EXPRESSED IN ADULT LIVER, SIGNAL = 0.77
STEEEAIQGMLSMAGLHYSTCLQRQIQSTDCSGERNSLQDPSSCHGSNHEVRQLYRYDKPVEC

SEQ ID NO: 44095 - protein, 34 aa, Homo sapiens
  MAP TO AC003086.1; EXPRESSED IN PLACENTA, SIGNAL = 0.76; EXPRESSED IN ADULT LIVER, SIGNAL = 0.76; EXPRESSED IN LUNG, SIGNAL = 0.75; EXPRESSED IN FETAL LIVER, SIGNAL = 0.68; EXPRESSED IN BRAIN, SIGNAL = 1.2; EXPRESSED IN BONE MARROW, SIGNAL = 0.73
DLSESPENEAVVQKRKAAGVQQRSTPEKPIALRK

SEQ ID NO: 44096 - protein, 85 aa, Homo sapiens
  MAP TO AC004526.1; EXPRESSED IN LUNG, SIGNAL = 1.2; EXPRESSED IN FETAL LIVER, SIGNAL =   1; EXPRESSED IN BONE MARROW, SIGNAL = 1.8; EXPRESSED IN PLACENTA, SIGNAL = 1.1; EXPRESSED IN BRAIN, SIGNAL = 1.2; EXPRESSED IN ADULT LIVER, SIGNAL = 0.88; SWISSPROT HIT: P21359, EVALUE 3.00e-45
IDKTCLSPTPTLEQHLMWDDIAILARYMLMLSFNNSLDVAAHLPYLFHVVTFLVATGPLSLRASTHGLVINIIHSLCTCSQLHFS

SEQ ID NO: 44097 - protein, 58 aa, Homo sapiens
  MAP TO AC004912.1; EXPRESSED IN PLACENTA, SIGNAL = 0.73; EXPRESSED IN LUNG, SIGNAL = 0.98; EXPRESSED IN BRAIN, SIGNAL = 0.76; EXPRESSED IN ADULT LIVER, SIGNAL = 0.8; EXPRESSED IN FETAL LIVER, SIGNAL = 0.7; EXPRESSED IN BONE MARROW, SIGNAL = 0.83; SWISSPROT HIT: Q12765, EVALUE 4.00e-30
SQLSLTTKMDAEHPELRSYAQSQGWWTGEGEFNFSEVFSPVEDHLDCGAGKDSLEKQE

SEQ ID NO: 44098 - protein, 33 aa, Homo sapiens
  MAP TO AC003664.1; EXPRESSED IN BRAIN, SIGNAL = 1.2; EXPRESSED IN ADULT LIVER, SIGNAL = 0.89; EXPRESSED IN LUNG, SIGNAL = 1.1; EXPRESSED IN BONE MARROW, SIGNAL =   1; EXPRESSED IN PLACENTA, SIGNAL = 1.2; EXPRESSED IN FETAL LIVER, SIGNAL =   1
EIDGAINQRNVGAGVRDLPLCCSQRSPIITESQ

SEQ ID NO: 44099 - protein, 63 aa, Homo sapiens
  MAP TO AC006355.3; EXPRESSED IN LUNG, SIGNAL = 0.49; EXPRESSED IN BRAIN, SIGNAL = 0.56; EXPRESSED IN BONE MARROW, SIGNAL = 0.52; EXPRESSED IN ADULT LIVER, SIGNAL = 0.57; SWISSPROT HIT: P55487, EVALUE 1.20e+00
GLNIKHHFPDCLSDSPIPNYSASHQQGTFSTEPLSSEADKRLRLKESKTKTSCCRQGRGREQT

SEQ ID NO: 44100 - protein, 35 aa, Homo sapiens
  MAP TO AC005531.1; EXPRESSED IN ADULT LIVER, SIGNAL = 0.85; EXPRESSED IN PLACENTA, SIGNAL =   1; EXPRESSED IN LUNG, SIGNAL = 0.97; EXPRESSED IN FETAL LIVER, SIGNAL = 0.74; EXPRESSED IN BRAIN, SIGNAL = 0.81; EXPRESSED IN BONE MARROW, SIGNAL = 0.89
SGPRSPDPSSKYSLAPVNQNARPGMWHCCGSIFPE

SEQ ID NO: 44101 - protein, 73 aa, Homo sapiens
  MAP TO AC005531.1; EXPRESSED IN ADULT LIVER, SIGNAL = 0.85; EXPRESSED IN PLACENTA, SIGNAL =   1; EXPRESSED IN LUNG, SIGNAL = 0.97; EXPRESSED IN FETAL LIVER, SIGNAL = 0.74; EXPRESSED IN BRAIN, SIGNAL = 0.81; EXPRESSED IN BONE MARROW, SIGNAL = 0.89; SWISSPROT HIT: P73098, EVALUE 8.70e-01
SSFDIRASAPVGLGAGGRGAYSEKDTQAARSSRCALSEEGDLTFRKNRATAVPHARASILVDRGQAVLAARVW

SEQ ID NO: 44102 - protein, 17 aa, Homo sapiens
  MAP TO AC005220.1; EXPRESSED IN LUNG, SIGNAL = 0.6; EXPRESSED IN BONE MARROW, SIGNAL = 0.56; EXPRESSED IN BRAIN, SIGNAL = 0.57; EXPRESSED IN ADULT LIVER, SIGNAL = 0.5
GLVTLGRCRTWGLGGLS

SEQ ID NO: 44103 - protein, 111 aa, Homo sapiens
  MAP TO AC006207.5; EXPRESSED IN BRAIN, SIGNAL = 0.99; EXPRESSED IN BONE MARROW, SIGNAL =   1; EXPRESSED IN PLACENTA, SIGNAL = 0.73; EXPRESSED IN LUNG, SIGNAL = 0.82; EXPRESSED IN FETAL LIVER, SIGNAL = 0.94; EXPRESSED IN ADULT LIVER, SIGNAL = 0.91; SWISSPROT HIT: Q01804, EVALUE 2.00e-30
NNFPEKVLLCFSNGNHYDIVYPVKYKESSAMCQSLLYELLYEKVFKTDVSKIVMELDTLEVADEDNSEISDSEDDSCKSKTAVAAADVNGFKPLSGNEQLKNNGNSTSLPL

SEQ ID NO: 44104 - protein, 21 aa, Homo sapiens
  MAP TO AC005389.1; EXPRESSED IN LUNG, SIGNAL = 0.95; EXPRESSED IN FETAL LIVER, SIGNAL = 0.75; EXPRESSED IN BONE MARROW, SIGNAL = 0.82; EXPRESSED IN PLACENTA, SIGNAL = 0.83; EXPRESSED IN BRAIN, SIGNAL = 0.9; EXPRESSED IN ADULT LIVER, SIGNAL = 0.78
PDCLHHMHFHGHLPHCRLHLC

SEQ ID NO: 44105 - protein, 59 aa, Homo sapiens
  MAP TO AC005389.1; EXPRESSED IN LUNG, SIGNAL = 0.95; EXPRESSED IN FETAL LIVER, SIGNAL = 0.75; EXPRESSED IN BONE MARROW, SIGNAL = 0.82; EXPRESSED IN PLACENTA, SIGNAL = 0.83; EXPRESSED IN BRAIN, SIGNAL = 0.9; EXPRESSED IN ADULT LIVER, SIGNAL = 0.78
KKSKGEEKGGEQKNQEETKAKERQQTTKMKTTMRKMAMEMHMMKTIRLAKKTAKKQRQW

SEQ ID NO: 44106 - protein, 81 aa, Homo sapiens
  MAP TO AC000382.1; EXPRESSED IN PLACENTA, SIGNAL = 0.92; EXPRESSED IN BRAIN, SIGNAL = 0.9; EXPRESSED IN BONE MARROW, SIGNAL = 0.84; EXPRESSED IN ADULT LIVER, SIGNAL = 0.84; EXPRESSED IN LUNG, SIGNAL = 0.78; EXPRESSED IN FETAL LIVER, SIGNAL = 0.84; SWISSPROT HIT: P09490, EVALUE 7.50e-01
PQLTPPNTPKLVSEVEELYKSITALQEKLLQAEQSLCNLEDIHMSLEKDITAMTNSLFIDRQKCMAHRTCYPTILQLAGYQ

SEQ ID NO: 44107 - protein, 33 aa, Homo sapiens
  MAP TO AC005409.1; EXPRESSED IN LUNG, SIGNAL = 0.95; EXPRESSED IN FETAL LIVER, SIGNAL = 0.94; EXPRESSED IN BRAIN, SIGNAL = 1.9; EXPRESSED IN BONE MARROW, SIGNAL = 0.98; EXPRESSED IN ADULT LIVER, SIGNAL = 0.77; EXPRESSED IN PLACENTA, SIGNAL = 0.82; SWISSPROT HIT: Q63520, EVALUE 2.00e-08
QKLNQEYSQQFLTLFQQWDLDMQKAEEQEEKIL

SEQ ID NO: 44108 - protein, 113 aa, Homo sapiens
  MAP TO AC006254.10; EXPRESSED IN PLACENTA, SIGNAL = 0.85; EXPRESSED IN LUNG, SIGNAL = 0.91; EXPRESSED IN BRAIN, SIGNAL = 0.83; EXPRESSED IN BONE MARROW, SIGNAL = 0.92; EXPRESSED IN FETAL LIVER, SIGNAL = 0.89; EXPRESSED IN ADULT LIVER, SIGNAL = 0.91; SWISSPROT HIT: P51957, EVALUE 8.00e-61
LKAHTCKQDLSNTTELATISSVNIDILPAKGRDSVSDGFVQENQPRYLDASNELGGICSISQVEEEMLQDNTKSSAQPENLIPMWSSDIVTGEKNEPVKPLQPLIKEQKPKDQ

SEQ ID NO: 44109 - protein, 78 aa, Homo sapiens
  MAP TO AC005324.1; EXPRESSED IN LUNG, SIGNAL = 0.73; EXPRESSED IN FETAL LIVER, SIGNAL = 0.7; EXPRESSED IN BRAIN, SIGNAL = 0.75; EXPRESSED IN BONE MARROW, SIGNAL = 0.88; EXPRESSED IN ADULT LIVER, SIGNAL = 0.76; EXPRESSED IN PLACENTA, SIGNAL = 0.85; SWISSPROT HIT: P12754, EVALUE 9.80e-02
VSVSEVKAVAEMQFGELLAAVRKAQANVMLFLEEKEQAALSQANGIKAHLEYRSAEMEKSKQELERMAAISNTVQFLE

SEQ ID NO: 44110 - protein, 45 aa, Homo sapiens
  MAP TO AC004100.1; EXPRESSED IN FETAL LIVER, SIGNAL = 0.76; EXPRESSED IN BRAIN, SIGNAL = 0.92; EXPRESSED IN BONE MARROW, SIGNAL = 0.66; EXPRESSED IN ADULT LIVER, SIGNAL = 0.6; EXPRESSED IN PLACENTA, SIGNAL = 0.66; EXPRESSED IN LUNG, SIGNAL = 0.67; SWISSPROT HIT: Q9UL62, EVALUE 3.60e+00
VPVAPSLQLRQPKTSNVPWGQHCPLVENHWSGGRESQVEGTARAE

SEQ ID NO: 44111 - protein, 47 aa, Homo sapiens
  MAP TO AC004582.1; EXPRESSED IN PLACENTA, SIGNAL =   1; EXPRESSED IN BONE MARROW, SIGNAL = 0.81; EXPRESSED IN ADULT LIVER, SIGNAL =   1; EXPRESSED IN LUNG, SIGNAL =   1; EXPRESSED IN FETAL LIVER, SIGNAL = 0.85; EXPRESSED IN BRAIN, SIGNAL = 0.62
STHCSAAGSFLEDAVNNGNAPKRKRFRTRKLDESQVLLFLALRPKGQ

SEQ ID NO: 44112 - protein, 68 aa, Homo sapiens
  MAP TO AC004259.1; EXPRESSED IN LUNG, SIGNAL = 1.3; EXPRESSED IN FETAL LIVER, SIGNAL = 1.4; EXPRESSED IN BONE MARROW, SIGNAL = 1.2; EXPRESSED IN PLACENTA, SIGNAL = 1.5; EXPRESSED IN BRAIN, SIGNAL = 1.1; EXPRESSED IN ADULT LIVER, SIGNAL = 1.2; SWISSPROT HIT: Q05086, EVALUE 3.00e-36
MFTYDESTKLFWFNPSSFETEGQFTLIGIVLGLAIYNNCILDVHFPMVVYRKLMGKKGTFRDLGDSHP

SEQ ID NO: 44113 - protein, 89 aa, Homo sapiens
  MAP TO AC005383.1; EXPRESSED IN ADULT LIVER, SIGNAL = 1.1; EXPRESSED IN PLACENTA, SIGNAL =   1; EXPRESSED IN LUNG, SIGNAL = 1.3; EXPRESSED IN BRAIN, SIGNAL = 1.2; EXPRESSED IN FETAL LIVER, SIGNAL = 1.2; EXPRESSED IN BONE MARROW, SIGNAL = 0.96
MLLQDCPLPHGALTELVFLAEDGEAVSSSYESYDEEDGSKGKSAPYQWPSPEAGIELMRDARICAFLWRKKWLGQWAKQLCVIKDNRLL

SEQ ID NO: 44114 - protein, 42 aa, Homo sapiens
  MAP TO AC005383.1; EXPRESSED IN ADULT LIVER, SIGNAL = 1.1; EXPRESSED IN PLACENTA, SIGNAL =   1; EXPRESSED IN LUNG, SIGNAL = 1.3; EXPRESSED IN BRAIN, SIGNAL = 1.2; EXPRESSED IN FETAL LIVER, SIGNAL = 1.2; EXPRESSED IN BONE MARROW, SIGNAL = 0.96
LLPAALPSDAASGLSPAPWGPDRAGLPCRGRRGCEQLLRVLR

SEQ ID NO: 44115 - protein, 48 aa, Homo sapiens
  MAP TO AC005536.2; EXPRESSED IN LUNG, SIGNAL = 0.8; EXPRESSED IN FETAL LIVER, SIGNAL = 0.75; EXPRESSED IN BONE MARROW, SIGNAL = 0.81; EXPRESSED IN BRAIN, SIGNAL = 0.77; EXPRESSED IN ADULT LIVER, SIGNAL = 0.7; EXPRESSED IN PLACENTA, SIGNAL = 0.63; SWISSPROT HIT: Q58890, EVALUE 3.60e+00
LERYSRKSNKISNDKEFTVSKEKKGNKQMDRSITCHVGISTKKESKNK

SEQ ID NO: 44116 - protein, 26 aa, Homo sapiens
  MAP TO AC005536.2; EXPRESSED IN LUNG, SIGNAL = 0.8; EXPRESSED IN FETAL LIVER, SIGNAL = 0.75; EXPRESSED IN BONE MARROW, SIGNAL = 0.81; EXPRESSED IN BRAIN, SIGNAL = 0.77; EXPRESSED IN ADULT LIVER, SIGNAL = 0.7; EXPRESSED IN PLACENTA, SIGNAL = 0.63
NPTRFPMTRSLLFQRRRKAINKWTGL

SEQ ID NO: 44117 - protein, 33 aa, Homo sapiens
  MAP TO AC004686.1; EXPRESSED IN PLACENTA, SIGNAL = 0.93; EXPRESSED IN BRAIN, SIGNAL =   1; EXPRESSED IN ADULT LIVER, SIGNAL =   1; EXPRESSED IN LUNG, SIGNAL = 1.1; EXPRESSED IN FETAL LIVER, SIGNAL =   1; EXPRESSED IN BONE MARROW, SIGNAL = 1.1; SWISSPROT HIT: P21425, EVALUE 7.00e-14
GMEHCEKFEISETSVNRGPEKIRPECFELLRVL

SEQ ID NO: 44118 - protein, 36 aa, Homo sapiens
  MAP TO AC006013.2; EXPRESSED IN LUNG, SIGNAL = 0.83; EXPRESSED IN FETAL LIVER, SIGNAL = 0.77; EXPRESSED IN BRAIN, SIGNAL = 0.72; EXPRESSED IN BONE MARROW, SIGNAL = 0.86; EXPRESSED IN ADULT LIVER, SIGNAL = 0.61
CHHSVRVQRPLRTGGVDGVNASLRTGEDEMRRSNLR

SEQ ID NO: 44119 - protein, 61 aa, Homo sapiens
  MAP TO AC004467.1; EXPRESSED IN BRAIN, SIGNAL = 0.9; EXPRESSED IN LUNG, SIGNAL = 1.2; EXPRESSED IN BONE MARROW, SIGNAL = 1.1; EXPRESSED IN ADULT LIVER, SIGNAL = 0.86; EXPRESSED IN PLACENTA, SIGNAL = 1.8; EXPRESSED IN FETAL LIVER, SIGNAL = 2.4; SWISSPROT HIT: O43182, EVALUE 1.00e-29
VDSITDLDDNQSRLLEALQLSLPAEAQSKKEKARDKKLSLNPIYRQVPRLVDSCCQHLEKH

SEQ ID NO: 44120 - protein, 89 aa, Homo sapiens
  MAP TO AC003065.1; EXPRESSED IN LUNG, SIGNAL = 0.53; EXPRESSED IN BRAIN, SIGNAL = 0.66; EXPRESSED IN BONE MARROW, SIGNAL = 0.59; EXPRESSED IN ADULT LIVER, SIGNAL = 0.52
IPGRGKGEGGETGGGGGEEEEEEEEEKEKEEEEKEEEEKEEEEKEEEKEEEEKEEEEKEEEEKEEEEEKEEEVKEEEEEEEEEKKKKKE

SEQ ID NO: 44121 - protein, 32 aa, Homo sapiens
  MAP TO AC002079.1; EXPRESSED IN LUNG, SIGNAL = 0.95; EXPRESSED IN PLACENTA, SIGNAL = 0.76; EXPRESSED IN FETAL LIVER, SIGNAL = 0.8; EXPRESSED IN BRAIN, SIGNAL = 0.75; EXPRESSED IN BONE MARROW, SIGNAL = 0.85; EXPRESSED IN ADULT LIVER, SIGNAL = 0.82; SWISSPROT HIT: P25994, EVALUE 8.50e+00
HLALKEVSGCKLSPWHQCSSGYREVKVLISVL

SEQ ID NO: 44122 - protein, 33 aa, Homo sapiens
  MAP TO AC005325.1; EXPRESSED IN PLACENTA, SIGNAL = 1.3; EXPRESSED IN LUNG, SIGNAL = 1.1; EXPRESSED IN FETAL LIVER, SIGNAL = 1.3; EXPRESSED IN BONE MARROW, SIGNAL = 1.2; EXPRESSED IN ADULT LIVER, SIGNAL =   1; EXPRESSED IN BRAIN, SIGNAL = 1.3
DAFVHDDNDDHDYNEDHDLDEIVKIYHQSPVGM

SEQ ID NO: 44123 - protein, 38 aa, Homo sapiens
  MAP TO AB013139.1; EXPRESSED IN BRAIN, SIGNAL = 0.68; EXPRESSED IN BONE MARROW, SIGNAL = 0.7; EXPRESSED IN PLACENTA, SIGNAL = 0.6; EXPRESSED IN LUNG, SIGNAL = 0.67; EXPRESSED IN ADULT LIVER, SIGNAL =   1; SWISSPROT HIT: P04392, EVALUE 2.80e+00
VTYPGAGKLPHIIGGSDLIAHHARKNTELEEWLRQEME

SEQ ID NO: 44124 - protein, 17 aa, Homo sapiens
  MAP TO AB013139.1; EXPRESSED IN BRAIN, SIGNAL = 0.68; EXPRESSED IN BONE MARROW, SIGNAL = 0.7; EXPRESSED IN PLACENTA, SIGNAL = 0.6; EXPRESSED IN LUNG, SIGNAL = 0.67; EXPRESSED IN ADULT LIVER, SIGNAL =   1
SHILEQENFHTSLEDQI

SEQ ID NO: 44125 - protein, 54 aa, Homo sapiens
  MAP TO AC005495.1; EXPRESSED IN PLACENTA, SIGNAL = 0.75; EXPRESSED IN LUNG, SIGNAL = 0.74; EXPRESSED IN FETAL LIVER, SIGNAL = 0.93; EXPRESSED IN BONE MARROW, SIGNAL = 0.64; EXPRESSED IN BRAIN, SIGNAL = 0.81; EXPRESSED IN ADULT LIVER, SIGNAL = 0.97; SWISSPROT HIT: P34358, EVALUE 9.00e-03
VFLGDYSSETSEDDDSLKCMGYCPQINPLWPDTTLQEHFEIYGAVKGMSASDMK

SEQ ID NO: 44126 - protein, 18 aa, Homo sapiens
  MAP TO AC006239.5; EXPRESSED IN ADULT LIVER, SIGNAL = 0.57; EXPRESSED IN LUNG, SIGNAL = 0.67; EXPRESSED IN BRAIN, SIGNAL = 0.55; EXPRESSED IN BONE MARROW, SIGNAL = 0.55
NKTCDHESHTLCPLCGYE

SEQ ID NO: 44127 - protein, 48 aa, Homo sapiens
  MAP TO AC002299.1; EXPRESSED IN LUNG, SIGNAL = 0.66; EXPRESSED IN FETAL LIVER, SIGNAL = 0.71; EXPRESSED IN BONE MARROW, SIGNAL = 0.84; EXPRESSED IN PLACENTA, SIGNAL = 0.65; EXPRESSED IN BRAIN, SIGNAL = 0.57; EXPRESSED IN ADULT LIVER, SIGNAL = 0.67; SWISSPROT HIT: P04411, EVALUE 1.00e-23
KNLVPMDPNGLSDPYVKLKLIPDPKSESKQKTKTIKCSLNPEWNETFR

SEQ ID NO: 44128 - protein, 38 aa, Homo sapiens
  MAP TO AC005342.1; EXPRESSED IN LUNG, SIGNAL = 0.84; EXPRESSED IN BRAIN, SIGNAL = 1.1; EXPRESSED IN BONE MARROW, SIGNAL = 1.2; EXPRESSED IN PLACENTA, SIGNAL = 0.73; EXPRESSED IN FETAL LIVER, SIGNAL = 0.94; EXPRESSED IN ADULT LIVER, SIGNAL = 0.76; SWISSPROT HIT: P34374, EVALUE 2.50e-01
FQEAKQGSLCNQAIMLISDGAVEDYEPVFEKYNWPDCK

SEQ ID NO: 44129 - protein, 36 aa, Homo sapiens
  MAP TO AC005342.1; EXPRESSED IN LUNG, SIGNAL = 0.84; EXPRESSED IN BRAIN, SIGNAL = 1.1; EXPRESSED IN BONE MARROW, SIGNAL = 1.2; EXPRESSED IN PLACENTA, SIGNAL = 0.73; EXPRESSED IN FETAL LIVER, SIGNAL = 0.94; EXPRESSED IN ADULT LIVER, SIGNAL = 0.76
WRGVGLACGHGHSSSLHSSKRPSKEASATRPSCSSA

SEQ ID NO: 44130 - protein, 32 aa, Homo sapiens
  MAP TO AC003669.1; EXPRESSED IN PLACENTA, SIGNAL = 0.93; EXPRESSED IN LUNG, SIGNAL =   1; EXPRESSED IN BRAIN, SIGNAL = 1.1; EXPRESSED IN BONE MARROW, SIGNAL = 0.89; EXPRESSED IN ADULT LIVER, SIGNAL = 0.81; EXPRESSED IN FETAL LIVER, SIGNAL = 0.87; SWISSPROT HIT: P51813, EVALUE 6.00e-13
SQQKKKMSPNNYKERLFVLTKTNLSYYEYDKM

SEQ ID NO: 44131 - protein, 114 aa, Homo sapiens
  MAP TO AC004687.1; EXPRESSED IN BONE MARROW, SIGNAL =   1; EXPRESSED IN FETAL LIVER, SIGNAL = 0.99; EXPRESSED IN BRAIN, SIGNAL = 0.94; EXPRESSED IN ADULT LIVER, SIGNAL =   1; EXPRESSED IN PLACENTA, SIGNAL = 0.83; EXPRESSED IN LUNG, SIGNAL = 0.99; SWISSPROT HIT: P80025, EVALUE 1.00e-52
CPLSLQFPPNDPKAGTQGKCMPFFRAGFVCPTPPYKSLAREQINALTSFLDASFVYSSEPSLASRLRNLSSPLGLMAVNQEVSDHGLPYLPYDSKKPSPCEFINTTARVPCFLA

SEQ ID NO: 44132 - protein, 106 aa, Homo sapiens
  MAP TO AC005703.1; EXPRESSED IN BRAIN, SIGNAL = 0.91; EXPRESSED IN BONE MARROW, SIGNAL = 0.7; EXPRESSED IN PLACENTA, SIGNAL = 0.76; EXPRESSED IN LUNG, SIGNAL = 0.7; EXPRESSED IN FETAL LIVER, SIGNAL = 0.72; EXPRESSED IN ADULT LIVER, SIGNAL = 0.77; SWISSPROT HIT: P13535, EVALUE 1.90e-01
TTFFTRYTPDDWYRSNLTNYQESNTSRHNSEKLRVDTSRLIQDKYQQTRKTQADTTQNLGERVNDIGFWKSEIIHELDEMIGETNALTDVKKRLERALMETEAPLQ

SEQ ID NO: 44133 - protein, 48 aa, Homo sapiens
  MAP TO AC006500.4; EXPRESSED IN PLACENTA, SIGNAL = 0.59; EXPRESSED IN LUNG, SIGNAL = 0.7; EXPRESSED IN BRAIN, SIGNAL = 0.71; EXPRESSED IN BONE MARROW, SIGNAL = 0.63; EXPRESSED IN ADULT LIVER, SIGNAL = 0.69
WSDKAFKPDTSDPFNAKTRCAQLERGKGSSVFNKIQALCSEEGQTDKQ

SEQ ID NO: 44134 - protein, 48 aa, Homo sapiens
  MAP TO AC006500.4; EXPRESSED IN PLACENTA, SIGNAL = 0.59; EXPRESSED IN LUNG, SIGNAL = 0.7; EXPRESSED IN BRAIN, SIGNAL = 0.71; EXPRESSED IN BONE MARROW, SIGNAL = 0.63; EXPRESSED IN ADULT LIVER, SIGNAL = 0.69; SWISSPROT HIT: P21969, EVALUE 4.70e+00
GQIRHLNLTPQILSTPKPDVLSWKEERVPLCSTKSKLSAVKRAKLTSR

SEQ ID NO: 44135 - protein, 47 aa, Homo sapiens
  MAP TO AC005343.1; EXPRESSED IN PLACENTA, SIGNAL = 1.8; EXPRESSED IN LUNG, SIGNAL = 0.7; EXPRESSED IN FETAL LIVER, SIGNAL = 0.79; EXPRESSED IN BRAIN, SIGNAL = 1.8; EXPRESSED IN ADULT LIVER, SIGNAL = 3.7; EXPRESSED IN BONE MARROW, SIGNAL = 0.78; SWISSPROT HIT: Q09749, EVALUE 1.90e-01
VFLGLGLSGIIPTLHYVISEGFLKAATIGQIGWLMLMASLYITGAAL

SEQ ID NO: 44136 - protein, 19 aa, Homo sapiens
  MAP TO AC005343.1; EXPRESSED IN PLACENTA, SIGNAL = 1.8; EXPRESSED IN LUNG, SIGNAL = 0.7; EXPRESSED IN FETAL LIVER, SIGNAL = 0.79; EXPRESSED IN BRAIN, SIGNAL = 1.8; EXPRESSED IN ADULT LIVER, SIGNAL = 3.7; EXPRESSED IN BONE MARROW, SIGNAL = 0.78
LTSGSLFLFCITLLSSCDS

SEQ ID NO: 44137 - protein, 37 aa, Homo sapiens
  MAP TO AC006515.7; EXPRESSED IN BRAIN, SIGNAL = 0.65; EXPRESSED IN ADULT LIVER, SIGNAL = 0.7; EXPRESSED IN LUNG, SIGNAL = 0.7; EXPRESSED IN BONE MARROW, SIGNAL = 0.67; EXPRESSED IN PLACENTA, SIGNAL = 0.78; EXPRESSED IN FETAL LIVER, SIGNAL = 0.75; SWISSPROT HIT: P08721, EVALUE 7.40e-01
ELDEPEAETHCIEESTEYLEPYVKIRNSKNASQEFSE

SEQ ID NO: 44138 - protein, 64 aa, Homo sapiens
  MAP TO AC005352.1; EXPRESSED IN LUNG, SIGNAL = 0.49; EXPRESSED IN BRAIN, SIGNAL = 0.59; EXPRESSED IN BONE MARROW, SIGNAL = 0.55; EXPRESSED IN ADULT LIVER, SIGNAL = 0.43
IADRELSSKKLKESHGTWQCCFEACKIFASLLSPMRTFTQVGDTINNGDDEVPSGTAIVNMDPE

SEQ ID NO: 44139 - protein, 61 aa, Homo sapiens
  MAP TO AC003683.1; EXPRESSED IN FETAL LIVER, SIGNAL = 2.2; EXPRESSED IN BRAIN, SIGNAL = 1.3; EXPRESSED IN BONE MARROW, SIGNAL = 1.8; EXPRESSED IN ADULT LIVER, SIGNAL = 1.4; EXPRESSED IN PLACENTA, SIGNAL = 1.3; EXPRESSED IN LUNG, SIGNAL = 1.3; SWISSPROT HIT: O75311, EVALUE 5.00e-29
LERQMGYYLIQMYIPSLLIVILSWVSFWINMDAAPARVALGITTVLTMTTQSSGSRASLPK

SEQ ID NO: 44140 - protein, 61 aa, Homo sapiens
  MAP TO AC003683.1; EXPRESSED IN FETAL LIVER, SIGNAL = 2.2; EXPRESSED IN BRAIN, SIGNAL = 1.3; EXPRESSED IN BONE MARROW, SIGNAL = 1.8; EXPRESSED IN ADULT LIVER, SIGNAL = 1.4; EXPRESSED IN PLACENTA, SIGNAL = 1.3; EXPRESSED IN LUNG, SIGNAL = 1.3; SWISSPROT HIT: P04890, EVALUE 2.00e+00
SGTPNGILFDPDVHPKPAYSNFVLGFLLDKYGCSPCQGRTGHHHSLNDDHPEFRLQGISAK

SEQ ID NO: 44141 - protein, 50 aa, Homo sapiens
  MAP TO AC005858.1; EXPRESSED IN PLACENTA, SIGNAL = 0.95; EXPRESSED IN LUNG, SIGNAL = 0.93; EXPRESSED IN FETAL LIVER, SIGNAL = 1.1; EXPRESSED IN ADULT LIVER, SIGNAL = 0.78; EXPRESSED IN BRAIN, SIGNAL = 0.93; EXPRESSED IN BONE MARROW, SIGNAL =   1; SWISSPROT HIT: P55780, EVALUE 9.30e-01
MKKMTLQDPQSRMMWLPWMTQALDITWGMLKKTTQEAKQILLQAQTPFTP

SEQ ID NO: 44142 - protein, 67 aa, Homo sapiens
  MAP TO AC003042.1; EXPRESSED IN PLACENTA, SIGNAL = 1.3; EXPRESSED IN LUNG, SIGNAL = 1.3; EXPRESSED IN FETAL LIVER, SIGNAL = 1.3; EXPRESSED IN BONE MARROW, SIGNAL = 1.3; EXPRESSED IN BRAIN, SIGNAL = 1.1; EXPRESSED IN ADULT LIVER, SIGNAL = 1.2; SWISSPROT HIT: P40872, EVALUE 5.00e+00
FCTDCKNKVLRAYNILIGELDCSKEKGYCAALYEGLRCCPHERHIHVCCETDFIAHLLGRAEPEFAG

SEQ ID NO: 44143 - protein, 43 aa, Homo sapiens
  MAP TO AC003049.1; EXPRESSED IN PLACENTA, SIGNAL = 1.1; EXPRESSED IN FETAL LIVER, SIGNAL = 1.1; EXPRESSED IN BRAIN, SIGNAL = 1.1; EXPRESSED IN BONE MARROW, SIGNAL = 1.1; EXPRESSED IN LUNG, SIGNAL = 1.1; EXPRESSED IN ADULT LIVER, SIGNAL = 1.1
RSVHVGERRHKKGNIPRKVWRTSTTDHGASMSCVKGQDCTVRL

SEQ ID NO: 44144 - protein, 35 aa, Homo sapiens
  MAP TO AC004825.2; EXPRESSED IN ADULT LIVER, SIGNAL = 0.67; EXPRESSED IN PLACENTA, SIGNAL = 0.68; EXPRESSED IN BRAIN, SIGNAL = 0.65; EXPRESSED IN LUNG, SIGNAL = 0.72; EXPRESSED IN BONE MARROW, SIGNAL = 0.73
DPGGGIEMSEFIREATPPVGCSSRNSYAGLDPSNQ

SEQ ID NO: 44145 - protein, 30 aa, Homo sapiens
  MAP TO AC004825.2; EXPRESSED IN ADULT LIVER, SIGNAL = 0.67; EXPRESSED IN PLACENTA, SIGNAL = 0.68; EXPRESSED IN BRAIN, SIGNAL = 0.65; EXPRESSED IN LUNG, SIGNAL = 0.72; EXPRESSED IN BONE MARROW, SIGNAL = 0.73; SWISSPROT HIT: P13258, EVALUE 8.60e+00
VILVEGLKCLSSSERPHPQLVAVPEILMPV

SEQ ID NO: 44146 - protein, 75 aa, Homo sapiens
  MAP TO AC003693.1; EXPRESSED IN PLACENTA, SIGNAL = 0.8; EXPRESSED IN FETAL LIVER, SIGNAL = 0.73; EXPRESSED IN BRAIN, SIGNAL = 1.2; EXPRESSED IN BONE MARROW, SIGNAL = 0.87; EXPRESSED IN ADULT LIVER, SIGNAL = 0.79; EXPRESSED IN LUNG, SIGNAL = 0.89; SWISSPROT HIT: P53804, EVALUE 2.80e+00
WISAASVPGHPARHRQRRQRQQSKWPRSHVHTGSPLPVKSDMPPGPWCQSHLRTASPWCLGGFGDSRPVGSAVWS

SEQ ID NO: 44147 - protein, 55 aa, Homo sapiens
  MAP TO AC005686.1; EXPRESSED IN BRAIN, SIGNAL = 0.66; EXPRESSED IN BONE MARROW, SIGNAL = 0.49; EXPRESSED IN ADULT LIVER, SIGNAL = 0.45; EXPRESSED IN LUNG, SIGNAL = 0.45; SWISSPROT HIT: O00233, EVALUE 4.60e+00
CTVITTIHLHHPFHLVKLKLYTRYTTLPVSPTPHHLASTILLSVSKILSTPSTSY

SEQ ID NO: 44148 - protein, 110 aa, Homo sapiens
  MAP TO AC001226.1; EXPRESSED IN PLACENTA, SIGNAL = 0.61; EXPRESSED IN LUNG, SIGNAL = 0.5; EXPRESSED IN FETAL LIVER, SIGNAL = 0.68; EXPRESSED IN ADULT LIVER, SIGNAL = 0.64; EXPRESSED IN BRAIN, SIGNAL =   1; EXPRESSED IN BONE MARROW, SIGNAL = 0.57; SWISSPROT HIT: P53699, EVALUE 1.20e+00
MKRGGRDSDRNSSEEGTAEKSKKLRTTNEHSQTCDWGNLLQDIILQVFKYLPLLDRAHASQVCRNWNQVFHMPDLWRCFEFELNQPATSYLKATHPELIKQIIKRHSNHL

SEQ ID NO: 44149 - protein, 35 aa, Homo sapiens
  MAP TO AC005823.1; EXPRESSED IN PLACENTA, SIGNAL = 0.74; EXPRESSED IN LUNG, SIGNAL = 0.93; EXPRESSED IN FETAL LIVER, SIGNAL = 0.91; EXPRESSED IN BRAIN, SIGNAL = 0.69; EXPRESSED IN BONE MARROW, SIGNAL = 0.95; EXPRESSED IN ADULT LIVER, SIGNAL = 0.83
MAVPMDWLDLRDMAMTMLPQSTSSFRVWTLTTWSQ

SEQ ID NO: 44150 - protein, 34 aa, Homo sapiens
  MAP TO AC005823.1; EXPRESSED IN PLACENTA, SIGNAL = 0.74; EXPRESSED IN LUNG, SIGNAL = 0.93; EXPRESSED IN FETAL LIVER, SIGNAL = 0.91; EXPRESSED IN BRAIN, SIGNAL = 0.69; EXPRESSED IN BONE MARROW, SIGNAL = 0.95; EXPRESSED IN ADULT LIVER, SIGNAL = 0.83
WDHVVSVHTLKELVLWGSMVMAMSLRSSQSMGTA

SEQ ID NO: 44151 - protein, 26 aa, Homo sapiens
  MAP TO AC003954.1; EXPRESSED IN PLACENTA, SIGNAL = 0.82; EXPRESSED IN LUNG, SIGNAL = 0.87; EXPRESSED IN FETAL LIVER, SIGNAL = 0.8; EXPRESSED IN BONE MARROW, SIGNAL = 0.66; EXPRESSED IN ADULT LIVER, SIGNAL = 0.88; EXPRESSED IN BRAIN, SIGNAL = 0.73
IQSRTHQAKIRVVYFKGIEQFNVSES

SEQ ID NO: 44152 - protein, 25 aa, Homo sapiens
  MAP TO AC003954.1; EXPRESSED IN PLACENTA, SIGNAL = 0.82; EXPRESSED IN LUNG, SIGNAL = 0.87; EXPRESSED IN FETAL LIVER, SIGNAL = 0.8; EXPRESSED IN BONE MARROW, SIGNAL = 0.66; EXPRESSED IN ADULT LIVER, SIGNAL = 0.88; EXPRESSED IN BRAIN, SIGNAL = 0.73
FNREPIRLKYGLCISKGLSSLMCLN

SEQ ID NO: 44153 - protein, 31 aa, Homo sapiens
  MAP TO AC006504.1; EXPRESSED IN ADULT LIVER, SIGNAL = 1.2; EXPRESSED IN PLACENTA, SIGNAL = 0.82; EXPRESSED IN BRAIN, SIGNAL = 0.82; EXPRESSED IN LUNG, SIGNAL = 0.7; EXPRESSED IN BONE MARROW, SIGNAL = 0.54
TPSFSSTSSQPFWITSLSPLTTSPVTWTLHT

SEQ ID NO: 44154 - protein, 57 aa, Homo sapiens
  MAP TO AC005832.1; EXPRESSED IN PLACENTA, SIGNAL = 0.91; EXPRESSED IN LUNG, SIGNAL =   1; EXPRESSED IN FETAL LIVER, SIGNAL = 0.71; EXPRESSED IN BONE MARROW, SIGNAL = 0.83; EXPRESSED IN ADULT LIVER, SIGNAL = 0.94; EXPRESSED IN BRAIN, SIGNAL = 1.2; SWISSPROT HIT: Q09690, EVALUE 4.00e-23
YTYIQSRFYRSPEVILGHPYDVAIDMWSLGCITAELYTGYPLFPGENEVEQLACIME

SEQ ID NO: 44155 - protein, 127 aa, Homo sapiens
  MAP TO AC004622.1; EXPRESSED IN PLACENTA, SIGNAL = 0.72; EXPRESSED IN ADULT LIVER, SIGNAL = 0.62; EXPRESSED IN LUNG, SIGNAL = 0.71; EXPRESSED IN BRAIN, SIGNAL = 0.79; EXPRESSED IN BONE MARROW, SIGNAL = 1.5; EST_HUMAN HIT: AW502362.1, EVALUE 5.00e-40
IIEAADSGRGSWTSCSSSSHDNFQSLPNPKSWDFLNSYRHTHLDDPIAEVEPTDSEPYSCSKSCSRTCGQCKGSLERKSWTSSSSLSDTYEPNYGTVKRRVLESTPAESSEGLDPKDATDPVYKTVT

SEQ ID NO: 44156 - protein, 51 aa, Homo sapiens
  MAP TO AC004622.1; EXPRESSED IN PLACENTA, SIGNAL = 0.72; EXPRESSED IN ADULT LIVER, SIGNAL = 0.62; EXPRESSED IN LUNG, SIGNAL = 0.71; EXPRESSED IN BRAIN, SIGNAL = 0.79; EXPRESSED IN BONE MARROW, SIGNAL = 1.5; EST_HUMAN HIT: AW502362.1, EVALUE 7.00e-25; SWISSPROT HIT: Q01631, EVALUE 8.00e+00
ERVGPPPVLCLTRMNQTMGQLNGEYWRAPQLSHLKAWTPRMPLTQFIKLSL

SEQ ID NO: 44157 - protein, 41 aa, Homo sapiens
  MAP TO AC004063.1; EXPRESSED IN BRAIN, SIGNAL = 0.58; EXPRESSED IN ADULT LIVER, SIGNAL = 0.5; EXPRESSED IN LUNG, SIGNAL = 0.5; EXPRESSED IN FETAL LIVER, SIGNAL = 0.76; SWISSPROT HIT: P07275, EVALUE 4.80e+00
NILNLVLKAKDKEGVMWPLYNRECSILKTYDILSTLDKARQ

SEQ ID NO: 44158 - protein, 25 aa, Homo sapiens
  MAP TO AC004219.1; EXPRESSED IN PLACENTA, SIGNAL =   1; EXPRESSED IN LUNG, SIGNAL = 1.2; EXPRESSED IN FETAL LIVER, SIGNAL =   1; EXPRESSED IN BRAIN, SIGNAL = 0.86; EXPRESSED IN ADULT LIVER, SIGNAL = 0.97; EXPRESSED IN BONE MARROW, SIGNAL = 0.96; EST_HUMAN HIT: AI187978.1, EVALUE 3.00e-04
SLLQHIGIIGATIQDEICMGTQPSH

SEQ ID NO: 44159 - protein, 18 aa, Homo sapiens
  MAP TO AC004064.1; EXPRESSED IN PLACENTA, SIGNAL = 1.1; EXPRESSED IN LUNG, SIGNAL = 0.99; EXPRESSED IN FETAL LIVER, SIGNAL =   1; EXPRESSED IN BRAIN, SIGNAL = 0.94; EXPRESSED IN BONE MARROW, SIGNAL = 1.1; EXPRESSED IN ADULT LIVER, SIGNAL =   1
GPSCPKGSQTPLNFLAKF

SEQ ID NO: 44160 - protein, 58 aa, Homo sapiens
  MAP TO AC005738.1; EXPRESSED IN PLACENTA, SIGNAL = 0.67; EXPRESSED IN LUNG, SIGNAL = 0.7; EXPRESSED IN BRAIN, SIGNAL = 0.64; EXPRESSED IN BONE MARROW, SIGNAL = 0.7; EXPRESSED IN ADULT LIVER, SIGNAL = 0.61; SWISSPROT HIT: P56764, EVALUE 1.60e+00; EST_HUMAN HIT: BE791687.1, EVALUE 9.30e-01
WGSPALGTRRKFGGRNSEESGRTHVSNCARQLPGTHSSHHNYRLQKGSYHITAFSLLR

SEQ ID NO: 44161 - protein, 60 aa, Homo sapiens
  MAP TO AC004223.1; EXPRESSED IN PLACENTA, SIGNAL = 1.1; EXPRESSED IN FETAL LIVER, SIGNAL =   1; EXPRESSED IN BONE MARROW, SIGNAL = 1.3; EXPRESSED IN ADULT LIVER, SIGNAL =   1; EXPRESSED IN LUNG, SIGNAL = 1.2; EXPRESSED IN BRAIN, SIGNAL =   1; SWISSPROT HIT: P49916, EVALUE 2.00e-09; EST_HUMAN HIT: AI024845.1, EVALUE 3.00e-08
ELYQLSKEKADFTVVAGDEGSSTTGGSSEENKGPSGSAVSRKAPSKPSASTKKAEGKLSN

SEQ ID NO: 44162 - protein, 86 aa, Homo sapiens
  MAP TO AC004134.1; EXPRESSED IN PLACENTA, SIGNAL = 0.87; EXPRESSED IN LUNG, SIGNAL = 0.91; EXPRESSED IN FETAL LIVER, SIGNAL = 0.82; EXPRESSED IN BRAIN, SIGNAL = 0.7; EXPRESSED IN BONE MARROW, SIGNAL = 0.93; EXPRESSED IN ADULT LIVER, SIGNAL =   1; SWISSPROT HIT: P21851, EVALUE 3.00e-47; EST_HUMAN HIT: AL039581.1, EVALUE 3.00e-46
DSDNPDLRDRGYIYWRLLSTDPVTAKEVVLSEKPLISEETDLIEPTLLDELICHIGSLASVYHKPPNAFVEGSHGIHRKHLPIHHG

SEQ ID NO: 44163 - protein, 33 aa, Homo sapiens
  MAP TO AC004134.1; EXPRESSED IN PLACENTA, SIGNAL = 0.87; EXPRESSED IN LUNG, SIGNAL = 0.91; EXPRESSED IN FETAL LIVER, SIGNAL = 0.82; EXPRESSED IN BRAIN, SIGNAL = 0.7; EXPRESSED IN BONE MARROW, SIGNAL = 0.93; EXPRESSED IN ADULT LIVER, SIGNAL =   1; EST_HUMAN HIT: AU123941.1, EVALUE 2.00e-07
LCLFFRILIILTFETGAIFIGAFSQLTLLQLKK

SEQ ID NO: 44164 - protein, 59 aa, Homo sapiens
  MAP TO AC004141.1; EXPRESSED IN LUNG, SIGNAL = 0.94; EXPRESSED IN BRAIN, SIGNAL = 0.71; EXPRESSED IN ADULT LIVER, SIGNAL =   1; EXPRESSED IN PLACENTA, SIGNAL = 0.91; EXPRESSED IN FETAL LIVER, SIGNAL = 0.76; EXPRESSED IN BONE MARROW, SIGNAL = 0.78; EST_HUMAN HIT: H14888.1, EVALUE 5.00e-25; SWISSPROT HIT: P53420, EVALUE 7.90e+00
EKKLTDSCAEMPSSPSLWPVMPHARKTVCSAHGLRGPPAHTPAQGKRQKGNRYEHDPFW

SEQ ID NO: 44165 - protein, 64 aa, Homo sapiens
  MAP TO AC004526.1; EXPRESSED IN PLACENTA, SIGNAL = 0.72; EXPRESSED IN BONE MARROW, SIGNAL = 0.56; EXPRESSED IN ADULT LIVER, SIGNAL = 0.62; EXPRESSED IN LUNG, SIGNAL = 0.73; EXPRESSED IN BRAIN, SIGNAL = 0.83; EST_HUMAN HIT: AW951634.1, EVALUE 4.00e-20; SWISSPROT HIT: Q04690, EVALUE 4.00e-21
ELIVKFLDALIDTYLPGIDEETSEESLLTPTSPYPPALQSQLSITANLNLSNSMTSLATSQHSP

SEQ ID NO: 44166 - protein, 52 aa, Homo sapiens
  MAP TO AC005552.1; EXPRESSED IN BRAIN, SIGNAL = 0.87; EXPRESSED IN PLACENTA, SIGNAL = 0.77; EXPRESSED IN LUNG, SIGNAL = 0.8; EXPRESSED IN BONE MARROW, SIGNAL = 0.77; EXPRESSED IN ADULT LIVER, SIGNAL = 0.63; EXPRESSED IN FETAL LIVER, SIGNAL = 1.1; SWISSPROT HIT: P30603, EVALUE 8.00e+00
GAITILMSNVGTKTKDRPKGLKKIAILFCRLSEVKKVNNIAVYIAETSEVEK

SEQ ID NO: 44167 - protein, 46 aa, Homo sapiens
  MAP TO AC004053.1; EXPRESSED IN LUNG, SIGNAL = 0.74; EXPRESSED IN FETAL LIVER, SIGNAL = 0.7; EXPRESSED IN BRAIN, SIGNAL = 0.71; EXPRESSED IN BONE MARROW, SIGNAL = 1.1; EXPRESSED IN PLACENTA, SIGNAL = 1.1; EXPRESSED IN ADULT LIVER, SIGNAL = 0.52; EST_HUMAN HIT: AI913026.1, EVALUE 9.00e+00
ERQFQGLEVKNNSKKNSRKEVEPKWGCGIELTVVLHHGNDCNYISG

SEQ ID NO: 44168 - protein, 64 aa, Homo sapiens
  MAP TO AC005669.1; EXPRESSED IN PLACENTA, SIGNAL = 0.98; EXPRESSED IN LUNG, SIGNAL = 1.3; EXPRESSED IN FETAL LIVER, SIGNAL = 1.1; EXPRESSED IN BRAIN, SIGNAL = 0.99; EXPRESSED IN BONE MARROW, SIGNAL = 1.1; EXPRESSED IN ADULT LIVER, SIGNAL = 1.1; EST_HUMAN HIT: D60704.1, EVALUE 3.00e-24; SWISSPROT HIT: Q05870, EVALUE 2.30e-01
DFIKAQDLSNLENTVAALKSEFQKTLNDKTENQKSLEENLATAKHDLLRVQEQLHMAEKVRRPC

SEQ ID NO: 44169 - protein, 38 aa, Homo sapiens
  MAP TO AC004880.1; EXPRESSED IN PLACENTA, SIGNAL = 1.6; EXPRESSED IN LUNG, SIGNAL = 1.6; EXPRESSED IN FETAL LIVER, SIGNAL = 1.3; EXPRESSED IN BRAIN, SIGNAL = 1.5; EXPRESSED IN BONE MARROW, SIGNAL = 1.4; EXPRESSED IN ADULT LIVER, SIGNAL = 1.4
LSFVRGFMISPLEENFPNESRIQKCELISEKPLLLNLQ

SEQ ID NO: 44170 - protein, 36 aa, Homo sapiens
  MAP TO AC004467.1; EXPRESSED IN ADULT LIVER, SIGNAL = 0.61; EXPRESSED IN PLACENTA, SIGNAL =   1; EXPRESSED IN BONE MARROW, SIGNAL = 0.69; EXPRESSED IN LUNG, SIGNAL = 1.2; EXPRESSED IN BRAIN, SIGNAL = 0.83; EST_HUMAN HIT: AA533455.1, EVALUE 8.00e-12; SWISSPROT HIT: O43182, EVALUE 6.00e-13
SSDKEFSVQSSARAEESTAIIAVVQKMIENYEALFM

SEQ ID NO: 44171 - protein, 28 aa, Homo sapiens
  MAP TO AC005536.2; EXPRESSED IN LUNG, SIGNAL = 0.92; EXPRESSED IN BRAIN, SIGNAL = 0.9; EXPRESSED IN PLACENTA, SIGNAL =   1; EXPRESSED IN FETAL LIVER, SIGNAL = 0.97; EXPRESSED IN BONE MARROW, SIGNAL = 0.75; EXPRESSED IN ADULT LIVER, SIGNAL = 1.1
HIVTRVHYTGYTSPTELHLDRLMSLYEH

SEQ ID NO: 44172 - protein, 64 aa, Homo sapiens
  MAP TO AC000114.1; EXPRESSED IN FETAL LIVER, SIGNAL = 1.5; EXPRESSED IN BRAIN, SIGNAL = 0.6; EST_HUMAN HIT: BF446009.1, EVALUE 2.00e-07
GEGHSLIMVEECGRYASFNAIPSLAWQMCTVVTGAGCALLLLVALAAVLGCCMEELISRMMGRC

SEQ ID NO: 44173 - protein, 65 aa, Homo sapiens
  MAP TO AC000114.1; EXPRESSED IN FETAL LIVER, SIGNAL = 1.5; EXPRESSED IN BRAIN, SIGNAL = 0.6; EST_HUMAN HIT: BF446009.1, EVALUE 1.00e-06; SWISSPROT HIT: P35590, EVALUE 1.60e+00
GRGTQSDHGGRMWALCQLQCHPKPGLADVHSGDRCRLCSAAPGGTSCCPGLLHGGAHLQNDGTLH

SEQ ID NO: 44174 - protein, 41 aa, Homo sapiens
  MAP TO AC003093.1; EXPRESSED IN BRAIN, SIGNAL = 0.55; EXPRESSED IN ADULT LIVER, SIGNAL = 0.59; EXPRESSED IN PLACENTA, SIGNAL = 0.66; EXPRESSED IN LUNG, SIGNAL = 0.6; EXPRESSED IN BONE MARROW, SIGNAL = 0.62; EST_HUMAN HIT: H73831.1, EVALUE 2.00e-18; SWISSPROT HIT: P35845, EVALUE 1.90e-01
STNAHEIEGTVFDRSGKAVHRLFGKWHESIYCGGGSSSACV

SEQ ID NO: 44175 - protein, 45 aa, Homo sapiens
  MAP TO AC002557.1; EXPRESSED IN LUNG, SIGNAL = 0.41; EXPRESSED IN BRAIN, SIGNAL = 0.62; EXPRESSED IN BONE MARROW, SIGNAL = 0.57; EST_HUMAN HIT: W25596.1, EVALUE 2.30e+00; SWISSPROT HIT: P18102, EVALUE 8.20e+00
GMPTPFPSLLPQGGQLPAAMALFPQVLGPKVLLELCDGGAYPSWE

SEQ ID NO: 44176 - protein, 45 aa, Homo sapiens
  MAP TO AC004886.1; EXPRESSED IN PLACENTA, SIGNAL = 1.5; EXPRESSED IN LUNG, SIGNAL = 1.5; EXPRESSED IN FETAL LIVER, SIGNAL = 1.3; EXPRESSED IN BRAIN, SIGNAL = 1.4; EXPRESSED IN ADULT LIVER, SIGNAL = 1.4; EXPRESSED IN BONE MARROW, SIGNAL = 1.3; EST_HUMAN HIT: BE164231.1, EVALUE 7.00e-15
YHLRREETDWFDKPRESRLENGHGLDRKLPERLVHSRPLSQHQEQ

SEQ ID NO: 44177 - protein, 37 aa, Homo sapiens
  MAP TO AC005859.1; EXPRESSED IN LUNG, SIGNAL = 0.48; EXPRESSED IN BRAIN, SIGNAL = 0.55; EXPRESSED IN BONE MARROW, SIGNAL = 0.51; EST_HUMAN HIT: AV722858.1, EVALUE 3.30e+00; SWISSPROT HIT: Q9Z4J7, EVALUE 7.40e-01
QDQSHARGIPYQGSAGDAELSTLEEGTGDQTSWFAQD

SEQ ID NO: 44178 - protein, 90 aa, Homo sapiens
  MAP TO AC005866.3; EXPRESSED IN FETAL LIVER, SIGNAL = 1.9; EXPRESSED IN BRAIN, SIGNAL = 1.5; EXPRESSED IN ADULT LIVER, SIGNAL = 3.5; EXPRESSED IN LUNG, SIGNAL = 2.2; EXPRESSED IN BONE MARROW, SIGNAL = 1.2; EXPRESSED IN PLACENTA, SIGNAL = 1.4; EXPRESSED IN HELA, SIGNAL = 1.7; EST_HUMAN HIT: AW962016.1, EVALUE 2.00e-23
LMRHPLIKLFHLSNKLQMPNNHRMVDIELFGKFSCSCKRIGFDGGSQLVIVNFPWPAIMLLIFFIMLLIFFAKPFEPPLCRTFVSNSWAK

SEQ ID NO: 44179 - protein, 40 aa, Homo sapiens
  MAP TO AC000015.2; EXPRESSED IN BONE MARROW, SIGNAL = 0.95; EXPRESSED IN PLACENTA, SIGNAL = 0.77; EXPRESSED IN LUNG, SIGNAL = 0.66; EXPRESSED IN FETAL LIVER, SIGNAL = 0.73; EXPRESSED IN ADULT LIVER, SIGNAL = 0.71; EXPRESSED IN BRAIN, SIGNAL = 0.67; EST_HUMAN HIT: AV684334.1, EVALUE 3.00e-15; SWISSPROT HIT: P50848, EVALUE 2.80e+00
KLQIQEKAAQEVKLAIKPFYQNKDITKEEYKEIVRKAVDK

SEQ ID NO: 44180 - protein, 32 aa, Homo sapiens
  MAP TO AC005823.1; EXPRESSED IN LUNG, SIGNAL = 1.1; EXPRESSED IN BRAIN, SIGNAL =   1; EXPRESSED IN PLACENTA, SIGNAL = 1.4; EXPRESSED IN FETAL LIVER, SIGNAL = 1.5; EXPRESSED IN BONE MARROW, SIGNAL = 1.2; EXPRESSED IN ADULT LIVER, SIGNAL = 1.5
MFQSLNQCTPLPNIRTHKGQIKIPVGVESARG

SEQ ID NO: 44181 - protein, 99 aa, Homo sapiens
  MAP TO AC005692.1; EXPRESSED IN BONE MARROW, SIGNAL = 0.92; EXPRESSED IN PLACENTA, SIGNAL = 0.93; EXPRESSED IN LUNG, SIGNAL = 0.94; EXPRESSED IN FETAL LIVER, SIGNAL = 0.82; EXPRESSED IN BRAIN, SIGNAL = 0.67; EXPRESSED IN ADULT LIVER, SIGNAL = 0.9; EST_HUMAN HIT: BF309028.1, EVALUE 2.00e+00; SWISSPROT HIT: Q24849, EVALUE 3.30e+00
QAPRPATGGGEEAVTEVTHSFQSFQGFMEGAEGTAVIVRGKTPYQTLWNHSQHKSKILKKPNCTSSGPQVTELATDSLRKKKKRGVSLECVQSFEGKKN

SEQ ID NO: 44182 - protein, 31 aa, Homo sapiens
  MAP TO AC003108.1; EXPRESSED IN LUNG, SIGNAL = 0.69; EXPRESSED IN FETAL LIVER, SIGNAL = 0.74; EXPRESSED IN BONE MARROW, SIGNAL = 0.67; EXPRESSED IN PLACENTA, SIGNAL = 0.75; EXPRESSED IN BRAIN, SIGNAL = 0.62; EXPRESSED IN ADULT LIVER, SIGNAL = 0.78; EST_HUMAN HIT: AW582253.1, EVALUE 2.00e-09
KMFLIEKLIKLQDMEKKANPSSLVLERREVE

SEQ ID NO: 44183 - protein, 71 aa, Homo sapiens
  MAP TO AC004898.1; EXPRESSED IN LUNG, SIGNAL = 1.2; EXPRESSED IN FETAL LIVER, SIGNAL =   1; EXPRESSED IN BRAIN, SIGNAL = 1.1; EXPRESSED IN BONE MARROW, SIGNAL = 1.1; EXPRESSED IN ADULT LIVER, SIGNAL = 1.1; EXPRESSED IN PLACENTA, SIGNAL =   1; EST_HUMAN HIT: AA291256.1, EVALUE 1.00e-34; SWISSPROT HIT: P53119, EVALUE 3.00e-04
ALYENMLVELPFAGFFLSKLLGTSADVDIHHLASLDPEVYKNLLFLKSYEDDVEELGLNFTVVNNDLGEAQ

SEQ ID NO: 44184 - protein, 26 aa, Homo sapiens
  MAP TO AC004898.1; EXPRESSED IN LUNG, SIGNAL = 1.2; EXPRESSED IN FETAL LIVER, SIGNAL =   1; EXPRESSED IN BRAIN, SIGNAL = 1.1; EXPRESSED IN BONE MARROW, SIGNAL = 1.1; EXPRESSED IN ADULT LIVER, SIGNAL = 1.1; EXPRESSED IN PLACENTA, SIGNAL =   1; EST_HUMAN HIT: AU133428.1, EVALUE 9.00e-10
SCPLQASFFPSCLEPVPTWTFTTSPP

SEQ ID NO: 44185 - protein, 34 aa, Homo sapiens
  MAP TO AC005348.1; EXPRESSED IN LUNG, SIGNAL = 0.83; EXPRESSED IN FETAL LIVER, SIGNAL = 0.92; EXPRESSED IN BRAIN, SIGNAL =   1; EXPRESSED IN BONE MARROW, SIGNAL = 0.98; EXPRESSED IN PLACENTA, SIGNAL = 0.76; EXPRESSED IN ADULT LIVER, SIGNAL = 0.86; EST_HUMAN HIT: BE730563.1, EVALUE 5.00e-12; SWISSPROT HIT: P46941, EVALUE 2.50e-01
LENQESRVSEIHSLVHRLPEKNRQMLQLLMNHLA

SEQ ID NO: 44186 - protein, 27 aa, Homo sapiens
  MAP TO AC005348.1; EXPRESSED IN LUNG, SIGNAL = 0.83; EXPRESSED IN FETAL LIVER, SIGNAL = 0.92; EXPRESSED IN BRAIN, SIGNAL =   1; EXPRESSED IN BONE MARROW, SIGNAL = 0.98; EXPRESSED IN PLACENTA, SIGNAL = 0.76; EXPRESSED IN ADULT LIVER, SIGNAL = 0.86; EST_HUMAN HIT: BE276273.1, EVALUE 1.00e-08
NWRTRSLGSLKSTALFIGSQRKIGRCY

SEQ ID NO: 44187 - protein, 26 aa, Homo sapiens
  MAP TO AC005871.2; EXPRESSED IN BRAIN, SIGNAL = 1.2; EXPRESSED IN LUNG, SIGNAL = 1.1; EXPRESSED IN FETAL LIVER, SIGNAL = 1.9; EXPRESSED IN BONE MARROW, SIGNAL = 1.2; EXPRESSED IN ADULT LIVER, SIGNAL = 1.5; EXPRESSED IN PLACENTA, SIGNAL = 1.4
MGKVPWLGRAFIKPHLIKESVILSMF

SEQ ID NO: 44188 - protein, 19 aa, Homo sapiens
  MAP TO AC005550.1; EXPRESSED IN PLACENTA, SIGNAL = 0.96; EXPRESSED IN ADULT LIVER, SIGNAL = 0.95; EXPRESSED IN LUNG, SIGNAL =   1; EXPRESSED IN FETAL LIVER, SIGNAL = 0.79; EXPRESSED IN BRAIN, SIGNAL = 0.81; EXPRESSED IN BONE MARROW, SIGNAL = 0.8
SPFEDVADVGFANNAGKRS

SEQ ID NO: 44189 - protein, 43 aa, Homo sapiens
  MAP TO AC004905.1; EXPRESSED IN ADULT LIVER, SIGNAL = 1.3; EXPRESSED IN PLACENTA, SIGNAL = 1.1; EXPRESSED IN LUNG, SIGNAL = 1.3; EXPRESSED IN BRAIN, SIGNAL = 1.4; EXPRESSED IN FETAL LIVER, SIGNAL = 1.4; EXPRESSED IN BONE MARROW, SIGNAL = 1.3; EST_HUMAN HIT: N47802.1, EVALUE 3.10e+00
VTIPDSPVYLFGMCCLHQTVSSLRAGSPLFGQQLHLQLPGHNG

SEQ ID NO: 44190 - protein, 43 aa, Homo sapiens
  MAP TO AC004905.1; EXPRESSED IN ADULT LIVER, SIGNAL = 1.3; EXPRESSED IN PLACENTA, SIGNAL = 1.1; EXPRESSED IN LUNG, SIGNAL = 1.3; EXPRESSED IN BRAIN, SIGNAL = 1.4; EXPRESSED IN FETAL LIVER, SIGNAL = 1.4; EXPRESSED IN BONE MARROW, SIGNAL = 1.3; EST_HUMAN HIT: BF683476.1, EVALUE 2.40e+00
GRYGQGAGDAIVGQTEVSLPSGSLLSDAGSTYQTGKQVSQVWS

SEQ ID NO: 44191 - protein, 64 aa, Homo sapiens
  MAP TO AC005296.1; EXPRESSED IN ADULT LIVER, SIGNAL = 0.86; EXPRESSED IN PLACENTA, SIGNAL = 0.85; EXPRESSED IN LUNG, SIGNAL = 0.87; EXPRESSED IN BRAIN, SIGNAL = 0.8; EXPRESSED IN FETAL LIVER, SIGNAL = 0.83; EXPRESSED IN BONE MARROW, SIGNAL = 0.71; EST_HUMAN HIT: W68243.1, EVALUE 9.00e-22; SWISSPROT HIT: P41247, EVALUE 1.00e-20
ATARMKHINLSFAACGFLGIYHLGAASALCRHGKKLVKDVKAFAGASAGSLVASVLLTAPEKIE

SEQ ID NO: 44192 - protein, 46 aa, Homo sapiens
  MAP TO AC005296.1; EXPRESSED IN ADULT LIVER, SIGNAL = 0.86; EXPRESSED IN PLACENTA, SIGNAL = 0.85; EXPRESSED IN LUNG, SIGNAL = 0.87; EXPRESSED IN BRAIN, SIGNAL = 0.8; EXPRESSED IN FETAL LIVER, SIGNAL = 0.83; EXPRESSED IN BONE MARROW, SIGNAL = 0.71; SWISSPROT HIT: O43548, EVALUE 3.60e+00; EST_HUMAN HIT: AA448951.1, EVALUE 1.00e-22
LPLGGSICTLQTWQKTCEGCQSLRWGVCGIVGCFCSANSTRKNRGN

SEQ ID NO: 44193 - protein, 25 aa, Homo sapiens
  MAP TO AC004240.1; EXPRESSED IN LUNG, SIGNAL = 0.74; EXPRESSED IN BRAIN, SIGNAL = 0.95; EXPRESSED IN BONE MARROW, SIGNAL = 0.65; EXPRESSED IN PLACENTA, SIGNAL = 0.6; EXPRESSED IN ADULT LIVER, SIGNAL = 0.73
SKVTQCSQNTKRSSSSSNTRQIEIN

SEQ ID NO: 44194 - protein, 21 aa, Homo sapiens
  MAP TO AC004240.1; EXPRESSED IN LUNG, SIGNAL = 0.74; EXPRESSED IN BRAIN, SIGNAL = 0.95; EXPRESSED IN BONE MARROW, SIGNAL = 0.65; EXPRESSED IN PLACENTA, SIGNAL = 0.6; EXPRESSED IN ADULT LIVER, SIGNAL = 0.73; EST_HUMAN HIT: BE832636.1, EVALUE 5.00e-04
VKSPSVPRTPKEAAAAVIQGK

SEQ ID NO: 44195 - protein, 48 aa, Homo sapiens
  MAP TO AC005738.1; EXPRESSED IN BONE MARROW, SIGNAL = 0.64; EXPRESSED IN PLACENTA, SIGNAL = 0.69; EXPRESSED IN LUNG, SIGNAL = 0.63; EXPRESSED IN ADULT LIVER, SIGNAL = 0.53; EXPRESSED IN BRAIN, SIGNAL = 0.72; SWISSPROT HIT: P42810, EVALUE 8.10e+00
RVQSAIYRQFVGLAGKALALRRDGAPQTALFATLLRIHSLSNRSAITS

SEQ ID NO: 44196 - protein, 37 aa, Homo sapiens
  MAP TO AC003657.1; EXPRESSED IN LUNG, SIGNAL = 0.72; EXPRESSED IN BRAIN, SIGNAL = 0.73; EXPRESSED IN PLACENTA, SIGNAL = 0.71; EXPRESSED IN BONE MARROW, SIGNAL = 0.8; EXPRESSED IN ADULT LIVER, SIGNAL = 0.73; EXPRESSED IN FETAL LIVER, SIGNAL = 0.72; SWISSPROT HIT: P53701, EVALUE 3.00e-16; EST_HUMAN HIT: BE504530.1, EVALUE 4.00e-15
PFALSTVREESSIPRADSEKKWVYPSEQMFWNAMLKK

SEQ ID NO: 44197 - protein, 117 aa, Homo sapiens
  MAP TO AC005740.1; EXPRESSED IN PLACENTA, SIGNAL = 0.62; EXPRESSED IN LUNG, SIGNAL = 0.62; EXPRESSED IN BONE MARROW, SIGNAL = 0.69; EXPRESSED IN ADULT LIVER, SIGNAL = 0.64; EXPRESSED IN BRAIN, SIGNAL = 0.65; EST_HUMAN HIT: AW340037.1, EVALUE 4.00e-16
PDPAWMARLSLPLTTNYRDNVISPDAAATEEPRTFQTFGKAEAPELSPTGTRLASTFVSEMSSLLEMLLEQRSSMPVEAASEALRRLSVCGRTLSLDLATSAASGMKVQGDPGGKTG

SEQ ID NO: 44198 - protein, 21 aa, Homo sapiens
  MAP TO AC005740.1; EXPRESSED IN PLACENTA, SIGNAL = 0.62; EXPRESSED IN LUNG, SIGNAL = 0.62; EXPRESSED IN BONE MARROW, SIGNAL = 0.69; EXPRESSED IN ADULT LIVER, SIGNAL = 0.64; EXPRESSED IN BRAIN, SIGNAL = 0.65
PLTRPGWRDSLCPSPPTTVTM

SEQ ID NO: 44199 - protein, 34 aa, Homo sapiens
  MAP TO AC005510.3; EXPRESSED IN LUNG, SIGNAL = 0.88; EXPRESSED IN FETAL LIVER, SIGNAL = 0.7; EXPRESSED IN BRAIN, SIGNAL = 1.1; EXPRESSED IN BONE MARROW, SIGNAL = 0.69; EXPRESSED IN PLACENTA, SIGNAL = 0.86; EXPRESSED IN ADULT LIVER, SIGNAL = 0.65
YRSVNTFLEMPEQFHFGTDNMGFVVTQNISPEWD

SEQ ID NO: 44200 - protein, 27 aa, Homo sapiens
  MAP TO AC005771.1; EXPRESSED IN BRAIN, SIGNAL = 0.84; EXPRESSED IN LUNG, SIGNAL = 0.99; EXPRESSED IN FETAL LIVER, SIGNAL = 0.81; EXPRESSED IN BONE MARROW, SIGNAL = 0.76; EXPRESSED IN ADULT LIVER, SIGNAL = 0.74; EXPRESSED IN PLACENTA, SIGNAL = 0.98
LHTDDHPDCEFRDVPAFFMHGQRGAES

SEQ ID NO: 44201 - protein, 78 aa, Homo sapiens
  MAP TO AC002094.1; EXPRESSED IN PLACENTA, SIGNAL = 0.84; EXPRESSED IN BONE MARROW, SIGNAL = 0.68; EXPRESSED IN ADULT LIVER, SIGNAL = 0.8; EXPRESSED IN LUNG, SIGNAL = 0.99; EXPRESSED IN FETAL LIVER, SIGNAL = 0.89; EXPRESSED IN BRAIN, SIGNAL = 1.1; EST_HUMAN HIT: AU137738.1, EVALUE 3.00e-39; SWISSPROT HIT: Q13829, EVALUE 3.00e-40
VEFPEARIYEETLNVLLYETPRVPDNSLLEATSRSRSQASPSEDEETFELRDRVRRIHVKRYSTYDDRQLGHQSTHRD

SEQ ID NO: 44202 - protein, 66 aa, Homo sapiens
  MAP TO AC002094.1; EXPRESSED IN PLACENTA, SIGNAL = 0.84; EXPRESSED IN BONE MARROW, SIGNAL = 0.68; EXPRESSED IN ADULT LIVER, SIGNAL = 0.8; EXPRESSED IN LUNG, SIGNAL = 0.99; EXPRESSED IN FETAL LIVER, SIGNAL = 0.89; EXPRESSED IN BRAIN, SIGNAL = 1.1; EST_HUMAN HIT: AI634246.1, EVALUE 9.00e-26; SWISSPROT HIT: Q92197, EVALUE 2.30e+00
WNSQRPESMRRHSTSYSMRLPASPTTPCWRPQAVAAARLPPVKMRRPLNCGTVSAASTSSATALTM

SEQ ID NO: 44203 - protein, 55 aa, Homo sapiens
  MAP TO AC005518.2; EXPRESSED IN PLACENTA, SIGNAL = 1.4; EXPRESSED IN LUNG, SIGNAL = 1.3; EXPRESSED IN BRAIN, SIGNAL = 1.1; EXPRESSED IN ADULT LIVER, SIGNAL = 1.6; EXPRESSED IN FETAL LIVER, SIGNAL = 1.3; EXPRESSED IN BONE MARROW, SIGNAL = 1.2; EST_HUMAN HIT: AF075301.1, EVALUE 5.00e-13; SWISSPROT HIT: P78589, EVALUE 2.10e+00
PSQVIGLKKCFNALMQWLNQRGGVWREKHYFDIGMEITNKRSMCGTITNNKQILK

SEQ ID NO: 44204 - protein, 41 aa, Homo sapiens
  MAP TO AC004612.1; EXPRESSED IN PLACENTA, SIGNAL =   5; EXPRESSED IN LUNG, SIGNAL = 0.93; EXPRESSED IN FETAL LIVER, SIGNAL = 0.85; EXPRESSED IN BRAIN, SIGNAL = 0.97; EXPRESSED IN BONE MARROW, SIGNAL = 0.84; EXPRESSED IN ADULT LIVER, SIGNAL = 0.98; EST_HUMAN HIT: H41855.1, EVALUE 2.10e-01; SWISSPROT HIT: P05937, EVALUE 3.00e-16
YSVQDLDINNITTYKKNIMALSDGGKLYRTDLALILCAGDN

SEQ ID NO: 44205 - protein, 28 aa, Homo sapiens
  MAP TO AC000100.2; EXPRESSED IN BONE MARROW, SIGNAL = 0.59; EXPRESSED IN PLACENTA, SIGNAL = 0.59; EXPRESSED IN LUNG, SIGNAL = 0.59; EXPRESSED IN FETAL LIVER, SIGNAL = 1.6; EXPRESSED IN BRAIN, SIGNAL = 0.64; EXPRESSED IN ADULT LIVER, SIGNAL = 4.2
SSSLVLLVVRRTRQQAGLSPVPRESQEK

SEQ ID NO: 44206 - protein, 25 aa, Homo sapiens
  MAP TO AC000100.2; EXPRESSED IN BONE MARROW, SIGNAL = 0.59; EXPRESSED IN PLACENTA, SIGNAL = 0.59; EXPRESSED IN LUNG, SIGNAL = 0.59; EXPRESSED IN FETAL LIVER, SIGNAL = 1.6; EXPRESSED IN BRAIN, SIGNAL = 0.64; EXPRESSED IN ADULT LIVER, SIGNAL = 4.2
FPGFLLVLEKVQPAVEFFERPIGLS

SEQ ID NO: 44207 - protein, 45 aa, Homo sapiens
  MAP TO AC003667.1; EXPRESSED IN PLACENTA, SIGNAL = 0.96; EXPRESSED IN FETAL LIVER, SIGNAL = 0.76; EXPRESSED IN BONE MARROW, SIGNAL = 0.82; EXPRESSED IN LUNG, SIGNAL = 0.69; EXPRESSED IN BRAIN, SIGNAL = 0.71; EXPRESSED IN ADULT LIVER, SIGNAL = 0.68; SWISSPROT HIT: Q03560, EVALUE 1.60e+00
LHASLKKMTYLNGFDKHRAEADFQIKLLKSSQGQFKGEFKLSYVI

SEQ ID NO: 44208 - protein, 55 aa, Homo sapiens
  MAP TO AC005872.2; EXPRESSED IN LUNG, SIGNAL = 1.5; EXPRESSED IN BONE MARROW, SIGNAL = 1.3; EXPRESSED IN ADULT LIVER, SIGNAL = 1.4; EXPRESSED IN PLACENTA, SIGNAL = 1.5; EXPRESSED IN FETAL LIVER, SIGNAL = 1.3; EXPRESSED IN BRAIN, SIGNAL = 1.4; SWISSPROT HIT: P28738, EVALUE 9.20e-01; EST_HUMAN HIT: AI670939.1, EVALUE 4.00e-24
EAIKKQMIEEEDKFIKEITDFNNDYEITKKRELLMKENVKIEISDLENQANMLKS

SEQ ID NO: 44209 - protein, 102 aa, Homo sapiens
  MAP TO AC005668.1; EXPRESSED IN PLACENTA, SIGNAL = 1.4; EXPRESSED IN ADULT LIVER, SIGNAL = 1.4; EXPRESSED IN LUNG, SIGNAL = 0.55; EXPRESSED IN FETAL LIVER, SIGNAL = 1.1; EXPRESSED IN BRAIN, SIGNAL =   1; EXPRESSED IN BONE MARROW, SIGNAL = 1.5
SDDDDDDSSDDDDDENDDDDDSDDDDSDDNDDDSDDDDDDDSDDDDDDDSDDDDSDGDDDDDSDGDDDDSDDDDDVDSDGDDDDSDDDDSDDDDDSVDEDLG

SEQ ID NO: 44210 - protein, 103 aa, Homo sapiens
  MAP TO AC005668.1; EXPRESSED IN PLACENTA, SIGNAL = 1.4; EXPRESSED IN ADULT LIVER, SIGNAL = 1.4; EXPRESSED IN LUNG, SIGNAL = 0.55; EXPRESSED IN FETAL LIVER, SIGNAL = 1.1; EXPRESSED IN BRAIN, SIGNAL =   1; EXPRESSED IN BONE MARROW, SIGNAL = 1.5
MVMMTAVMMMMMTAVMMMMMRMMMMMTVMMMTAMTMMMTVMMMMMMTVMMMMMMTVMMMTVMVMMMMTVMVMMMTVMMMMMLTAMVMMMTAMMMTAMTMMTVL

SEQ ID NO: 44211 - protein, 33 aa, Homo sapiens
  MAP TO AC006075.1; EXPRESSED IN PLACENTA, SIGNAL = 1.6; EXPRESSED IN LUNG, SIGNAL = 1.5; EXPRESSED IN BONE MARROW, SIGNAL = 1.4; EXPRESSED IN ADULT LIVER, SIGNAL = 1.6; EXPRESSED IN FETAL LIVER, SIGNAL = 1.5; EXPRESSED IN BRAIN, SIGNAL = 1.3
VFGNSYFHHNFQFAREGRKARNQTYFCTKWQVQ

SEQ ID NO: 44212 - protein, 33 aa, Homo sapiens
  MAP TO AC006075.1; EXPRESSED IN PLACENTA, SIGNAL = 1.6; EXPRESSED IN LUNG, SIGNAL = 1.5; EXPRESSED IN BONE MARROW, SIGNAL = 1.4; EXPRESSED IN ADULT LIVER, SIGNAL = 1.6; EXPRESSED IN FETAL LIVER, SIGNAL = 1.5; EXPRESSED IN BRAIN, SIGNAL = 1.3; SWISSPROT HIT: P24140, EVALUE 8.50e+00
FLEILISIIIFNLPEKEGRHGTKHTFVQNGKCK

SEQ ID NO: 44213 - protein, 145 aa, Homo sapiens
  MAP TO AC005803.1; EXPRESSED IN FETAL LIVER, SIGNAL = 1.2; EXPRESSED IN BONE MARROW, SIGNAL = 1.2; EXPRESSED IN PLACENTA, SIGNAL =   1; EXPRESSED IN LUNG, SIGNAL = 0.94; EXPRESSED IN BRAIN, SIGNAL = 0.98; EXPRESSED IN ADULT LIVER, SIGNAL = 1.3; EST_HUMAN HIT: AA912739.1, EVALUE 2.40e-02; SWISSPROT HIT: P35499, EVALUE 2.00e-56
ADSLAASDEDGEMNNLQIAIGRIKLGIGFAKAFLLGLLHGKILSPKDIMLSLGEADGAGEAGEAGETAPEDEKKEPPEEDLKKDNHILNHMGLADGPPSSLELDHLNFINNPYLTIQVPIASEESDLEMPTEEETDTFSEPEDSK

SEQ ID NO: 44214 - protein, 22 aa, Homo sapiens
  MAP TO AC004529.1; EXPRESSED IN LUNG, SIGNAL =   1; EXPRESSED IN FETAL LIVER, SIGNAL =   1; EXPRESSED IN BRAIN, SIGNAL = 0.91; EXPRESSED IN BONE MARROW, SIGNAL = 0.91; EXPRESSED IN PLACENTA, SIGNAL = 1.1; EXPRESSED IN ADULT LIVER, SIGNAL = 0.95; EST_HUMAN HIT: AI700479.1, EVALUE 4.00e-08
WECKWPTVVKRMSLCGQNGMWM

SEQ ID NO: 44215 - protein, 61 aa, Homo sapiens
  MAP TO AC002303.1; EXPRESSED IN LUNG, SIGNAL = 0.79; EXPRESSED IN BONE MARROW, SIGNAL = 0.75; EXPRESSED IN ADULT LIVER, SIGNAL = 0.68; EXPRESSED IN PLACENTA, SIGNAL = 0.91; EXPRESSED IN FETAL LIVER, SIGNAL = 0.67; EXPRESSED IN BRAIN, SIGNAL = 0.75; EST_HUMAN HIT: BE263559.1, EVALUE 5.00e-18
GLESLGCIRKRWLRKPRPVSLFSTPVVEEVEVPSSLDESPMAFYEPTLDCTLRLGRVFPHE

SEQ ID NO: 44216 - protein, 54 aa, Homo sapiens
  MAP TO AC004067.1; EXPRESSED IN PLACENTA, SIGNAL = 0.94; EXPRESSED IN LUNG, SIGNAL = 0.97; EXPRESSED IN FETAL LIVER, SIGNAL = 1.2; EXPRESSED IN BRAIN, SIGNAL = 0.94; EXPRESSED IN ADULT LIVER, SIGNAL =   1; EXPRESSED IN BONE MARROW, SIGNAL =   1; EST_HUMAN HIT: BE271295.1, EVALUE 2.00e-16
MAAVVRCQEQAQTTDWRATLKTIRNGVHKIDTYLNAALDLLGGEDGLCQYKCSD

SEQ ID NO: 44217 - protein, 40 aa, Homo sapiens
  MAP TO AC004067.1; EXPRESSED IN PLACENTA, SIGNAL = 0.94; EXPRESSED IN LUNG, SIGNAL = 0.97; EXPRESSED IN FETAL LIVER, SIGNAL = 1.2; EXPRESSED IN BRAIN, SIGNAL = 0.94; EXPRESSED IN ADULT LIVER, SIGNAL =   1; EXPRESSED IN BONE MARROW, SIGNAL =   1; EST_HUMAN HIT: BE271295.1, EVALUE 5.60e-02
SPALRAWPCSRAPRSPSCSSSWPLLSGARSRPRPPTGEPP

SEQ ID NO: 44218 - protein, 38 aa, Homo sapiens
  MAP TO AC005670.1; EXPRESSED IN PLACENTA, SIGNAL = 1.1; EXPRESSED IN ADULT LIVER, SIGNAL = 1.4; EXPRESSED IN LUNG, SIGNAL = 1.1; EXPRESSED IN FETAL LIVER, SIGNAL = 1.2; EXPRESSED IN BRAIN, SIGNAL = 1.1; EXPRESSED IN BONE MARROW, SIGNAL =   1; SWISSPROT HIT: Q15532, EVALUE 4.90e+00; EST_HUMAN HIT: BE297805.1, EVALUE 4.30e+00
SHRLPTPGHYNRLGQLPMPRLHSRPINKRVNGRPTHGF

SEQ ID NO: 44219 - protein, 61 aa, Homo sapiens
  MAP TO AC004259.1; EXPRESSED IN LUNG, SIGNAL = 0.76; EXPRESSED IN FETAL LIVER, SIGNAL = 0.8; EXPRESSED IN PLACENTA, SIGNAL = 0.81; EXPRESSED IN BRAIN, SIGNAL = 0.76; EXPRESSED IN BONE MARROW, SIGNAL = 0.61; EXPRESSED IN ADULT LIVER, SIGNAL = 0.83; EST_HUMAN HIT: R85213.1, EVALUE 2.00e-27
LRAVEMKPARMSFVLPVQLFFVWIIMQQLLKPSSFIRLMQNSVILIPPRKEQAQLTLRTRK

SEQ ID NO: 44220 - protein, 55 aa, Homo sapiens
  MAP TO AC005844.7; EXPRESSED IN PLACENTA, SIGNAL = 1.3; EXPRESSED IN LUNG, SIGNAL = 1.4; EXPRESSED IN FETAL LIVER, SIGNAL = 1.5; EXPRESSED IN BRAIN, SIGNAL = 1.3; EXPRESSED IN BONE MARROW, SIGNAL = 1.2; EXPRESSED IN ADULT LIVER, SIGNAL = 1.3; SWISSPROT HIT: P26041, EVALUE 9.20e-01; EST_HUMAN HIT: AI217359.1, EVALUE 3.00e-26
RSENQNKEKSWMLEKDNLMSKIKQYRVQCKKKEDKIGKVLPVMHESHHAQSEYIK

SEQ ID NO: 44221 - protein, 159 aa, Homo sapiens
  MAP TO AC005815.1; EXPRESSED IN PLACENTA, SIGNAL =   1; EXPRESSED IN BONE MARROW, SIGNAL = 0.68; EXPRESSED IN ADULT LIVER, SIGNAL = 0.71; EXPRESSED IN LUNG, SIGNAL = 0.81; EXPRESSED IN FETAL LIVER, SIGNAL = 0.71; EXPRESSED IN BRAIN, SIGNAL = 0.64; SWISSPROT HIT: Q62786, EVALUE 2.00e-05; EST_HUMAN HIT: BE891873.1, EVALUE 2.00e-40
VDTVVPNATVSEKAAFQLDCSIVSRSSQDSRFAVAWYSLRTKAGGKRSSPGLEEQEEEREEEEEEEEEDDDDDDPTERTALLSVGPDAVFGPEGSPWEGRLRFQRLSPVLYRLTVLQASPQDTGNYSCHVEEWLPSPQKEWYRLTEEESAPIGIRVLDT

SEQ ID NO: 44222 - protein, 38 aa, Homo sapiens
  MAP TO AC005815.1; EXPRESSED IN PLACENTA, SIGNAL =   1; EXPRESSED IN BONE MARROW, SIGNAL = 0.68; EXPRESSED IN ADULT LIVER, SIGNAL = 0.71; EXPRESSED IN LUNG, SIGNAL = 0.81; EXPRESSED IN FETAL LIVER, SIGNAL = 0.71; EXPRESSED IN BRAIN, SIGNAL = 0.64; SWISSPROT HIT: Q00560, EVALUE 2.20e+00; EST_HUMAN HIT: H17004.1, EVALUE 6.00e-17
WTQWSPMPRSLRRQLSSWTVASCPAPARTPASLWPGIP

SEQ ID NO: 44223 - protein, 30 aa, Homo sapiens
  MAP TO AC005961.1; EXPRESSED IN ADULT LIVER, SIGNAL = 1.2; EXPRESSED IN FETAL LIVER, SIGNAL = 0.99; EXPRESSED IN BRAIN, SIGNAL = 0.91; EXPRESSED IN BONE MARROW, SIGNAL = 2.8; EXPRESSED IN PLACENTA, SIGNAL = 1.8; EXPRESSED IN LUNG, SIGNAL =   1
HLSYANEVCQGGIHGELQGGAARKIKFVIR

SEQ ID NO: 44224 - protein, 41 aa, Homo sapiens
  MAP TO AC004470.1; EXPRESSED IN BRAIN, SIGNAL = 0.58; EXPRESSED IN ADULT LIVER, SIGNAL = 0.7; EXPRESSED IN LUNG, SIGNAL = 0.76; EXPRESSED IN FETAL LIVER, SIGNAL = 0.7; EXPRESSED IN BONE MARROW, SIGNAL = 0.64; EXPRESSED IN PLACENTA, SIGNAL = 0.65
KEVKLISLLLVLELDNVTFFGQWNDSGSHVSKMLDMLVYDQ

SEQ ID NO: 44225 - protein, 45 aa, Homo sapiens
  MAP TO AC002299.1; EXPRESSED IN PLACENTA, SIGNAL = 0.82; EXPRESSED IN BONE MARROW, SIGNAL = 0.69; EXPRESSED IN ADULT LIVER, SIGNAL = 0.82; EXPRESSED IN FETAL LIVER, SIGNAL = 0.67; EXPRESSED IN LUNG, SIGNAL =   1; EXPRESSED IN BRAIN, SIGNAL = 0.76; EST_HUMAN HIT: BE796426.1, EVALUE 1.00e-19; SWISSPROT HIT: P05127, EVALUE 8.00e-21
SQGTKVPEEKTTNTVSKFDNNGNRDRMKLTDFNFLMVLGKGSFGK

SEQ ID NO: 44226 - protein, 53 aa, Homo sapiens
  MAP TO AC005827.3; EXPRESSED IN LUNG, SIGNAL = 0.84; EXPRESSED IN FETAL LIVER, SIGNAL = 0.67; EXPRESSED IN BRAIN, SIGNAL = 0.95; EXPRESSED IN PLACENTA, SIGNAL = 0.74; EXPRESSED IN BONE MARROW, SIGNAL = 0.65; EXPRESSED IN ADULT LIVER, SIGNAL = 0.79; SWISSPROT HIT: O09061, EVALUE 8.00e+00; EST_HUMAN HIT: AW998252.1, EVALUE 1.70e+00
SKKLPKKHKSHTCFPNLLLISRVYKLANSNAQVTSVIAAFISTAVVKRARKYK

SEQ ID NO: 44227 - protein, 18 aa, Homo sapiens
  MAP TO AC005827.3; EXPRESSED IN LUNG, SIGNAL = 0.84; EXPRESSED IN FETAL LIVER, SIGNAL = 0.67; EXPRESSED IN BRAIN, SIGNAL = 0.95; EXPRESSED IN PLACENTA, SIGNAL = 0.74; EXPRESSED IN BONE MARROW, SIGNAL = 0.65; EXPRESSED IN ADULT LIVER, SIGNAL = 0.79
VKSFPRSTSHIHVFLICF

SEQ ID NO: 44228 - protein, 132 aa, Homo sapiens
  MAP TO AC003117.1; EXPRESSED IN ADULT LIVER, SIGNAL = 0.86; EXPRESSED IN PLACENTA, SIGNAL = 1.1; EXPRESSED IN LUNG, SIGNAL = 0.97; EXPRESSED IN FETAL LIVER, SIGNAL = 0.86; EXPRESSED IN BRAIN, SIGNAL = 0.95; EXPRESSED IN BONE MARROW, SIGNAL =   1; SWISSPROT HIT: Q61704, EVALUE 5.90e-01
MDNIIKEDVNSMQIFTKLSETIVPPINTATVPDNEDGEAKMNIADTAKQTLISVVDSSSLPEVKEEEQSPEDALLRGLQRTATDFYAELQNSTDLGYANGNLVHGSNQKESVFMRLNNRIKALEVNMSLSGR

SEQ ID NO: 44229 - protein, 25 aa, Homo sapiens
  MAP TO AC005772.1; EXPRESSED IN LUNG, SIGNAL = 0.53; EXPRESSED IN BRAIN, SIGNAL = 0.69; EXPRESSED IN ADULT LIVER, SIGNAL = 0.58
VIHDDPVHLFCRNSHLQKAGSHLPS

SEQ ID NO: 44230 - protein, 448 aa, Homo sapiens
  MAP TO AC005666.1; EXPRESSED IN BRAIN, SIGNAL = 0.56; EXPRESSED IN ADULT LIVER, SIGNAL = 0.42; EXPRESSED IN LUNG, SIGNAL = 0.5; SWISSPROT HIT: Q01484, EVALUE 7.00e-04; EST_HUMAN HIT: AA312125.1, EVALUE 1.00e-41
SGPGHYAVPTPRGPETGPRTESSRHSSPHLKSQKTQTLASHASSRQWKVSPPREEAARRGSESKSGREVGHHASSIPDAKSTHQLSFQDQKNNLQSQILEDDPPSKVQNPQGVRVPRRILSYPKDEAVQTEPIQRITTTSEIRSPRSPSLLEHGSSCVSADYQTAQRRVPVEESETGPYGPIPSKPKALYRNMNLDSLLKLSVLKDSDGVHRVSARVDPESLHKYSAYPETKPSAKVLVSSQVESNVRTPIRGNSEVGRRVTISPGVQSVEPTHHVTVPSVSEGSHKSSMFVTPEPIYKQQTQKPPEITYMSQGPTPRYPELSQKPSIHAELELTPRPLPPRSLPRYGPDSSWWPLLNPEVETPQSQLTTPDFEPKCSPSLDLLLSGFKIDSSPFCEDLKFQREKASLSPPSPPKEFPSWAPLSEVPQTPKHTCKQPIQRFTAFFLGM

SEQ ID NO: 44231 - protein, 62 aa, Homo sapiens
  MAP TO AC004594.1; EXPRESSED IN ADULT LIVER, SIGNAL = 0.84; EXPRESSED IN PLACENTA, SIGNAL =   1; EXPRESSED IN FETAL LIVER, SIGNAL = 0.93; EXPRESSED IN BRAIN, SIGNAL =   1; EXPRESSED IN BONE MARROW, SIGNAL = 0.77; EXPRESSED IN LUNG, SIGNAL = 1.1; SWISSPROT HIT: Q08880, EVALUE 5.70e+00; EST_HUMAN HIT: BE386106.1, EVALUE 8.00e-34
GWFSPGQVFVLDEYCARYGVRGCHRHLCYLAELMEHSENGAVIDPTLLHYSFAFCASHVHGN

SEQ ID NO: 44232 - protein, 125 aa, Homo sapiens
  MAP TO AC005695.1; EXPRESSED IN ADULT LIVER, SIGNAL = 0.82; EXPRESSED IN PLACENTA, SIGNAL = 0.71; EXPRESSED IN LUNG, SIGNAL = 1.1; EXPRESSED IN BRAIN, SIGNAL = 0.94; EXPRESSED IN BONE MARROW, SIGNAL = 0.96; EXPRESSED IN FETAL LIVER, SIGNAL = 1.2; EST_HUMAN HIT: BF512861.1, EVALUE 5.60e+00
LGLLALALLLTLLELAQPPRPRVPPLDHQAAFIGHDAALVRRVLRVAQQQVLLEGLDFGTLAGDVPRADPQALVTAADAARALLIHGDDVHRELPPVPRLVRLQDVDLDGCKEAQADGWAPSCCG

SEQ ID NO: 44233 - protein, 51 aa, Homo sapiens
  MAP TO AC003662.1; EXPRESSED IN ADULT LIVER, SIGNAL = 0.52; EXPRESSED IN LUNG, SIGNAL = 0.72; EXPRESSED IN FETAL LIVER, SIGNAL = 0.72; EXPRESSED IN BRAIN, SIGNAL = 0.62; EXPRESSED IN BONE MARROW, SIGNAL = 0.84; SWISSPROT HIT: P34998, EVALUE 9.00e-29; EST_HUMAN HIT: BE294442.1, EVALUE 1.00e-05
GWCRLVTAAYNYFHVTNFFWMFGEGCYLHTAIVLTYSTDRLRKWMFICIGW

SEQ ID NO: 44234 - protein, 43 aa, Homo sapiens
  MAP TO AC003662.1; EXPRESSED IN ADULT LIVER, SIGNAL = 0.52; EXPRESSED IN LUNG, SIGNAL = 0.72; EXPRESSED IN FETAL LIVER, SIGNAL = 0.72; EXPRESSED IN BRAIN, SIGNAL = 0.62; EXPRESSED IN BONE MARROW, SIGNAL = 0.84
GGGVAGLVQVGDSRLQLLPCDQLLLDVRRGLLPAHSHRAHLLH

SEQ ID NO: 44235 - protein, 28 aa, Homo sapiens
  MAP TO AC005739.1; EXPRESSED IN PLACENTA, SIGNAL = 1.1; EXPRESSED IN BRAIN, SIGNAL = 1.1; EXPRESSED IN ADULT LIVER, SIGNAL = 1.4; EXPRESSED IN LUNG, SIGNAL = 1.3; EXPRESSED IN FETAL LIVER, SIGNAL = 1.3; EXPRESSED IN BONE MARROW, SIGNAL = 1.6; EST_HUMAN HIT: BE172857.1, EVALUE 2.00e+00
SFEALKPDFSSTLKIYCFSAATFINDLS

SEQ ID NO: 44236 - protein, 63 aa, Homo sapiens [sequence omitted]

SEQ ID NO: 44237 - protein, 42 aa, Homo sapiens
  MAP TO AC004417.1; EXPRESSED IN PLACENTA, SIGNAL = 0.7; EXPRESSED IN LUNG, SIGNAL = 0.63; EXPRESSED IN BONE MARROW, SIGNAL = 0.6; EXPRESSED IN ADULT LIVER, SIGNAL = 0.63; EXPRESSED IN BRAIN, SIGNAL = 0.64
TSAKPGDTRQSKNKHDPFLRGRTYNMQGEIIVFGTHINKYRT

SEQ ID NO: 44238 - protein, 74 aa, Homo sapiens
  MAP TO AC005683.2; EXPRESSED IN PLACENTA, SIGNAL = 0.71; EXPRESSED IN LUNG, SIGNAL = 0.61; EXPRESSED IN FETAL LIVER, SIGNAL = 0.68; EXPRESSED IN BONE MARROW, SIGNAL = 0.57; EXPRESSED IN ADULT LIVER, SIGNAL = 0.57; EXPRESSED IN BRAIN, SIGNAL = 2.9; SWISSPROT HIT: P35331, EVALUE 1.00e-33; EST_HUMAN HIT: R25521.1, EVALUE 4.00e-24
PLNGFESNGPGLQYKVSWRQKDGDDEWTSVVVANVSKYIVSGTPTFVPYLIKVQALNDMGFAPEPAVVMGHSGE

SEQ ID NO: 44239 - protein, 34 aa, Homo sapiens
  MAP TO AC004112.1; EXPRESSED IN PLACENTA, SIGNAL = 0.85; EXPRESSED IN ADULT LIVER, SIGNAL = 0.85; EXPRESSED IN LUNG, SIGNAL = 0.72; EXPRESSED IN FETAL LIVER, SIGNAL = 0.78; EXPRESSED IN BRAIN, SIGNAL = 0.59; EXPRESSED IN BONE MARROW, SIGNAL = 0.82; SWISSPROT HIT: P18584, EVALUE 2.90e+00
GWSIHMPILSPGNSRGFLEVPFIRSFFSLPCFSG

SEQ ID NO: 44240 - protein, 50 aa, Homo sapiens
  MAP TO AC004127.1; EXPRESSED IN LUNG, SIGNAL =   1; EXPRESSED IN FETAL LIVER, SIGNAL = 1.4; EXPRESSED IN BRAIN, SIGNAL = 0.95; EXPRESSED IN PLACENTA, SIGNAL = 1.2; EXPRESSED IN BONE MARROW, SIGNAL = 1.1; EXPRESSED IN ADULT LIVER, SIGNAL = 1.4; EST_HUMAN HIT: AW103293.1, EVALUE 5.00e-21; SWISSPROT HIT: O95969, EVALUE 4.00e-22
LDFFFISEPLFKLSLAKFDAPPEAVAAKLGVKRCTDQMSLQKRSLIAEVL

SEQ ID NO: 44241 - protein, 28 aa, Homo sapiens
  MAP TO AC005697.1; EXPRESSED IN LUNG, SIGNAL = 0.5; EXPRESSED IN BRAIN, SIGNAL = 0.65; EXPRESSED IN BONE MARROW, SIGNAL = 0.55; EXPRESSED IN ADULT LIVER, SIGNAL = 0.44; EXPRESSED IN FETAL LIVER, SIGNAL = 1.7
MKSVLVLVATLAKITLVFLLSLLRAAHR

SEQ ID NO: 44242 - protein, 25 aa, Homo sapiens
  MAP TO AC004073.1; EXPRESSED IN ADULT LIVER, SIGNAL =   1; EXPRESSED IN PLACENTA, SIGNAL = 0.59; EXPRESSED IN LUNG, SIGNAL = 0.89; EXPRESSED IN BRAIN, SIGNAL = 0.88; EXPRESSED IN BONE MARROW, SIGNAL = 0.78; EXPRESSED IN FETAL LIVER, SIGNAL = 0.82
LLQKFKLQYVTYTCLENMDPCPVAL

SEQ ID NO: 44243 - protein, 75 aa, Homo sapiens
  MAP TO AC006065.3; EXPRESSED IN PLACENTA, SIGNAL = 0.64; EXPRESSED IN FETAL LIVER, SIGNAL = 0.68; EXPRESSED IN BRAIN, SIGNAL = 0.73; EXPRESSED IN BONE MARROW, SIGNAL = 0.6; EXPRESSED IN LUNG, SIGNAL = 0.54; EXPRESSED IN ADULT LIVER, SIGNAL = 0.47; EST_HUMAN HIT: AA868671.1, EVALUE 2.00e-38; SWISSPROT HIT: Q56887, EVALUE 3.60e+00
IMALHDIHLKQDETEQAEKETFLTMFCYEESTFPRSPSKPPIGLIGANWLKGSFQDQAQVQGPKLARTGMTHLFS

SEQ ID NO: 44244 - protein, 38 aa, Homo sapiens
  MAP TO AC004081.1; EXPRESSED IN PLACENTA, SIGNAL = 0.99; EXPRESSED IN BONE MARROW, SIGNAL = 0.76; EXPRESSED IN ADULT LIVER, SIGNAL = 0.85; EXPRESSED IN LUNG, SIGNAL = 0.7; EXPRESSED IN FETAL LIVER, SIGNAL = 0.83; EXPRESSED IN BRAIN, SIGNAL = 0.72; EST_HUMAN HIT: AW513244.1, EVALUE 9.00e-15; SWISSPROT HIT: P54102, EVALUE 2.00e-15
PKRKEVEETDEMDQVELVDFDPNQERWHHYNGEAYEDD

SEQ ID NO: 44245 - protein, 32 aa, Homo sapiens
  MAP TO AC005726.1; EXPRESSED IN ADULT LIVER, SIGNAL = 0.51; EXPRESSED IN LUNG, SIGNAL = 0.56; EXPRESSED IN BRAIN, SIGNAL = 0.62; EXPRESSED IN BONE MARROW, SIGNAL = 0.58; EST_HUMAN HIT: BE544542.1, EVALUE 1.00e-11; SWISSPROT HIT: Q9Z2R6, EVALUE 8.00e-13
LPINRRDLDPNAGRFVRYQFTPAFLRLRQVGA

SEQ ID NO: 44246 - protein, 33 aa, Homo sapiens
  MAP TO AC005726.1; EXPRESSED IN ADULT LIVER, SIGNAL = 0.51; EXPRESSED IN LUNG, SIGNAL = 0.56; EXPRESSED IN BRAIN, SIGNAL = 0.62; EXPRESSED IN BONE MARROW, SIGNAL = 0.58; EST_HUMAN HIT: AW405839.1, EVALUE 1.00e-15; SWISSPROT HIT: Q13094, EVALUE 6.50e+00
VAHQPAGPGPQCWALCPLPVHACLPPPEAGGSH

SEQ ID NO: 44247 - protein, 32 aa, Homo sapiens
  MAP TO AC004580.2; EXPRESSED IN LUNG, SIGNAL = 1.2; EXPRESSED IN FETAL LIVER, SIGNAL = 1.3; EXPRESSED IN BONE MARROW, SIGNAL =   1; EXPRESSED IN PLACENTA, SIGNAL = 1.2; EXPRESSED IN BRAIN, SIGNAL = 1.1; EXPRESSED IN ADULT LIVER, SIGNAL = 1.2; SWISSPROT HIT: Q13304, EVALUE 6.50e+00
DLQPGLVTNRAAAPAEECGDVRAEPAMPEPYM

SEQ ID NO: 44248 - protein, 25 aa, Homo sapiens
  MAP TO AC004580.2; EXPRESSED IN LUNG, SIGNAL = 1.2; EXPRESSED IN FETAL LIVER, SIGNAL = 1.3; EXPRESSED IN BONE MARROW, SIGNAL =   1; EXPRESSED IN PLACENTA, SIGNAL = 1.2; EXPRESSED IN BRAIN, SIGNAL = 1.1; EXPRESSED IN ADULT LIVER, SIGNAL = 1.2
PTVLLPQPRSAGMSGLSQQCLNPTW

SEQ ID NO: 44249 - protein, 28 aa, Homo sapiens
  MAP TO AC006075.1; EXPRESSED IN PLACENTA, SIGNAL = 1.4; EXPRESSED IN LUNG, SIGNAL = 0.88; EXPRESSED IN FETAL LIVER, SIGNAL = 2.8; EXPRESSED IN BONE MARROW, SIGNAL = 1.6; EXPRESSED IN ADULT LIVER, SIGNAL = 1.5; EXPRESSED IN BRAIN, SIGNAL = 1.1
DTSRAEGGDSCSIDHSAIDRASGFDKLL

SEQ ID NO: 44250 - protein, 37 aa, Homo sapiens
  MAP TO AC004029.1; EXPRESSED IN LUNG, SIGNAL = 1.1; EXPRESSED IN FETAL LIVER, SIGNAL = 1.1; EXPRESSED IN BRAIN, SIGNAL = 0.8; EXPRESSED IN BONE MARROW, SIGNAL = 1.4; EXPRESSED IN PLACENTA, SIGNAL = 1.2; EXPRESSED IN ADULT LIVER, SIGNAL = 0.79
LISTKKNLNKTKNKSCWIFDCDCILTVGDEPVILKFF

SEQ ID NO: 44251 - protein, 79 aa, Homo sapiens
  MAP TO AC005961.1; EXPRESSED IN BRAIN, SIGNAL = 0.59; EXPRESSED IN BONE MARROW, SIGNAL = 0.53; EXPRESSED IN LUNG, SIGNAL = 0.5; EXPRESSED IN ADULT LIVER, SIGNAL = 0.44; EST_HUMAN HIT: AI308124.1, EVALUE 3.00e-08
YDFLYEKEHICCLEEWTSPVHQKIYTTFILVILFLLPLMVMLILYSKIGYELWIKKRVGDGSVLRTIHGKEMSKIARSV

SEQ ID NO: 44252 - protein, 72 aa, Homo sapiens
  MAP TO AC004583.1; EXPRESSED IN FETAL LIVER, SIGNAL = 0.76; EXPRESSED IN BRAIN, SIGNAL = 0.94; EXPRESSED IN BONE MARROW, SIGNAL = 0.81; EXPRESSED IN ADULT LIVER, SIGNAL = 0.84; EXPRESSED IN PLACENTA, SIGNAL = 0.7; EXPRESSED IN LUNG, SIGNAL = 0.81; EST_HUMAN HIT: BE741667.1, EVALUE 1.00e-04; SWISSPROT HIT: P21827, EVALUE 1.00e-02
THCLALTEDSEVHSWGSNDQCQHFDTLRVTKPEPAALPGLDTKHIVGIACGPAQVLNIELDLVFWRILVSSC

SEQ ID NO: 44253 - protein, 22 aa, Homo sapiens
  MAP TO AC004142.1; EXPRESSED IN LUNG, SIGNAL = 0.71; EXPRESSED IN BONE MARROW, SIGNAL = 0.53; EXPRESSED IN PLACENTA, SIGNAL = 0.66; EXPRESSED IN BRAIN, SIGNAL = 0.57; EXPRESSED IN ADULT LIVER, SIGNAL = 0.63
TIRLLCASATSVCSHYLSPDSA

SEQ ID NO: 44254 - protein, 32 aa, Homo sapiens
  MAP TO AC004045.1; EXPRESSED IN FETAL LIVER, SIGNAL = 0.83; EXPRESSED IN BRAIN, SIGNAL = 0.69; EXPRESSED IN BONE MARROW, SIGNAL = 0.84; EXPRESSED IN ADULT LIVER, SIGNAL = 0.6; EXPRESSED IN PLACENTA, SIGNAL = 0.82; EXPRESSED IN LUNG, SIGNAL = 0.53; SWISSPROT HIT: O21325, EVALUE 3.80e+00
LLMILWKTFTPSWLTHTLCLLHYLRITNGLQC

SEQ ID NO: 44255 - protein, 44 aa, Homo sapiens
  MAP TO AC004485.1; EXPRESSED IN PLACENTA, SIGNAL = 1.2; EXPRESSED IN FETAL LIVER, SIGNAL = 1.1; EXPRESSED IN BRAIN, SIGNAL = 1.1; EXPRESSED IN BONE MARROW, SIGNAL = 1.1; EXPRESSED IN LUNG, SIGNAL = 1.2; EXPRESSED IN ADULT LIVER, SIGNAL = 0.97; EST_HUMAN HIT: BE145007.1, EVALUE 4.10e+00
GLKNHMWLVAAILDRGIKDIPQKALVSQEVLLLTALVNKVSKRV

SEQ ID NO: 44256 - protein, 33 aa, Homo sapiens
  MAP TO AC005988.1; EXPRESSED IN PLACENTA, SIGNAL =   1; EXPRESSED IN LUNG, SIGNAL = 1.1; EXPRESSED IN FETAL LIVER, SIGNAL =   1; EXPRESSED IN ADULT LIVER, SIGNAL = 0.94; EXPRESSED IN BRAIN, SIGNAL = 1.9; EXPRESSED IN BONE MARROW, SIGNAL = 0.93; EST_HUMAN HIT: BE087536.1, EVALUE 2.00e-11
MKQTSIGTFAAASYILGDRSISELPSGQNPYRA

SEQ ID NO: 44257 - protein, 130 aa, Homo sapiens
  MAP TO AC004590.1; EXPRESSED IN PLACENTA, SIGNAL = 0.63; EXPRESSED IN LUNG, SIGNAL = 0.52; EXPRESSED IN ADULT LIVER, SIGNAL = 0.52; EXPRESSED IN BRAIN, SIGNAL = 0.55; EXPRESSED IN BONE MARROW, SIGNAL = 0.65; SWISSPROT HIT: O54898, EVALUE 5.00e-65; EST_HUMAN HIT: AA910728.1, EVALUE 6.00e-01
ACQSSCKISSPCLKADSGACGPDSCPYCARAGAGEVELADREMPDSDSEAVYEFTQDAQHSDLRDPHSRRQRSLGPDAEPSSVLAFWRLICDTFRKIVDSKYFGRGIMIAILVNTLSMGIEYHEQVGEWA

SEQ ID NO: 44258 - protein, 50 aa, Homo sapiens
  MAP TO AC005886.1; EXPRESSED IN LUNG, SIGNAL =   1; EXPRESSED IN FETAL LIVER, SIGNAL = 0.95; EXPRESSED IN BONE MARROW, SIGNAL = 1.1; EXPRESSED IN PLACENTA, SIGNAL = 1.1; EXPRESSED IN BRAIN, SIGNAL = 0.9; EXPRESSED IN ADULT LIVER, SIGNAL = 0.83
QTYTMMMMMVLMTIMMMMVVMMVIMTFKELKMKCLKEKVLSGWLGDHSSQ

SEQ ID NO: 44259 - protein, 46 aa, Homo sapiens
  MAP TO AC005886.1; EXPRESSED IN LUNG, SIGNAL =   1; EXPRESSED IN FETAL LIVER, SIGNAL = 0.95; EXPRESSED IN BONE MARROW, SIGNAL = 1.1; EXPRESSED IN PLACENTA, SIGNAL = 1.1; EXPRESSED IN BRAIN, SIGNAL = 0.9; EXPRESSED IN ADULT LIVER, SIGNAL = 0.83
SCSANIYDDDDDGVDDDNDDDGSDDGNYDFQRAKNEVLKGEGSVWV

SEQ ID NO: 44260 - protein, 69 aa, Homo sapiens
  MAP TO AC004492.1; EXPRESSED IN PLACENTA, SIGNAL = 1.1; EXPRESSED IN LUNG, SIGNAL = 1.1; EXPRESSED IN FETAL LIVER, SIGNAL = 1.2; EXPRESSED IN BONE MARROW, SIGNAL = 1.1; EXPRESSED IN ADULT LIVER, SIGNAL = 1.2; EXPRESSED IN BRAIN, SIGNAL =   1; EST_HUMAN HIT: AU137665.1, EVALUE 9.00e-26
YDFTPMDSSAVYVLSSMARQRRASLSCGGPGGQDFARSGFSKNCGSPGSSQLSSNSLYAKAVKNHSSGT

SEQ ID NO: 44261 - protein, 24 aa, Homo sapiens
  MAP TO AC004492.1; EXPRESSED IN PLACENTA, SIGNAL = 1.1; EXPRESSED IN LUNG, SIGNAL = 1.1; EXPRESSED IN FETAL LIVER, SIGNAL = 1.2; EXPRESSED IN BONE MARROW, SIGNAL = 1.1; EXPRESSED IN ADULT LIVER, SIGNAL = 1.2; EXPRESSED IN BRAIN, SIGNAL =   1; EST_HUMAN HIT: R08932.1, EVALUE 7.00e-08
SLDHQVLHKTKMHDAGEPYYLTHK

SEQ ID NO: 44262 - protein, 66 aa, Homo sapiens
  MAP TO AC004594.1; EXPRESSED IN PLACENTA, SIGNAL = 0.67; EXPRESSED IN FETAL LIVER, SIGNAL = 0.95; EXPRESSED IN BRAIN, SIGNAL = 0.97; EXPRESSED IN BONE MARROW, SIGNAL = 0.93; EXPRESSED IN ADULT LIVER, SIGNAL = 0.89; EXPRESSED IN LUNG, SIGNAL = 0.72; EST_HUMAN HIT: BF363035.1, EVALUE 2.00e-12; SWISSPROT HIT: Q14451, EVALUE 5.20e-01
LQGGCMFFNAVKEGDTVIFASDDEQDRILWVQAMYRATGQSYKPVPAIQTQKLNPKGGTLHADAQL

SEQ ID NO: 44263 - protein, 27 aa, Homo sapiens
  MAP TO AC004168.2; EXPRESSED IN PLACENTA, SIGNAL = 0.58; EXPRESSED IN LUNG, SIGNAL = 0.69; EXPRESSED IN BONE MARROW, SIGNAL = 0.6; EXPRESSED IN ADULT LIVER, SIGNAL = 0.64; EXPRESSED IN BRAIN, SIGNAL = 0.56; EST_HUMAN HIT: AW302461.1, EVALUE 4.00e-09; SWISSPROT HIT: P52682, EVALUE 3.80e+00
SVQMNHKIDYHSRKIDYHSFIDKKTKA

SEQ ID NO: 44264 - protein, 35 aa, Homo sapiens
  MAP TO AC004601.1; EXPRESSED IN LUNG, SIGNAL = 0.89; EXPRESSED IN ADULT LIVER, SIGNAL = 0.7; EXPRESSED IN PLACENTA, SIGNAL = 0.87; EXPRESSED IN FETAL LIVER, SIGNAL = 0.93; EXPRESSED IN BRAIN, SIGNAL = 0.68; EXPRESSED IN BONE MARROW, SIGNAL = 0.84; EST_HUMAN HIT: BE012071.1, EVALUE 2.00e-05
IIKSSSKVHSFGKRDQAIRRNPNVPVVVRGWLHKQ

SEQ ID NO: 44265 - protein, 36 aa, Homo sapiens
  MAP TO AC004063.1; EXPRESSED IN PLACENTA, SIGNAL = 0.65; EXPRESSED IN LUNG, SIGNAL = 0.45; EXPRESSED IN BONE MARROW, SIGNAL = 0.83; EXPRESSED IN ADULT LIVER, SIGNAL = 0.42; EXPRESSED IN BRAIN, SIGNAL = 0.61
FHCNFYRKFRKITTFNIIEFQVRSDHFQLMNLIEED

SEQ ID NO: 44266 - protein, 22 aa, Homo sapiens
  MAP TO AC004063.1; EXPRESSED IN PLACENTA, SIGNAL = 0.65; EXPRESSED IN LUNG, SIGNAL = 0.45; EXPRESSED IN BONE MARROW, SIGNAL = 0.83; EXPRESSED IN ADULT LIVER, SIGNAL = 0.42; EXPRESSED IN BRAIN, SIGNAL = 0.61
LPLQLLQKVQENNDFQHYRISS

SEQ ID NO: 44267 - protein, 50 aa, Homo sapiens
  MAP TO AC005919.1; EXPRESSED IN PLACENTA, SIGNAL = 0.89; EXPRESSED IN FETAL LIVER, SIGNAL =   1; EXPRESSED IN BRAIN, SIGNAL = 1.5; EXPRESSED IN BONE MARROW, SIGNAL = 0.81; EXPRESSED IN ADULT LIVER, SIGNAL = 0.79; EXPRESSED IN LUNG, SIGNAL = 0.77; EST_HUMAN HIT: AA224052.1, EVALUE 7.00e-21; SWISSPROT HIT: P19012, EVALUE 6.00e-06
ERGLENSLHASEQHYQMQLQDLETVIEGLEKELQEVRRGIEKQLQEHEML

SEQ ID NO: 44268 - protein, 106 aa, Homo sapiens
  MAP TO AC006518.17; EXPRESSED IN BRAIN, SIGNAL = 0.66; EXPRESSED IN PLACENTA, SIGNAL = 0.74; EXPRESSED IN LUNG, SIGNAL = 0.75; EXPRESSED IN BONE MARROW, SIGNAL = 0.82; EXPRESSED IN ADULT LIVER, SIGNAL = 0.56; EST_HUMAN HIT: AI954629.1, EVALUE 2.00e-04
RHTKQIRLHATGFRDPSTEAHMRAIKAVIIFLLLLIVYYPVFLVMTSSALIPQGKLVLMIGDIVTVIFPSSHSFILIMGNSKLREAFLKMLRFVKCFLRRRKPFVP

SEQ ID NO: 44269 - protein, 22 aa, Homo sapiens
  MAP TO AC006518.17; EXPRESSED IN BRAIN, SIGNAL = 0.66; EXPRESSED IN PLACENTA, SIGNAL = 0.74; EXPRESSED IN LUNG, SIGNAL = 0.75; EXPRESSED IN BONE MARROW, SIGNAL = 0.82; EXPRESSED IN ADULT LIVER, SIGNAL = 0.56
PGGDGSLYPLPDLIFLVTFLPS

SEQ ID NO: 44270 - protein, 28 aa, Homo sapiens
  MAP TO AC004383.1; EXPRESSED IN LUNG, SIGNAL = 0.71; EXPRESSED IN BRAIN, SIGNAL = 0.71; EXPRESSED IN BONE MARROW, SIGNAL = 0.62; EXPRESSED IN ADULT LIVER, SIGNAL = 0.64; EST_HUMAN HIT: AA356168.1, EVALUE 1.60e-02
EDEERESKSRGKVEIDQQQLTQQQLNGN

SEQ ID NO: 44271 - protein, 29 aa, Homo sapiens
  MAP TO AC004888.1; EXPRESSED IN LUNG, SIGNAL = 0.65; EXPRESSED IN BRAIN, SIGNAL = 0.62; EXPRESSED IN BONE MARROW, SIGNAL = 0.65; EXPRESSED IN PLACENTA, SIGNAL = 0.92; EXPRESSED IN ADULT LIVER, SIGNAL = 0.59; SWISSPROT HIT: O15055, EVALUE 5.00e+00
EEECKKANKKVRKQEYSQQDGERWKKDPE

SEQ ID NO: 44272 - protein, 25 aa, Homo sapiens
  MAP TO AC006007.1; EXPRESSED IN BONE MARROW, SIGNAL = 2.4; EXPRESSED IN ADULT LIVER, SIGNAL = 3.8; EXPRESSED IN HELA, SIGNAL = 1.6; EXPRESSED IN FETAL LIVER, SIGNAL = 5.6; EXPRESSED IN BRAIN, SIGNAL = 1.3; EXPRESSED IN PLACENTA, SIGNAL = 3.1; EXPRESSED IN LUNG, SIGNAL = 1.2
KVASVIEKKIKVSDGMKIKNWVWAR

SEQ ID NO: 44273 - protein, 41 aa, Homo sapiens
  MAP TO AC002088.1; EXPRESSED IN LUNG, SIGNAL = 1.2; EXPRESSED IN BRAIN, SIGNAL = 1.7; EXPRESSED IN ADULT LIVER, SIGNAL = 0.58; EXPRESSED IN PLACENTA, SIGNAL = 0.97; EXPRESSED IN FETAL LIVER, SIGNAL = 1.4; EXPRESSED IN BONE MARROW, SIGNAL = 1.3; EST_HUMAN HIT: BF305705.1, EVALUE 4.00e-06; SWISSPROT HIT: Q9Z2V6, EVALUE 3.00e-07
EEIQLVHSEHHSLLYGTNPLDGQKLDPRILLGLYGPPLYWE

SEQ ID NO: 44274 - protein, 30 aa, Homo sapiens
  MAP TO AC002088.1; EXPRESSED IN LUNG, SIGNAL = 1.2; EXPRESSED IN BRAIN, SIGNAL = 1.7; EXPRESSED IN ADULT LIVER, SIGNAL = 0.58; EXPRESSED IN PLACENTA, SIGNAL = 0.97; EXPRESSED IN FETAL LIVER, SIGNAL = 1.4; EXPRESSED IN BONE MARROW, SIGNAL = 1.3; SWISSPROT HIT: Q05659, EVALUE 3.80e+00
RKYSLFILNITHCCMAPTPWTDRSWTPGYS

SEQ ID NO: 44275 - protein, 77 aa, Homo sapiens
  MAP TO AC006116.1; EXPRESSED IN BONE MARROW, SIGNAL = 1.3; EXPRESSED IN ADULT LIVER, SIGNAL = 1.2; EXPRESSED IN FETAL LIVER, SIGNAL = 1.3; EXPRESSED IN BRAIN, SIGNAL = 1.3; EXPRESSED IN PLACENTA, SIGNAL = 1.5; EXPRESSED IN LUNG, SIGNAL = 1.4; EST_HUMAN HIT: BF107876.1, EVALUE 1.00e+00; SWISSPROT HIT: O48397, EVALUE 1.60e+00
GRAGAADEERGREKAECEGDKEGVAQSLVAGLDYGSVLVPHKLHKDQNREDRVEQGCACQSQAQSFIIGQEGLLFEK

SEQ ID NO: 44276 - protein, 126 aa, Homo sapiens
  MAP TO AC000134.14; EXPRESSED IN LUNG, SIGNAL = 0.69; EXPRESSED IN BRAIN, SIGNAL = 0.7; EXPRESSED IN ADULT LIVER, SIGNAL = 2.2; EXPRESSED IN PLACENTA, SIGNAL = 0.77; EXPRESSED IN FETAL LIVER, SIGNAL = 0.9; EXPRESSED IN BONE MARROW, SIGNAL = 0.75; SWISSPROT HIT: P31696, EVALUE 3.00e-03; EST_HUMAN HIT: AL079497.1, EVALUE 1.00e-60
QMAGAHMRLEFHNIETGIMTERRFISVVPSNFIGHLSGLVFNGQPYMDQCKDGDITYCELNARFGLRAIVADPVTFKSRSSYLALATLQAYASMHLFFQFKTTAPDGLLLFNSGNGNDFIVIELVK

SEQ ID NO: 44277 - protein, 19 aa, Homo sapiens
  MAP TO AC000134.14; EXPRESSED IN LUNG, SIGNAL = 0.69; EXPRESSED IN BRAIN, SIGNAL = 0.7; EXPRESSED IN ADULT LIVER, SIGNAL = 2.2; EXPRESSED IN PLACENTA, SIGNAL = 0.77; EXPRESSED IN FETAL LIVER, SIGNAL = 0.9; EXPRESSED IN BONE MARROW, SIGNAL = 0.75; EST_HUMAN HIT: AL079497.1, EVALUE 8.00e-05
DRWQEPICGWSSTTLRRAS

SEQ ID NO: 44278 - protein, 32 aa, Homo sapiens
  MAP TO AC005833.1; EXPRESSED IN BRAIN, SIGNAL = 0.95; EXPRESSED IN PLACENTA, SIGNAL = 0.68; EXPRESSED IN LUNG, SIGNAL = 0.73; EXPRESSED IN BONE MARROW, SIGNAL = 0.66; EXPRESSED IN ADULT LIVER, SIGNAL = 0.64; EXPRESSED IN FETAL LIVER, SIGNAL = 0.79
LLGSHVLVLQTCSTQVWEIQHTVRDWGQTNSQ

SEQ ID NO: 44279 - protein, 32 aa, Homo sapiens
  MAP TO AC005833.1; EXPRESSED IN BRAIN, SIGNAL = 0.95; EXPRESSED IN PLACENTA, SIGNAL = 0.68; EXPRESSED IN LUNG, SIGNAL = 0.73; EXPRESSED IN BONE MARROW, SIGNAL = 0.66; EXPRESSED IN ADULT LIVER, SIGNAL = 0.64; EXPRESSED IN FETAL LIVER, SIGNAL = 0.79; EST_HUMAN HIT: BF126989.1, EVALUE 4.50e+00
FWVATCLCSRPVARKCGKSSTLSETGVRPTAS

SEQ ID NO: 44280 - protein, 55 aa, Homo sapiens
  MAP TO AC005839.1; EXPRESSED IN LUNG, SIGNAL = 1.3; EXPRESSED IN FETAL LIVER, SIGNAL = 1.2; EXPRESSED IN PLACENTA, SIGNAL = 1.2; EXPRESSED IN BRAIN, SIGNAL = 3.1; EXPRESSED IN BONE MARROW, SIGNAL = 1.1; EXPRESSED IN ADULT LIVER, SIGNAL = 1.1; SWISSPROT HIT: P36322, EVALUE 4.70e-02; EST_HUMAN HIT: BF664661.1, EVALUE 2.20e+00
MPIGKKPVSLSSLPMTGGVRRSFSGDEELTPPPYRTLPAQTAPEAFPPPSTSREF

SEQ ID NO: 44281 - protein, 51 aa, Homo sapiens
  MAP TO AC006145.2; EXPRESSED IN LUNG, SIGNAL = 1.1; EXPRESSED IN FETAL LIVER, SIGNAL = 0.86; EXPRESSED IN PLACENTA, SIGNAL = 0.91; EXPRESSED IN BRAIN, SIGNAL = 1.1; EXPRESSED IN BONE MARROW, SIGNAL = 0.93; EXPRESSED IN ADULT LIVER, SIGNAL = 0.81; SWISSPROT HIT: P54289, EVALUE 4.00e-25; EST_HUMAN HIT: H86016.1, EVALUE 1.00e-02
IGRFFGEIDPSLMRHLVNISVYAFNKSYDYQSVCEPGAAPKQGAGHRSAYV

SEQ ID NO: 44282 - protein, 36 aa, Homo sapiens
  MAP TO AC005959.1; EXPRESSED IN LUNG, SIGNAL =   1; EXPRESSED IN FETAL LIVER, SIGNAL = 0.87; EXPRESSED IN PLACENTA, SIGNAL = 0.75; EXPRESSED IN BRAIN, SIGNAL = 0.84; EXPRESSED IN BONE MARROW, SIGNAL = 0.84; EXPRESSED IN ADULT LIVER, SIGNAL = 0.75; EST_HUMAN HIT: AI539362.1, EVALUE 5.70e+00
GLNVKILQDPENIHHRAAVNANYGISLPYINQRKAC

SEQ ID NO: 44283 - protein, 80 aa, Homo sapiens
  MAP TO AC004691.1; EXPRESSED IN ADULT LIVER, SIGNAL = 0.98; EXPRESSED IN PLACENTA, SIGNAL = 0.72; EXPRESSED IN FETAL LIVER, SIGNAL = 1.1; EXPRESSED IN BRAIN, SIGNAL = 0.59; EXPRESSED IN BONE MARROW, SIGNAL = 0.69; EXPRESSED IN LUNG, SIGNAL = 0.62; SWISSPROT HIT: P39620, EVALUE 4.50e-01; EST_HUMAN HIT: BE902616.1, EVALUE 4.00e-27
DVLGNFVSSKRPPHKSKPMQTVPGETPVLTSAWEKIDKLHSEPSLDVKRMGENSRPKSGLIVRGMMSGPIASSPQVGLLL

SEQ ID NO: 44284 - protein, 36 aa, Homo sapiens
  MAP TO AC004828.2; EXPRESSED IN BONE MARROW, SIGNAL = 0.87; EXPRESSED IN ADULT LIVER, SIGNAL = 1.1; EXPRESSED IN PLACENTA, SIGNAL = 1.1; EXPRESSED IN FETAL LIVER, SIGNAL = 1.1; EXPRESSED IN BRAIN, SIGNAL = 1.3; EXPRESSED IN LUNG, SIGNAL =   1; SWISSPROT HIT: P56163, EVALUE 2.00e-14; EST_HUMAN HIT: BE378282.1, EVALUE 2.00e-13
PTCLQFTLNMTEAVKTYKWQCIECKSCILCGTSEND

SEQ ID NO: 44285 - protein, 35 aa, Homo sapiens
  MAP TO AC004533.1; EXPRESSED IN BONE MARROW, SIGNAL = 0.79; EXPRESSED IN PLACENTA, SIGNAL = 0.76; EXPRESSED IN LUNG, SIGNAL = 0.86; EXPRESSED IN FETAL LIVER, SIGNAL = 0.69; EXPRESSED IN ADULT LIVER, SIGNAL = 0.75; EXPRESSED IN BRAIN, SIGNAL = 0.9
RRLNLNYFDFFWPNFGDATRHEKEAFLSITHGNKE

SEQ ID NO: 44286 - protein, 54 aa, Homo sapiens
  MAP TO AC004381.1; EXPRESSED IN PLACENTA, SIGNAL = 0.84; EXPRESSED IN FETAL LIVER, SIGNAL = 0.84; EXPRESSED IN BRAIN, SIGNAL =   1; EXPRESSED IN LUNG, SIGNAL =   1; EXPRESSED IN BONE MARROW, SIGNAL = 1.1; EXPRESSED IN ADULT LIVER, SIGNAL = 0.84; SWISSPROT HIT: P46676, EVALUE 2.10e+00; EST_HUMAN HIT: AV687330.1, EVALUE 2.00e-12
AKDILYRLQLSKAKGIVTIDALASEVDSIASQCPSLKTKLLVSDHSREGWLDFR

SEQ ID NO: 44287 - protein, 60 aa, Homo sapiens
  MAP TO AC006515.7; EXPRESSED IN BRAIN, SIGNAL = 0.67; EXPRESSED IN BONE MARROW, SIGNAL = 0.55; EXPRESSED IN ADULT LIVER, SIGNAL = 0.54; EXPRESSED IN LUNG, SIGNAL = 0.57; SWISSPROT HIT: Q15031, EVALUE 6.00e-32; EST_HUMAN HIT: AU132841.1, EVALUE 7.00e-31
LNGGPDVIKWERRVIPGCTRSIYSATGKWTKEYTLQTRKDVEKWWHQRIKEQASKISEAD

SEQ ID NO: 44288 - protein, 70 aa, Homo sapiens
  MAP TO AC004701.1; EXPRESSED IN PLACENTA, SIGNAL = 1.4; EXPRESSED IN LUNG, SIGNAL = 1.1; EXPRESSED IN FETAL LIVER, SIGNAL = 1.1; EXPRESSED IN BRAIN, SIGNAL = 1.4; EXPRESSED IN BONE MARROW, SIGNAL = 1.1; EXPRESSED IN ADULT LIVER, SIGNAL = 1.1; EST_HUMAN HIT: BE165814.1, EVALUE 2.10e-01; SWISSPROT HIT: P19055, EVALUE 3.60e-02
LIDQQDMAQEMLNQCLGLRMLAAFTFCLFVILVLGNQLHAVEGAQTSQWGGPCGEELRSLVNSPFNLPVN

SEQ ID NO: 44289 - protein, 56 aa, Homo sapiens
  MAP TO AC005972.1; EXPRESSED IN BRAIN, SIGNAL = 0.8; EXPRESSED IN ADULT LIVER, SIGNAL = 0.74; EXPRESSED IN BONE MARROW, SIGNAL = 0.77; EXPRESSED IN LUNG, SIGNAL = 0.79; EXPRESSED IN FETAL LIVER, SIGNAL = 0.87; EXPRESSED IN PLACENTA, SIGNAL = 0.8; EST_HUMAN HIT: AA557730.1, EVALUE 2.10e+00; SWISSPROT HIT: P49126, EVALUE 3.50e+00
IEKDPEVPGYAGCQHYEIQCGELEHKVLVDIELPKKTPLSLATMRLAKHKICTIWH

SEQ ID NO: 44290 - protein, 31 aa, Homo sapiens
  MAP TO AC004831.1; EXPRESSED IN ADULT LIVER, SIGNAL = 1.2; EXPRESSED IN BRAIN, SIGNAL = 1.3; EXPRESSED IN BONE MARROW, SIGNAL = 1.3; EXPRESSED IN PLACENTA, SIGNAL = 1.4; EXPRESSED IN LUNG, SIGNAL = 1.5; EXPRESSED IN FETAL LIVER, SIGNAL = 1.2
RTRNFSSNPTLSSQGTGRSSCVPRKRGTWTM

SEQ ID NO: 44291 - protein, 35 aa, Homo sapiens
  MAP TO AC006487.7; EXPRESSED IN LUNG, SIGNAL = 0.77; EXPRESSED IN FETAL LIVER, SIGNAL = 0.79; EXPRESSED IN BRAIN, SIGNAL = 0.7; EXPRESSED IN BONE MARROW, SIGNAL = 0.68; EXPRESSED IN PLACENTA, SIGNAL = 0.72; EXPRESSED IN ADULT LIVER, SIGNAL = 0.68; EST_HUMAN HIT: BE876686.1, EVALUE 3.00e-14; SWISSPROT HIT: O43791, EVALUE 2.00e-15
SQRAYRFVQGKDWGFKKFIRRDFLLDEANGLLPDD

SEQ ID NO: 44292 - protein, 41 aa, Homo sapiens
  MAP TO AC006095.1; EXPRESSED IN BRAIN, SIGNAL = 0.72; EXPRESSED IN ADULT LIVER, SIGNAL = 0.68; EXPRESSED IN FETAL LIVER, SIGNAL = 0.78; EXPRESSED IN BONE MARROW, SIGNAL = 0.82; EXPRESSED IN PLACENTA, SIGNAL = 0.58; EXPRESSED IN LUNG, SIGNAL = 0.81
QPISVSLVTTLSTMTEEFKEENNKGATSVLTKIHPCFGDCY

SEQ ID NO: 44293 - protein, 83 aa, Homo sapiens
  MAP TO AC005996.2; EXPRESSED IN FETAL LIVER, SIGNAL = 0.95; EXPRESSED IN PLACENTA, SIGNAL = 0.94; EXPRESSED IN LUNG, SIGNAL =   1; EXPRESSED IN BRAIN, SIGNAL = 0.9; EXPRESSED IN BONE MARROW, SIGNAL =   1; EXPRESSED IN ADULT LIVER, SIGNAL = 0.95; SWISSPROT HIT: P26444, EVALUE 8.00e-19; EST_HUMAN HIT: AI142108.1, EVALUE 4.00e-14
ITLYEGKHFTGQKLEVFGDCDNFQDRGFMNRVNSIHVESGAWVCFNHPDFRGQQFILEHGDYPDFFRWNSHSDHMGSCRPVGM

SEQ ID NO: 44294 - protein, 37 aa, Homo sapiens [sequence omitted]

SEQ ID NO: 44295 - protein, 60 aa, Homo sapiens
  MAP TO AC004844.1; EXPRESSED IN BRAIN, SIGNAL = 0.84; EXPRESSED IN ADULT LIVER, SIGNAL = 0.98; EXPRESSED IN PLACENTA, SIGNAL = 0.98; EXPRESSED IN FETAL LIVER, SIGNAL = 0.92; EXPRESSED IN BONE MARROW, SIGNAL = 1.6; EXPRESSED IN LUNG, SIGNAL = 1.1; SWISSPROT HIT: P72828, EVALUE 2.00e+00
PVSSAMTRVNDLEKALSPLGKCKTGYKLQEQKNKGKARKPAFWMVWQMQIPSLYTAEPGP

SEQ ID NO: 44296 - protein, 56 aa, Homo sapiens
  MAP TO AC006531.1; EXPRESSED IN BONE MARROW, SIGNAL = 0.6; EXPRESSED IN LUNG, SIGNAL = 0.66; EXPRESSED IN BRAIN, SIGNAL = 0.64; EXPRESSED IN ADULT LIVER, SIGNAL = 0.63; EST_HUMAN HIT: AL118662.1, EVALUE 3.00e-10; SWISSPROT HIT: Q00959, EVALUE 2.00e-29
NSTNEGMNVKKCCKGFCIDILKKLSRTVKFTYDLYLVTNGKHGKKVNNVWNGMIGE

SEQ ID NO: 44297 - protein, 56 aa, Homo sapiens
  MAP TO AC004103.1; EXPRESSED IN BRAIN, SIGNAL = 0.6; EXPRESSED IN PLACENTA, SIGNAL = 0.74; EXPRESSED IN LUNG, SIGNAL = 0.7; EXPRESSED IN BONE MARROW, SIGNAL = 0.62; EXPRESSED IN ADULT LIVER, SIGNAL = 0.73; EXPRESSED IN FETAL LIVER, SIGNAL = 1.2; EST_HUMAN HIT: AA627822.1, EVALUE 4.00e-20; SWISSPROT HIT: Q02878, EVALUE 1.00e-20
TKIHISNVKIPKHLTGIYFKKQQLQKPRHQASEIFDTEKEKYEITEQCKINQKAVD

SEQ ID NO: 44298 - protein, 79 aa, Homo sapiens
  MAP TO AC004551.1; EXPRESSED IN LUNG, SIGNAL = 1.2; EXPRESSED IN BRAIN, SIGNAL = 1.1; EXPRESSED IN BONE MARROW, SIGNAL = 1.1; EXPRESSED IN ADULT LIVER, SIGNAL = 1.2; EXPRESSED IN PLACENTA, SIGNAL = 1.1; EXPRESSED IN FETAL LIVER, SIGNAL = 1.2; EST_HUMAN HIT: BF342233.1, EVALUE 5.00e-39; SWISSPROT HIT: P00973, EVALUE 3.00e-39
GGSSGKGTTLRGRSDADLVVFLSPLTTFQDQLNRRGEFIQEIRRQLEACQRERAFSVKFEVQAPRWGNPRALSFVLSSL

SEQ ID NO: 44299 - protein, 157 aa, Homo sapiens
  MAP TO AC005919.1; EXPRESSED IN PLACENTA, SIGNAL = 0.91; EXPRESSED IN LUNG, SIGNAL = 1.1; EXPRESSED IN FETAL LIVER, SIGNAL = 0.86; EXPRESSED IN BRAIN, SIGNAL =   1; EXPRESSED IN BONE MARROW, SIGNAL = 0.9; EXPRESSED IN ADULT LIVER, SIGNAL = 0.87; SWISSPROT HIT: Q99456, EVALUE 2.00e-11; EST_HUMAN HIT: AU118122.1, EVALUE 1.00e-08
ARVSAGGSSFSSGSRCGLGGSSAQGFRGGASSCSLSGGSSGAFGGSFGGGFGSCSVGGGFGGASGSGTGFGGGSSFGGVSGFGRGSGFCGSSRFSSGATGGFYSYGGGMGGGVGDGGLFSGGEKQTMQNLNDRLANYLDKVRALEEANTDLENKIKE

SEQ ID NO: 44300 - protein, 54 aa, Homo sapiens; identical to SEQ ID NO: 39215
  MAP TO AC004123.1; EXPRESSED IN PLACENTA, SIGNAL = 0.83; EXPRESSED IN BONE MARROW, SIGNAL = 0.95; EXPRESSED IN FETAL LIVER, SIGNAL = 0.9; EXPRESSED IN LUNG, SIGNAL = 0.85; EXPRESSED IN BRAIN, SIGNAL = 0.9; EXPRESSED IN ADULT LIVER, SIGNAL = 0.87

SEQ ID NO: 44301 - protein, 69 aa, Homo sapiens
  MAP TO AC004126.1; EXPRESSED IN PLACENTA, SIGNAL = 0.63; EXPRESSED IN LUNG, SIGNAL = 0.57; EXPRESSED IN FETAL LIVER, SIGNAL = 0.77; EXPRESSED IN BRAIN, SIGNAL = 0.78; EXPRESSED IN BONE MARROW, SIGNAL = 0.72; EXPRESSED IN ADULT LIVER, SIGNAL = 0.95; EST_HUMAN HIT: BE542847.1, EVALUE 9.00e-26
MAASSISSPWGKHVFKAILMVLVALILLHSALAQSRRDFAPPGQQKREAPVDVLTQIGRSVRGTLDAWI

SEQ ID NO: 44302 - protein, 50 aa, Homo sapiens
  MAP TO AC004126.1; EXPRESSED IN PLACENTA, SIGNAL = 0.63; EXPRESSED IN LUNG, SIGNAL = 0.57; EXPRESSED IN FETAL LIVER, SIGNAL = 0.77; EXPRESSED IN BRAIN, SIGNAL = 0.78; EXPRESSED IN BONE MARROW, SIGNAL = 0.72; EXPRESSED IN ADULT LIVER, SIGNAL = 0.95; SWISSPROT HIT: P52369, EVALUE 1.60e+00; EST_HUMAN HIT: BE261272.1, EVALUE 2.00e-24
GSLQHQFTMGKACVQSHSDGPSGPYPPPLSIGPVPSRLCTTRPTEERSPS

SEQ ID NO: 44303 - protein, 37 aa, Homo sapiens
  MAP TO AC005690.7; EXPRESSED IN LUNG, SIGNAL = 0.41; EXPRESSED IN PLACENTA, SIGNAL = 2.1; EXPRESSED IN BRAIN, SIGNAL = 1.1; EXPRESSED IN ADULT LIVER, SIGNAL = 0.86; SWISSPROT HIT: P70662, EVALUE 1.90e-01; EST_HUMAN HIT: AU141400.1, EVALUE 4.00e-17
MSSTPHDPFYSSPFGPFYRRHTPYMVQPEYRIYEMNK

SEQ ID NO: 44304 - protein, 34 aa, Homo sapiens
  MAP TO AC005690.7; EXPRESSED IN LUNG, SIGNAL = 0.41; EXPRESSED IN PLACENTA, SIGNAL = 2.1; EXPRESSED IN BRAIN, SIGNAL = 1.1; EXPRESSED IN ADULT LIVER, SIGNAL = 0.86; EST_HUMAN HIT: R67285.1, EVALUE 2.00e-14
CPAHHMTPSILLLSAHFIGGIHHTWYSQSTESMR

SEQ ID NO: 44305 - protein, 67 aa, Homo sapiens
  MAP TO AC004857.1; EXPRESSED IN LUNG, SIGNAL = 0.75; EXPRESSED IN BRAIN, SIGNAL = 0.74; EXPRESSED IN ADULT LIVER, SIGNAL = 0.84; EXPRESSED IN BONE MARROW, SIGNAL = 0.69; EXPRESSED IN PLACENTA, SIGNAL = 0.78; EXPRESSED IN FETAL LIVER, SIGNAL = 0.74; EST_HUMAN HIT: AI560289.1, EVALUE 7.00e-37; SWISSPROT HIT: P50549, EVALUE 8.00e-38
VYKFVCDPEALFSMAFPDNQRPLLKTDMERHINEEDTVPLSHFDESMAYMPEGGCCNPHPYNEGYVY

SEQ ID NO: 44306 - protein, 118 aa, Homo sapiens
  MAP TO AC004616.1; EXPRESSED IN PLACENTA, SIGNAL = 0.83; EXPRESSED IN LUNG, SIGNAL = 0.94; EXPRESSED IN FETAL LIVER, SIGNAL = 0.99; EXPRESSED IN BRAIN, SIGNAL = 0.87; EXPRESSED IN ADULT LIVER, SIGNAL = 0.83; EXPRESSED IN BONE MARROW, SIGNAL = 0.85; EST_HUMAN HIT: AW995488.1, EVALUE 4.00e-26; SWISSPROT HIT: O02833, EVALUE 1.00e-04
VFKFSYNKLRVITGQTLQGLSNLMRLHIDHNKIEFIHPQAFNGLTSLRLLHLEGNLLHQLHPSTFSTFTFLDYFRLSTIRHLYLAENMVRTLPASMLRNMPLLENLYLQGNPWTCDCE

SEQ ID NO: 44307 - protein, 26 aa, Homo sapiens
  MAP TO AC005884.1; EXPRESSED IN PLACENTA, SIGNAL = 0.59; EXPRESSED IN ADULT LIVER, SIGNAL = 0.56; EXPRESSED IN LUNG, SIGNAL = 0.51; EXPRESSED IN BRAIN, SIGNAL = 0.57; EXPRESSED IN BONE MARROW, SIGNAL = 0.51; EST_HUMAN HIT: AW401433.1, EVALUE 4.00e-08
PPPQISPSKSMGGEFCVAAIFGTSRS

SEQ ID NO: 44308 - protein, 32 aa, Homo sapiens
  MAP TO AC002461.1; EXPRESSED IN LUNG, SIGNAL = 0.49; EXPRESSED IN BRAIN, SIGNAL = 0.78
FCNNGTAFFTLTKVSSTSCSADLDYVRMVNEC

SEQ ID NO: 44309 - protein, 75 aa, Homo sapiens
  MAP TO AC004614.1; EXPRESSED IN PLACENTA, SIGNAL =   2; EXPRESSED IN LUNG, SIGNAL = 0.82; EXPRESSED IN FETAL LIVER, SIGNAL = 0.75; EXPRESSED IN ADULT LIVER, SIGNAL = 0.69; EXPRESSED IN BRAIN, SIGNAL = 0.81; EXPRESSED IN BONE MARROW, SIGNAL = 0.76; SWISSPROT HIT: P45702, EVALUE 1.80e+00; EST_HUMAN HIT: AA249238.1, EVALUE 6.60e-01
ERERKCVQITTEIMSSSWKEVGRIKNGLLEKMLLALRIRRHAPGLGWRWPKNMGTKRAKALRIAAVIVPCGKILF

SEQ ID NO: 44310 - protein, 32 aa, Homo sapiens
  MAP TO AC004614.1; EXPRESSED IN PLACENTA, SIGNAL =   2; EXPRESSED IN LUNG, SIGNAL = 0.82; EXPRESSED IN FETAL LIVER, SIGNAL = 0.75; EXPRESSED IN ADULT LIVER, SIGNAL = 0.69; EXPRESSED IN BRAIN, SIGNAL = 0.81; EXPRESSED IN BONE MARROW, SIGNAL = 0.76; SWISSPROT HIT: P53582, EVALUE 5.00e+00; EST_HUMAN HIT: AA909336.1, EVALUE 7.60e+00
RADNNRDNEFFLEGGWQDQEWPPRENAASVKD

SEQ ID NO: 44311 - protein, 73 aa, Homo sapiens
  MAP TO AC004648.1; EXPRESSED IN LUNG, SIGNAL = 1.7; EXPRESSED IN FETAL LIVER, SIGNAL = 1.5; EXPRESSED IN BRAIN, SIGNAL = 1.5; EXPRESSED IN BONE MARROW, SIGNAL = 1.8; EXPRESSED IN PLACENTA, SIGNAL = 1.5; EXPRESSED IN ADULT LIVER, SIGNAL = 1.7; SWISSPROT HIT: P34903, EVALUE 2.40e+00; EST_HUMAN HIT: BF219096.1, EVALUE 5.80e+00
QLCPPGQMSEKDDSGNASCKGLECIRLVGEEALLQSTFEYRANVTHFHLHRTTRTELHFHLPWNYKRQEWYLW

SEQ ID NO: 44312 - protein, 70 aa, Homo sapiens
  MAP TO AC006070.1; EXPRESSED IN LUNG, SIGNAL = 0.71; EXPRESSED IN BRAIN, SIGNAL = 0.93; EXPRESSED IN BONE MARROW, SIGNAL = 0.72; EXPRESSED IN PLACENTA, SIGNAL = 0.63; EXPRESSED IN ADULT LIVER, SIGNAL = 0.6
CSPCCQPTCCRTTCWKPTTVTTCSSTPCCQPSCCVSSCCQPCCRPTCCQNTCCQPICVTSCCQPSCCSTP

SEQ ID NO: 44313 - protein, 51 aa, Homo sapiens
  MAP TO AC004703.1; EXPRESSED IN LUNG, SIGNAL = 1.4; EXPRESSED IN FETAL LIVER, SIGNAL = 1.2; EXPRESSED IN BRAIN, SIGNAL =   1; EXPRESSED IN BONE MARROW, SIGNAL = 1.2; EXPRESSED IN ADULT LIVER, SIGNAL = 1.5; EXPRESSED IN PLACENTA, SIGNAL = 1.3; EST_HUMAN HIT: AA337931.1, EVALUE 2.00e-07; SWISSPROT HIT: P32491, EVALUE 8.00e+00
PLTTTNVFSVSMDLPTLDISYTNGFMQYVDICVWIPSLSTVFSRFIHVVPC

SEQ ID NO: 44314 - protein, 38 aa, Homo sapiens
  MAP TO AC004842.2; EXPRESSED IN PLACENTA, SIGNAL = 0.61; EXPRESSED IN LUNG, SIGNAL = 0.58; EXPRESSED IN FETAL LIVER, SIGNAL =   1; EXPRESSED IN BRAIN, SIGNAL = 0.61; EXPRESSED IN BONE MARROW, SIGNAL = 0.6; EXPRESSED IN ADULT LIVER, SIGNAL = 0.67
RKPGKGSGPKGESVSTCVHGLWTRQQLREHRQLWAYLI

SEQ ID NO: 44315 - protein, 117 aa, Homo sapiens
  MAP TO AB019439.1; EXPRESSED IN ADULT LIVER, SIGNAL = 0.54; EXPRESSED IN LUNG, SIGNAL = 0.57; EXPRESSED IN BRAIN, SIGNAL = 0.56; EST_HUMAN HIT: BE672445.1, EVALUE 2.00e-57; SWISSPROT HIT: P06331, EVALUE 1.00e-53
VLSQVQLQQWGAGLLKPSETLSLTCAVYGGSFSGYYWSWIRQPPGKGLEWIGEINHSGSTNYNPSLKSRVTISVDTSKNQFSLKLSSVTAADTAVYYCARGTVRGGECEPRQKPPCR

SEQ ID NO: 44316 - protein, 17 aa, Homo sapiens
  MAP TO AC004828.2; EXPRESSED IN LUNG, SIGNAL = 0.78; EXPRESSED IN BONE MARROW, SIGNAL = 0.79; EXPRESSED IN PLACENTA, SIGNAL = 0.71; EXPRESSED IN FETAL LIVER, SIGNAL = 0.82; EXPRESSED IN BRAIN, SIGNAL = 0.88; EXPRESSED IN ADULT LIVER, SIGNAL = 0.81
DFQMQGWNISRTSWAQQ

SEQ ID NO: 44317 - protein, 50 aa, Homo sapiens [sequence omitted]

SEQ ID NO: 44318 - protein, 52 aa, Homo sapiens
  MAP TO AC002059.3; EXPRESSED IN LUNG, SIGNAL = 0.79; EXPRESSED IN FETAL LIVER, SIGNAL = 0.87; EXPRESSED IN BRAIN, SIGNAL = 0.74; EXPRESSED IN BONE MARROW, SIGNAL = 0.8; EXPRESSED IN HELA, SIGNAL = 1.7; EXPRESSED IN PLACENTA, SIGNAL = 0.92; EXPRESSED IN ADULT LIVER, SIGNAL = 0.76; EST_HUMAN HIT: H72503.1, EVALUE 8.50e+00; SWISSPROT HIT: Q11079, EVALUE 2.40e-01
HTLQPRSTSPKAPCGIPQQHQCTDCHYVLLDLVEDLSEYPSVHLEDLMTPEM

SEQ ID NO: 44319 - protein, 39 aa, Homo sapiens
  MAP TO AC004845.1; EXPRESSED IN FETAL LIVER, SIGNAL = 1.1; EXPRESSED IN BONE MARROW, SIGNAL = 0.85; EXPRESSED IN ADULT LIVER, SIGNAL = 0.98; EXPRESSED IN PLACENTA, SIGNAL = 1.1; EXPRESSED IN LUNG, SIGNAL = 0.91; EXPRESSED IN BRAIN, SIGNAL = 1.1
KDRPFPMFQQTPQQQERSLAPPPQNSHSSHSHRHLLREN

SEQ ID NO: 44320 - protein, 24 aa, Homo sapiens
  MAP TO AC004845.1; EXPRESSED IN FETAL LIVER, SIGNAL = 1.1; EXPRESSED IN BONE MARROW, SIGNAL = 0.85; EXPRESSED IN ADULT LIVER, SIGNAL = 0.98; EXPRESSED IN PLACENTA, SIGNAL = 1.1; EXPRESSED IN LUNG, SIGNAL = 0.91; EXPRESSED IN BRAIN, SIGNAL = 1.1
RSTFSHVPANSTAAGEKPGTPSTK

SEQ ID NO: 44321 - protein, 42 aa, Homo sapiens
  MAP TO AC004748.1; EXPRESSED IN PLACENTA, SIGNAL = 0.7; EXPRESSED IN ADULT LIVER, SIGNAL = 0.65; EXPRESSED IN LUNG, SIGNAL = 0.63; EXPRESSED IN BRAIN, SIGNAL = 0.75; EXPRESSED IN BONE MARROW, SIGNAL = 0.58; SWISSPROT HIT: P23265, EVALUE 4.80e+00
VLPNMLLEVMEESNIVTVAGMCPFFLVIVRTSIIILAVAQVE

SEQ ID NO: 44322 - protein, 22 aa, Homo sapiens
  MAP TO AC004748.1; EXPRESSED IN PLACENTA, SIGNAL = 0.7; EXPRESSED IN ADULT LIVER, SIGNAL = 0.65; EXPRESSED IN LUNG, SIGNAL = 0.63; EXPRESSED IN BRAIN, SIGNAL = 0.75; EXPRESSED IN BONE MARROW, SIGNAL = 0.58
RSYGRKQYCHCGRNVSLLSGDC

SEQ ID NO: 44323 - protein, 52 aa, Homo sapiens
  MAP TO AC005920.1; EXPRESSED IN PLACENTA, SIGNAL =   2; EXPRESSED IN ADULT LIVER, SIGNAL = 1.3; EXPRESSED IN LUNG, SIGNAL = 0.93; EXPRESSED IN FETAL LIVER, SIGNAL = 1.4; EXPRESSED IN BRAIN, SIGNAL = 1.5; EXPRESSED IN BONE MARROW, SIGNAL =   1; SWISSPROT HIT: P34609, EVALUE 3.00e-09; EST_HUMAN HIT: BF131060.1, EVALUE 6.00e-26
NKTSGVPGNRPGSVIRVYGDENSDKVTPGTFIPYCSMAHAQLCFHGHRDAVK

SEQ ID NO: 44324 - protein, 20 aa, Homo sapiens
  MAP TO AC005920.1; EXPRESSED IN PLACENTA, SIGNAL =   2; EXPRESSED IN ADULT LIVER, SIGNAL = 1.3; EXPRESSED IN LUNG, SIGNAL = 0.93; EXPRESSED IN FETAL LIVER, SIGNAL = 1.4; EXPRESSED IN BRAIN, SIGNAL = 1.5; EXPRESSED IN BONE MARROW, SIGNAL =   1; EST_HUMAN HIT: AA424071.1, EVALUE 3.00e-03
LVFLLQQIKPQVYQEIVLEV

SEQ ID NO: 44325 - protein, 44 aa, Homo sapiens
  MAP TO AC004676.1; EXPRESSED IN BRAIN, SIGNAL = 0.73; EXPRESSED IN BONE MARROW, SIGNAL = 0.61; EXPRESSED IN PLACENTA, SIGNAL = 0.68; EXPRESSED IN LUNG, SIGNAL = 0.58; EXPRESSED IN ADULT LIVER, SIGNAL = 0.71; EST_HUMAN HIT: BF336745.1, EVALUE 2.00e-11
ASQVVCCGLWVCRDTDLSGRGAAGRGDAGGAPDWLTLAASGQSY

SEQ ID NO: 44326 - protein, 34 aa, Homo sapiens
  MAP TO AC000016.1; EXPRESSED IN LUNG, SIGNAL = 0.65; EXPRESSED IN FETAL LIVER, SIGNAL = 0.87; EXPRESSED IN BRAIN, SIGNAL = 0.68; EXPRESSED IN BONE MARROW, SIGNAL = 0.82; EXPRESSED IN PLACENTA, SIGNAL = 0.76; EXPRESSED IN ADULT LIVER, SIGNAL = 0.8
FDLWYPQGGFWSFSSCSSSPSSLCLFLFPSIHFS

SEQ ID NO: 44327 - protein, 124 aa, Homo sapiens
  MAP TO AC000134.14; EXPRESSED IN PLACENTA, SIGNAL =   1; EXPRESSED IN LUNG, SIGNAL = 0.62; EXPRESSED IN FETAL LIVER, SIGNAL =   1; EXPRESSED IN ADULT LIVER, SIGNAL = 0.68; EXPRESSED IN BRAIN, SIGNAL = 0.57; EXPRESSED IN BONE MARROW, SIGNAL = 0.79; EST_HUMAN HIT: AF001543.1, EVALUE 5.00e-41; SWISSPROT HIT: O14578, EVALUE 8.00e+00
VKRQVLCYQLGPGPGPWQRRIRELQAPATVQSLGLLGDRLCVGAAGGFALYPLLNEAAPLALGAGLVPEELPPSRGGLGEALGAVELSLSEFLLLFTTAGIYVDGAGRKSRGHELLWPAAPMGW

SEQ ID NO: 44328 - protein, 46 aa, Homo sapiens
  MAP TO AC000134.14; EXPRESSED IN PLACENTA, SIGNAL =   1; EXPRESSED IN LUNG, SIGNAL = 0.62; EXPRESSED IN FETAL LIVER, SIGNAL =   1; EXPRESSED IN ADULT LIVER, SIGNAL = 0.68; EXPRESSED IN BRAIN, SIGNAL = 0.57; EXPRESSED IN BONE MARROW, SIGNAL = 0.79; EST_HUMAN HIT: AF001543.1, EVALUE 1.00e-18; SWISSPROT HIT: P13122, EVALUE 8.20e+00
IFQVGECRRVQQLTLSPSAGLLVVLCGRGPSVRLFALAELENIEVA

SEQ ID NO: 44329 - protein, 19 aa, Homo sapiens
  MAP TO AC000134.14; EXPRESSED IN PLACENTA, SIGNAL =   1; EXPRESSED IN LUNG, SIGNAL = 0.62; EXPRESSED IN FETAL LIVER, SIGNAL =   1; EXPRESSED IN ADULT LIVER, SIGNAL = 0.68; EXPRESSED IN BRAIN, SIGNAL = 0.57; EXPRESSED IN BONE MARROW, SIGNAL = 0.79; EST_HUMAN HIT: AF001543.1, EVALUE 2.80e+00
PSPTLQTSSRWGSAGACSS

SEQ ID NO: 44330 - protein, 59 aa, Homo sapiens
  MAP TO AC004881.1; EXPRESSED IN BONE MARROW, SIGNAL = 0.71; EXPRESSED IN ADULT LIVER, SIGNAL = 0.63; EXPRESSED IN PLACENTA, SIGNAL = 0.71; EXPRESSED IN LUNG, SIGNAL = 0.63; EXPRESSED IN BRAIN, SIGNAL = 0.78
TSCLELWHSTRTEKSGSGKDGSERSKKPSTQLESSSTSLTGFHSEISLEMDSIIWSDLD

SEQ ID NO: 44331 - protein, 59 aa, Homo sapiens
  MAP TO AC004881.1; EXPRESSED IN BONE MARROW, SIGNAL = 0.71; EXPRESSED IN ADULT LIVER, SIGNAL = 0.63; EXPRESSED IN PLACENTA, SIGNAL = 0.71; EXPRESSED IN LUNG, SIGNAL = 0.63; EXPRESSED IN BRAIN, SIGNAL = 0.78
SRSDQMIESISREISEWNPVRLVEEDSSCVLGFLLLSEPSLPDPDFSVRVECHSSRHDV

SEQ ID NO: 44332 - protein, 60 aa, Homo sapiens
  MAP TO AC000066.1; EXPRESSED IN LUNG, SIGNAL = 0.61; EXPRESSED IN BRAIN, SIGNAL = 0.6; EXPRESSED IN BONE MARROW, SIGNAL = 0.56; EXPRESSED IN ADULT LIVER, SIGNAL = 0.52; EST_HUMAN HIT: AA620569.1, EVALUE 5.00e-17
LRNSTHSSTAADLLQAKQQILTHQQQLEEQDHLLEDYQKKKEDFTMQISFLQEKIKVYEM

SEQ ID NO: 44333 - protein, 48 aa, Homo sapiens
  MAP TO AC004988.2; EXPRESSED IN BONE MARROW, SIGNAL = 0.9; EXPRESSED IN ADULT LIVER, SIGNAL = 0.88; EXPRESSED IN LUNG, SIGNAL = 0.86; EXPRESSED IN PLACENTA, SIGNAL = 0.91; EXPRESSED IN FETAL LIVER, SIGNAL = 0.97; EXPRESSED IN BRAIN, SIGNAL = 0.93; SWISSPROT HIT: P40603, EVALUE 2.80e+00; EST_HUMAN HIT: AW194828.1, EVALUE 8.80e+00
LALPTVFCIFIYGKSIFPVAQDTNLETTVDCLTVHISLNRNCCSFTAK

SEQ ID NO: 44334 - protein, 87 aa, Homo sapiens; identical to SEQ ID NO: 40309
  MAP TO AC004894.1; EXPRESSED IN PLACENTA, SIGNAL = 0.7; EXPRESSED IN LUNG, SIGNAL = 0.68; EXPRESSED IN BRAIN, SIGNAL = 0.62; EXPRESSED IN BONE MARROW, SIGNAL = 0.72; EXPRESSED IN ADULT LIVER, SIGNAL = 0.74; SWISSPROT HIT: Q99435, EVALUE 3.00e+00

SEQ ID NO: 44335 - protein, 34 aa, Homo sapiens
  MAP TO AC004638.1; EXPRESSED IN PLACENTA, SIGNAL = 0.82; EXPRESSED IN FETAL LIVER, SIGNAL = 0.78; EXPRESSED IN BRAIN, SIGNAL = 0.72; EXPRESSED IN BONE MARROW, SIGNAL = 0.65; EXPRESSED IN LUNG, SIGNAL = 0.86; EXPRESSED IN ADULT LIVER, SIGNAL = 0.71; SWISSPROT HIT: P32381, EVALUE 4.90e+00
CIAVEKSLNSRNFSKLLHSCPYQCDRHKVIVEAE

SEQ ID NO: 44336 - protein, 123 aa, Homo sapiens
  MAP TO AB003151.1; EXPRESSED IN LUNG, SIGNAL = 0.65; EXPRESSED IN FETAL LIVER, SIGNAL = 0.71; EXPRESSED IN BRAIN, SIGNAL = 0.98; EXPRESSED IN PLACENTA, SIGNAL = 0.8; EXPRESSED IN BONE MARROW, SIGNAL = 0.72; EXPRESSED IN ADULT LIVER, SIGNAL = 0.59; EST_HUMAN HIT: BE408293.1, EVALUE 1.00e-47; SWISSPROT HIT: O75828, EVALUE 1.00e-48
MSSCSRVALVTGANRGIGLAIARELCRQFSGDVVLTARDVARGQAAVQQLQAEGLSPRFHQLDIDDLQSIRALRDFLRKEYGGLNVLVNNAAVAFKSRCRAWVGAPWSAPRVRRWPAAGSPPV

SEQ ID NO: 44337 - protein, 19 aa, Homo sapiens
  MAP TO AC004782.1; EXPRESSED IN PLACENTA, SIGNAL = 0.84; EXPRESSED IN LUNG, SIGNAL = 0.84; EXPRESSED IN FETAL LIVER, SIGNAL = 0.95; EXPRESSED IN ADULT LIVER, SIGNAL = 0.87; EXPRESSED IN BRAIN, SIGNAL = 0.91; EXPRESSED IN BONE MARROW, SIGNAL = 0.88; EST_HUMAN HIT: BE387315.1, EVALUE 3.00e-03
MDIKFQNIVIEILIENHEK

SEQ ID NO: 44338 - protein, 62 aa, Homo sapiens
  MAP TO AC006241.1; EXPRESSED IN PLACENTA, SIGNAL = 1.1; EXPRESSED IN LUNG, SIGNAL =   1; EXPRESSED IN FETAL LIVER, SIGNAL = 0.89; EXPRESSED IN BONE MARROW, SIGNAL = 0.95; EXPRESSED IN BRAIN, SIGNAL =   1; EXPRESSED IN ADULT LIVER, SIGNAL = 0.86; EST_HUMAN HIT: AW953898.1, EVALUE 7.00e+00
KPRSSHWSARPMWSSPCCLSDLSSCCSHSALPHKPPCFFSDRSGFRLCSRCSHRQECCLSEF

SEQ ID NO: 44339 - protein, 51 aa, Homo sapiens
  MAP TO AC004857.1; EXPRESSED IN LUNG, SIGNAL = 0.54; EXPRESSED IN BONE MARROW, SIGNAL = 0.69; EXPRESSED IN PLACENTA, SIGNAL = 0.59; EXPRESSED IN BRAIN, SIGNAL = 0.57; EXPRESSED IN ADULT LIVER, SIGNAL = 0.42; SWISSPROT HIT: P50549, EVALUE 6.00e-26; EST_HUMAN HIT: AL120951.1, EVALUE 7.00e-25
PGMYREGPTYQRRGSLQLWQFLVALLDDPSNSHFIAWTGRGMEFKLIEPEE

SEQ ID NO: 44340 - protein, 29 aa, Homo sapiens
  MAP TO AC005920.1; EXPRESSED IN BONE MARROW, SIGNAL = 0.9; EXPRESSED IN PLACENTA, SIGNAL = 0.9; EXPRESSED IN LUNG, SIGNAL = 0.69; EXPRESSED IN FETAL LIVER, SIGNAL = 0.88; EXPRESSED IN ADULT LIVER, SIGNAL = 0.88; EXPRESSED IN BRAIN, SIGNAL = 1.3
MGGSATPGHWTGATLTEPVRSQTMARHSP

SEQ ID NO: 44341 - protein, 157 aa, Homo sapiens
  MAP TO AC003661.1; EXPRESSED IN BONE MARROW, SIGNAL = 0.9; EXPRESSED IN ADULT LIVER, SIGNAL = 0.88; EXPRESSED IN LUNG, SIGNAL = 0.98; EXPRESSED IN PLACENTA, SIGNAL = 0.83; EXPRESSED IN FETAL LIVER, SIGNAL = 0.73; EXPRESSED IN BRAIN, SIGNAL = 1.6; SWISSPROT HIT: P52850, EVALUE 1.00e-04; EST_HUMAN HIT: F07258.1, EVALUE 2.00e-27
VLGRAGPPQPRRARRLLFAFTLSLSCTYLCYSFLCCCDDLGRSRLLGAPRCLRGPSAGGQKLLQKSRPCDPSGPTPSEPSAPSAPAAAVPAPRLSGSNHSGSPKLGTKRLPQALIVGVKKGGTRAVLEFIRVHPDVRALGTEPHFFDRNYGRGLDWY

SEQ ID NO: 44342 - protein, 44 aa, Homo sapiens
  MAP TO AC001228.1; EXPRESSED IN LUNG, SIGNAL = 0.67; EXPRESSED IN BRAIN, SIGNAL = 0.76; EXPRESSED IN BONE MARROW, SIGNAL = 0.58; EXPRESSED IN FETAL LIVER, SIGNAL = 0.84; EXPRESSED IN ADULT LIVER, SIGNAL = 0.91; SWISSPROT HIT: P53852, EVALUE 4.00e-05; EST_HUMAN HIT: AW882761.1, EVALUE 1.00e-18
GLPTHDMEGKELSKGQAKKLKKLFEAQEKLYKEYLQMAQNGSFQ

SEQ ID NO: 44343 - protein, 98 aa, Homo sapiens
  MAP TO AB019438.1; EXPRESSED IN ADULT LIVER, SIGNAL = 0.6; EXPRESSED IN LUNG, SIGNAL = 0.44; EXPRESSED IN BRAIN, SIGNAL = 0.6; EXPRESSED IN BONE MARROW, SIGNAL = 0.5; SWISSPROT HIT: P19181, EVALUE 3.00e-46; EST_HUMAN HIT: AW402542.1, EVALUE 1.00e-44
GLIQPGGSLRLSCAASGFTVSSNYMSWVRQAPGKGLEWVSVIYSGGSTYYADSVKGRFTISRDNSKNTLYLQMNSLRAEDTAVYYCARDTVRGSHCAP

SEQ ID NO: 44344 - protein, 136 aa, Homo sapiens
  MAP TO AC005004.1; EXPRESSED IN PLACENTA, SIGNAL = 0.77; EXPRESSED IN LUNG, SIGNAL = 0.7; EXPRESSED IN FETAL LIVER, SIGNAL = 1.2; EXPRESSED IN BRAIN, SIGNAL = 0.65; EXPRESSED IN BONE MARROW, SIGNAL = 0.78; EXPRESSED IN ADULT LIVER, SIGNAL = 0.67; SWISSPROT HIT: P09067, EVALUE 5.10e-01; EST_HUMAN HIT: BF340203.1, EVALUE 2.70e+00
ELYSELPVSVSRELHADPEPSVIPDVKPGASSSLLSQNRALPLELQRTHVESCCEETYETLDHGSEPGRCGLVDSTAGGSVASGILDRAKRSESMEPKVFRDPGGQAGIIREPSEGAKEDPHQHSTAAEEKTSPSQ

SEQ ID NO: 44345 - protein, 25 aa, Homo sapiens
  MAP TO AC005004.1; EXPRESSED IN PLACENTA, SIGNAL = 0.77; EXPRESSED IN LUNG, SIGNAL = 0.7; EXPRESSED IN FETAL LIVER, SIGNAL = 1.2; EXPRESSED IN BRAIN, SIGNAL = 0.65; EXPRESSED IN BONE MARROW, SIGNAL = 0.78; EXPRESSED IN ADULT LIVER, SIGNAL = 0.67
SWIGQREARAWSQRSSEIQGARQEL

SEQ ID NO: 44346 - protein, 27 aa, Homo sapiens
  MAP TO AC002302.1; EXPRESSED IN BRAIN, SIGNAL =   1; EXPRESSED IN BONE MARROW, SIGNAL = 1.2; EXPRESSED IN ADULT LIVER, SIGNAL = 1.1; EXPRESSED IN PLACENTA, SIGNAL = 0.86; EXPRESSED IN FETAL LIVER, SIGNAL = 1.2; EXPRESSED IN LUNG, SIGNAL = 1.1; SWISSPROT HIT: P04411, EVALUE 3.00e-09; EST_HUMAN HIT: AW016184.1, EVALUE 4.00e-08
VVHKRCHEFVTFSCPGADKGPASDVSN

SEQ ID NO: 44347 - protein, 63 aa, Homo sapiens
  MAP TO AC002089.1; EXPRESSED IN LUNG, SIGNAL = 0.99; EXPRESSED IN FETAL LIVER, SIGNAL = 1.7; EXPRESSED IN BONE MARROW, SIGNAL = 0.93; EXPRESSED IN PLACENTA, SIGNAL = 0.91; EXPRESSED IN BRAIN, SIGNAL = 1.3; EXPRESSED IN ADULT LIVER, SIGNAL = 0.68; SWISSPROT HIT: P47429, EVALUE 8.90e-01; EST_HUMAN HIT: BF329750.1, EVALUE 4.50e+00
ALDREDILMKTIFNILLVYIFLIFEADSMYRVKVPEYRTTHRVYPEVAVSSQGKASETKVVQF

SEQ ID NO: 44348 - protein, 33 aa, Homo sapiens
  MAP TO AC005044.1; EXPRESSED IN LUNG, SIGNAL = 0.59; EXPRESSED IN BRAIN, SIGNAL = 0.69; EXPRESSED IN ADULT LIVER, SIGNAL = 0.56; EST_HUMAN HIT: AA687472.1, EVALUE 5.00e-12
EELRWVRAGRLASRTLSFRPVQIYGHRSLATPT

SEQ ID NO: 44349 - protein, 62 aa, Homo sapiens
  MAP TO AC005495.1; EXPRESSED IN PLACENTA, SIGNAL = 1.4; EXPRESSED IN LUNG, SIGNAL = 1.3; EXPRESSED IN BRAIN, SIGNAL = 1.1; EXPRESSED IN FETAL LIVER, SIGNAL = 1.2; EXPRESSED IN BONE MARROW, SIGNAL = 1.2; EXPRESSED IN ADULT LIVER, SIGNAL = 1.4; EST_HUMAN HIT: BF352883.1, EVALUE 7.00e-13
IALAFLMSVLIRKPMLAGLAGFLFTVFWGCLGFTVLYRQLPLSLGWVLSLLSPFAFTAGMAQ

SEQ ID NO: 44350 - protein, 83 aa, Homo sapiens
  MAP TO AC002549.1; EXPRESSED IN BONE MARROW, SIGNAL =  11; EXPRESSED IN ADULT LIVER, SIGNAL = 2.1; EXPRESSED IN PLACENTA, SIGNAL = 5.4; EXPRESSED IN LUNG, SIGNAL = 0.8; EXPRESSED IN BRAIN, SIGNAL = 0.64; EST_HUMAN HIT: BE778068.1, EVALUE 7.80e-01; SWISSPROT HIT: P17965, EVALUE 3.70e+00
PRAALEGTEGALEAPSAGGLIPEQVALLLVGWQGGNPSVSGVRAVCCPRLALGAFPAVQGEQRRPVTSMKTPPVVGREAASLG

SEQ ID NO: 44351 - protein, 40 aa, Homo sapiens
  MAP TO AC002549.1; EXPRESSED IN BONE MARROW, SIGNAL =  11; EXPRESSED IN ADULT LIVER, SIGNAL = 2.1; EXPRESSED IN PLACENTA, SIGNAL = 5.4; EXPRESSED IN LUNG, SIGNAL = 0.8; EXPRESSED IN BRAIN, SIGNAL = 0.64
SHSRHRWVSALPSDQKEGNLLRDEASSARCLQGSFGTFQG

SEQ ID NO: 44352 - protein, 25 aa, Homo sapiens
  MAP TO AC002557.1; EXPRESSED IN BRAIN, SIGNAL = 0.85; EXPRESSED IN LUNG, SIGNAL = 0.54
SAAMKGSASVSQTGQAKTAVSITPC

SEQ ID NO: 44353 - protein, 26 aa, Homo sapiens
  MAP TO AC002557.1; EXPRESSED IN BRAIN, SIGNAL = 0.85; EXPRESSED IN LUNG, SIGNAL = 0.54; EST_HUMAN HIT: AL135156.1, EVALUE 7.00e-03; SWISSPROT HIT: P22105, EVALUE 1.50e-01
VCSNEGKCICQPDWTGKDCSIHNPLP

SEQ ID NO: 44354 - protein, 44 aa, Homo sapiens
  MAP TO AC002117.1; EXPRESSED IN LUNG, SIGNAL = 0.5; EXPRESSED IN BONE MARROW, SIGNAL = 0.69; EXPRESSED IN BRAIN, SIGNAL = 0.62; EXPRESSED IN ADULT LIVER, SIGNAL = 0.45; EST_HUMAN HIT: BE243003.1, EVALUE 8.00e-20; SWISSPROT HIT: P22055, EVALUE 3.70e+00
SLRSSFNPFWDFSSESTIPGVRASPQEPCSVVAPWLSQTKQRKD

SEQ ID NO: 44355 - protein, 27 aa, Homo sapiens
  MAP TO AC004746.1; EXPRESSED IN PLACENTA, SIGNAL = 0.96; EXPRESSED IN FETAL LIVER, SIGNAL = 1.1; EXPRESSED IN BRAIN, SIGNAL = 1.2; EXPRESSED IN BONE MARROW, SIGNAL = 0.99; EXPRESSED IN ADULT LIVER, SIGNAL =   1; EXPRESSED IN LUNG, SIGNAL = 1.1; EST_HUMAN HIT: AI681483.1, EVALUE 7.00e-01
SFQRVLYGNVGKSNFTVEKPEKHHPIK

SEQ ID NO: 44356 - protein, 93 aa, Homo sapiens
  MAP TO AC003106.1; EXPRESSED IN BONE MARROW, SIGNAL = 0.72; EXPRESSED IN BRAIN, SIGNAL = 0.78; EXPRESSED IN ADULT LIVER, SIGNAL = 0.59; EXPRESSED IN PLACENTA, SIGNAL = 0.62; EXPRESSED IN LUNG, SIGNAL = 0.61; EXPRESSED IN FETAL LIVER, SIGNAL = 0.95; SWISSPROT HIT: P75881, EVALUE 4.10e+00; EST_HUMAN HIT: BF055347.1, EVALUE 2.50e+00
LVQKHYITMSLSVLFQTLSRIIPGPIISTSVKDLIKAGKNKNGNKLHPKLQLCMHVLSTHTLLRKMPGTRTFLYEKINSSVNFVIQRRSMIKY

SEQ ID NO: 44357 - protein, 48 aa, Homo sapiens
  MAP TO AC005730.1; EXPRESSED IN BONE MARROW, SIGNAL = 0.76; EXPRESSED IN ADULT LIVER, SIGNAL = 0.64; EXPRESSED IN PLACENTA, SIGNAL = 0.69; EXPRESSED IN LUNG, SIGNAL = 0.74; EXPRESSED IN BRAIN, SIGNAL = 0.75; SWISSPROT HIT: O08899, EVALUE 2.10e+00; EST_HUMAN HIT: AU121472.1, EVALUE 9.00e-21
QTQETKSSLSKTLEQVLHDTIVLPYFIQFMELRRMEHLVKFWLEAESF

SEQ ID NO: 44358 - protein, 22 aa, Homo sapiens
  MAP TO AC005858.1; EXPRESSED IN PLACENTA, SIGNAL = 0.59; EXPRESSED IN LUNG, SIGNAL = 0.71; EXPRESSED IN BRAIN, SIGNAL = 0.81; EXPRESSED IN BONE MARROW, SIGNAL = 0.72; EXPRESSED IN ADULT LIVER, SIGNAL = 0.61
LELWEQWEKVLNNIVRKGNGSQ

SEQ ID NO: 44359 - protein, 53 aa, Homo sapiens
  MAP TO AC005863.1; EXPRESSED IN BONE MARROW, SIGNAL = 0.94; EXPRESSED IN ADULT LIVER, SIGNAL = 0.89; EXPRESSED IN PLACENTA, SIGNAL = 2.8; EXPRESSED IN LUNG, SIGNAL =   1; EXPRESSED IN FETAL LIVER, SIGNAL = 0.85; EXPRESSED IN BRAIN, SIGNAL = 0.85; SWISSPROT HIT: P14771, EVALUE 6.10e+00; EST_HUMAN HIT: N24269.1, EVALUE 9.00e-06
LLNFQMNFWTSSSISVSKPTGILIRIMLNLWVNFRSTVILTMTNLIYEDGVST

SEQ ID NO: 44360 - protein, 38 aa, Homo sapiens
  MAP TO AC006375.2; EXPRESSED IN PLACENTA, SIGNAL = 1.1; EXPRESSED IN LUNG, SIGNAL = 1.2; EXPRESSED IN FETAL LIVER, SIGNAL = 0.96; EXPRESSED IN BONE MARROW, SIGNAL = 0.95; EXPRESSED IN BRAIN, SIGNAL = 1.3; EXPRESSED IN ADULT LIVER, SIGNAL = 1.1; EST_HUMAN HIT: AW887542.1, EVALUE 9.00e-07; SWISSPROT HIT: Q9QYM0, EVALUE 8.40e+00
STPKHVAMTFALDQSTFALIRPLPPFGNHIGNHCFGHA

SEQ ID NO: 44361 - protein, 53 aa, Homo sapiens
  MAP TO AC004954.1; EXPRESSED IN PLACENTA, SIGNAL = 0.83; EXPRESSED IN LUNG, SIGNAL = 0.79; EXPRESSED IN BRAIN, SIGNAL = 0.68; EXPRESSED IN BONE MARROW, SIGNAL = 0.72; EXPRESSED IN ADULT LIVER, SIGNAL = 0.77; EST_HUMAN HIT: N46508.1, EVALUE 2.20e+00; SWISSPROT HIT: Q49378, EVALUE 2.40e-01
HRFYGLRLKILWDHSPTVCEKEGEKNSCGPRGTAAQGSLLLPQPGPRVTDLLG

SEQ ID NO: 44362 - protein, 27 aa, Homo sapiens
  MAP TO AC005273.1; EXPRESSED IN PLACENTA, SIGNAL = 0.81; EXPRESSED IN LUNG, SIGNAL = 0.82; EXPRESSED IN BRAIN, SIGNAL = 0.7; EXPRESSED IN ADULT LIVER, SIGNAL = 0.67
TFIQMLFMSQIIKKEILIKNKGMGSEM

SEQ ID NO: 44363 - protein, 37 aa, Homo sapiens
  MAP TO AC003077.1; EXPRESSED IN LUNG, SIGNAL = 0.7; EXPRESSED IN BRAIN, SIGNAL = 0.64; EXPRESSED IN BONE MARROW, SIGNAL = 0.71; EXPRESSED IN PLACENTA, SIGNAL = 0.62; EXPRESSED IN ADULT LIVER, SIGNAL = 0.68
AQILEFGLAVHEKFVPQDMRPLHKKLVDQFFVMKSSL

SEQ ID NO: 44364 - protein, 33 aa, Homo sapiens
  MAP TO AC004896.1; EXPRESSED IN ADULT LIVER, SIGNAL = 0.88; EXPRESSED IN PLACENTA, SIGNAL = 1.3; EXPRESSED IN LUNG, SIGNAL = 1.6; EXPRESSED IN BRAIN, SIGNAL = 1.1; EXPRESSED IN FETAL LIVER, SIGNAL =   1; EXPRESSED IN BONE MARROW, SIGNAL = 0.91; EST_HUMAN HIT: AW051748.1, EVALUE 4.00e-06
IYEPSCEAYKHLGQTSNYYWIDPDGSGPLGPLK

SEQ ID NO: 44365 - protein, 52 aa, Homo sapiens
  MAP TO AC004994.1; EXPRESSED IN LUNG, SIGNAL = 0.68; EXPRESSED IN FETAL LIVER, SIGNAL =   4; EXPRESSED IN BRAIN, SIGNAL =   1; EXPRESSED IN BONE MARROW, SIGNAL = 0.72; EXPRESSED IN ADULT LIVER, SIGNAL = 0.67; EXPRESSED IN PLACENTA, SIGNAL = 0.78; SWISSPROT HIT: P41500, EVALUE 5.40e-01; EST_HUMAN HIT: BE002252.1, EVALUE 2.90e+00
KGPKAQDPTAKKYHNQDWHQSSSSPVHRAAFHNMVCMYLDKKTEYSSAGVNK

SEQ ID NO: 44366 - protein, 29 aa, Homo sapiens
  MAP TO AC004864.1; EXPRESSED IN LUNG, SIGNAL = 0.52; EXPRESSED IN BRAIN, SIGNAL = 0.66; EXPRESSED IN BONE MARROW, SIGNAL = 0.53; EXPRESSED IN ADULT LIVER, SIGNAL = 0.45; EXPRESSED IN PLACENTA, SIGNAL = 0.69; EST_HUMAN HIT: BE535923.1, EVALUE 2.70e+00
TCDYTRTTWIAKDNPVPRLIRLIRLNHIC

SEQ ID NO: 44367 - protein, 38 aa, Homo sapiens
  MAP TO AC005968.1; EXPRESSED IN BRAIN, SIGNAL = 0.64; EXPRESSED IN BONE MARROW, SIGNAL = 0.52; EXPRESSED IN ADULT LIVER, SIGNAL = 0.46; EXPRESSED IN LUNG, SIGNAL = 0.49; EST_HUMAN HIT: BE270533.1, EVALUE 5.60e+00
MVDPSENVKVFITTGSIENAFMKVWICFQKLRKAKTLI

SEQ ID NO: 44368 - protein, 62 aa, Homo sapiens
  MAP TO AC005078.1; EXPRESSED IN PLACENTA, SIGNAL = 0.59; EXPRESSED IN BONE MARROW, SIGNAL = 0.58; EXPRESSED IN ADULT LIVER, SIGNAL = 0.62; EXPRESSED IN LUNG, SIGNAL = 0.64; EXPRESSED IN BRAIN, SIGNAL = 0.62; EST_HUMAN HIT: BF369731.1, EVALUE 1.00e-28; SWISSPROT HIT: P39057, EVALUE 5.00e-19
TETARLRYFMELLLEKGKPLMLVGNAGVGKTVFVGDTLASLSEDYIVSRVPFNYYTTSTALQ

SEQ ID NO: 44369 - protein, 19 aa, Homo sapiens
  MAP TO AC005078.1; EXPRESSED IN PLACENTA, SIGNAL = 0.59; EXPRESSED IN BONE MARROW, SIGNAL = 0.58; EXPRESSED IN ADULT LIVER, SIGNAL = 0.62; EXPRESSED IN LUNG, SIGNAL = 0.64; EXPRESSED IN BRAIN, SIGNAL = 0.62; EST_HUMAN HIT: BF369731.1, EVALUE 4.00e-04
QRQLVLDISWSCCLRKENL

SEQ ID NO: 44370 - protein, 54 aa, Homo sapiens
  MAP TO AC004028.1; EXPRESSED IN PLACENTA, SIGNAL = 0.61; EXPRESSED IN LUNG, SIGNAL = 0.77; EXPRESSED IN BRAIN, SIGNAL = 0.57; EXPRESSED IN ADULT LIVER, SIGNAL = 0.59; EXPRESSED IN BONE MARROW, SIGNAL = 0.63; EST_HUMAN HIT: AW078968.1, EVALUE 5.60e-01; SWISSPROT HIT: Q55610, EVALUE 3.50e+00
DAICMNDHVKALKTVFGIEKMKHRLALLHRILLTVLIKEKTKFKQNLRMFCPYS

SEQ ID NO: 44371 - protein, 32 aa, Homo sapiens
  MAP TO AC006241.1; EXPRESSED IN LUNG, SIGNAL = 0.82; EXPRESSED IN BRAIN, SIGNAL = 0.58; EXPRESSED IN ADULT LIVER, SIGNAL = 0.6; EXPRESSED IN BONE MARROW, SIGNAL = 0.56; EXPRESSED IN PLACENTA, SIGNAL = 0.78; EST_HUMAN HIT: BE908760.1, EVALUE 2.60e-02
DGKYEESQEGDQRLRGAPGRVGRRRVTEPTLR

SEQ ID NO: 44372 - protein, 25 aa, Homo sapiens
  MAP TO AC006241.1; EXPRESSED IN LUNG, SIGNAL = 0.82; EXPRESSED IN BRAIN, SIGNAL = 0.58; EXPRESSED IN ADULT LIVER, SIGNAL = 0.6; EXPRESSED IN BONE MARROW, SIGNAL = 0.56; EXPRESSED IN PLACENTA, SIGNAL = 0.78; EST_HUMAN HIT: BE908760.1, EVALUE 3.00e-07
MESMKKVKKVTNGSVEPQGEWEGAV

SEQ ID NO: 44373 - protein, 141 aa, Homo sapiens
  MAP TO AC004957.1; EXPRESSED IN BRAIN, SIGNAL = 0.58; EXPRESSED IN ADULT LIVER, SIGNAL = 0.63; EXPRESSED IN PLACENTA, SIGNAL = 0.63; EXPRESSED IN LUNG, SIGNAL = 0.66; EXPRESSED IN BONE MARROW, SIGNAL = 0.66; EST_HUMAN HIT: BF229235.1, EVALUE 2.00e-55; SWISSPROT HIT: O95025, EVALUE 1.00e-80
LKPDERIIKTEYGLLIRSLQKKDSGMYYCKAQEHTFIHTIVKLTLNVIENEQMENTQRAEHEEGKVKDLLAESRLRYKDYIQILSSPNFSLDQYCEQMWHREKRRQRNKGGPKWKHMQEMKKKRNRRHHRDLDELPRAVAT

SEQ ID NO: 44374 - protein, 35 aa, Homo sapiens
  MAP TO AC004849.1; EXPRESSED IN PLACENTA, SIGNAL = 0.67; EXPRESSED IN ADULT LIVER, SIGNAL = 0.62; EXPRESSED IN LUNG, SIGNAL = 0.64; EXPRESSED IN BRAIN, SIGNAL = 0.68; EXPRESSED IN BONE MARROW, SIGNAL = 0.66; EST_HUMAN HIT: BE883178.1, EVALUE 1.00e-09
LVSEHAFEIPDNVRPGHLIKELSKVIRAIEVRVET

SEQ ID NO: 44375 - protein, 79 aa, Homo sapiens
  MAP TO AC004804.1; EXPRESSED IN BONE MARROW, SIGNAL = 0.81; EXPRESSED IN PLACENTA, SIGNAL = 0.91; EXPRESSED IN LUNG, SIGNAL = 0.81; EXPRESSED IN FETAL LIVER, SIGNAL = 0.73; EXPRESSED IN ADULT LIVER, SIGNAL = 0.9; EXPRESSED IN BRAIN, SIGNAL = 0.8; EST_HUMAN HIT: AW947135.1, EVALUE 2.00e-03; SWISSPROT HIT: Q61982, EVALUE 3.80e-01
QLVARGLCSSPPGCLSVITTRRLALTRASDSGVQGSCISIFCDVASEAGAITSAFLYGSYRPILTGCGRGLHKGMNARR

SEQ ID NO: 44376 - protein, 145 aa, Homo sapiens
  MAP TO AC002044.1; EXPRESSED IN BRAIN, SIGNAL = 0.67; EXPRESSED IN HELA, SIGNAL = 2.2; EXPRESSED IN PLACENTA, SIGNAL = 0.8; EXPRESSED IN LUNG, SIGNAL = 0.83; EXPRESSED IN BONE MARROW, SIGNAL = 0.81; EXPRESSED IN ADULT LIVER, SIGNAL = 0.71; EXPRESSED IN FETAL LIVER, SIGNAL = 0.82; EST_HUMAN HIT: AW296207.1, EVALUE 4.00e-52; SWISSPROT HIT: P28167, EVALUE 4.00e-29
MNLGESFIQTNDPSLKLFQCAVCNKFTTDNLDMLGLHMNVERSLSEDEWKAVMGDSYQCKLCRYNTQLKSNFQLHCKTDKHVQKYQLVAHIKEGGKANEWRLKCVAIGNPVHLKCNACDYYTNSLEKLRLHTVNSRHEASLKLYK

SEQ ID NO: 44377 - protein, 51 aa, Homo sapiens
  MAP TO AC004811.2; EXPRESSED IN LUNG, SIGNAL = 0.99; EXPRESSED IN BONE MARROW, SIGNAL = 1.1; EXPRESSED IN ADULT LIVER, SIGNAL = 0.95; EXPRESSED IN PLACENTA, SIGNAL = 0.9; EXPRESSED IN FETAL LIVER, SIGNAL = 1.1; EXPRESSED IN BRAIN, SIGNAL = 0.81; EST_HUMAN HIT: BF380737.1, EVALUE 5.00e-06; SWISSPROT HIT: P53894, EVALUE 7.00e-05
RFLKFPDDPKVSSDFLDLIQSLLCGQKERLKFEGLCCHPFFSKIDWNNIRN

SEQ ID NO: 44378 - protein, 66 aa, Homo sapiens
  MAP TO AC004770.1; EXPRESSED IN PLACENTA, SIGNAL = 1.3; EXPRESSED IN ADULT LIVER, SIGNAL = 1.4; EXPRESSED IN LUNG, SIGNAL = 1.3; EXPRESSED IN FETAL LIVER, SIGNAL = 1.7; EXPRESSED IN BRAIN, SIGNAL = 1.2; EXPRESSED IN BONE MARROW, SIGNAL = 1.1; EST_HUMAN HIT: BE382615.1, EVALUE 5.00e-25; SWISSPROT HIT: P35854, EVALUE 4.10e+00
KELTDEFRELRATVERMGLMKANHVFFLLYLLHILLLDGAAWLTLWVFGTSFLPFLLCAVLLSAVQ

SEQ ID NO: 44379 - protein, 28 aa, Homo sapiens
  MAP TO AC000005.1; EXPRESSED IN BRAIN, SIGNAL = 0.65; EXPRESSED IN PLACENTA, SIGNAL = 0.58; EXPRESSED IN LUNG, SIGNAL = 0.49; EXPRESSED IN BONE MARROW, SIGNAL = 0.55; EXPRESSED IN ADULT LIVER, SIGNAL = 0.54
VSASRSKGSSVLPVLGHEEEEGGRGREA

SEQ ID NO: 44380 - protein, 56 aa, Homo sapiens
  MAP TO AC004816.1; EXPRESSED IN PLACENTA, SIGNAL = 1.2; EXPRESSED IN LUNG, SIGNAL = 1.3; EXPRESSED IN FETAL LIVER, SIGNAL = 1.2; EXPRESSED IN ADULT LIVER, SIGNAL = 1.2; EXPRESSED IN BRAIN, SIGNAL = 1.4; EXPRESSED IN BONE MARROW, SIGNAL = 1.4; EST_HUMAN HIT: BE727589.1, EVALUE 1.20e+00; SWISSPROT HIT: P08325, EVALUE 4.60e+00
MRTVKAQGVERVAYSIHPASPTSVSHSLVERMAMAPPVMESMRSPPQSTRPRVPLS

SEQ ID NO: 44381 - protein, 42 aa, Homo sapiens
  MAP TO AC004861.1; EXPRESSED IN BONE MARROW, SIGNAL = 0.77; EXPRESSED IN LUNG, SIGNAL = 0.43; EXPRESSED IN BRAIN, SIGNAL = 0.58; SWISSPROT HIT: O43093, EVALUE 8.30e+00
EGAVKQEIVNAAYMEKERTRKDIKQRCQDFNIYQKPLQQRLK

SEQ ID NO: 44382 - protein, 25 aa, Homo sapiens
  MAP TO AC005063.1; EXPRESSED IN FETAL LIVER, SIGNAL = 0.8; EXPRESSED IN BONE MARROW, SIGNAL = 0.83; EXPRESSED IN LUNG, SIGNAL = 0.68; EXPRESSED IN BRAIN, SIGNAL = 0.86; EXPRESSED IN ADULT LIVER, SIGNAL = 0.82; EXPRESSED IN PLACENTA, SIGNAL = 0.99; EST_HUMAN HIT: AA385200.1, EVALUE 1.00e-06; SWISSPROT HIT: Q01410, EVALUE 6.60e+00
EREEIETAQAYLESSEALYNQYMKE

SEQ ID NO: 44383 - protein, 31 aa, Homo sapiens
  MAP TO AC006375.2; EXPRESSED IN PLACENTA, SIGNAL = 0.7; EXPRESSED IN LUNG, SIGNAL = 0.57; EXPRESSED IN BRAIN, SIGNAL = 0.73; EXPRESSED IN ADULT LIVER, SIGNAL = 0.68; EXPRESSED IN BONE MARROW, SIGNAL = 0.62
YHQVEGRGQEGDVEDDGLQKTDKATVIITEQ

SEQ ID NO: 44384 - protein, 34 aa, Homo sapiens
  MAP TO AC004911.1; EXPRESSED IN PLACENTA, SIGNAL = 0.62; EXPRESSED IN ADULT LIVER, SIGNAL = 0.66; EXPRESSED IN LUNG, SIGNAL = 0.73; EXPRESSED IN BRAIN, SIGNAL = 0.63; EXPRESSED IN BONE MARROW, SIGNAL = 0.59; SWISSPROT HIT: P57269, EVALUE 8.50e+00
ENYCHTDKKKLDIFQNHDYFKPIRELMSQNNQMN

SEQ ID NO: 44385 - protein, 49 aa, Homo sapiens
  MAP TO AC004686.1; EXPRESSED IN PLACENTA, SIGNAL = 0.69; EXPRESSED IN LUNG, SIGNAL = 0.55; EXPRESSED IN FETAL LIVER, SIGNAL = 0.77; EXPRESSED IN BRAIN, SIGNAL = 0.58; EXPRESSED IN ADULT LIVER, SIGNAL = 0.59; EXPRESSED IN BONE MARROW, SIGNAL = 0.58; EST_HUMAN HIT: BE514195.1, EVALUE 4.00e-21; SWISSPROT HIT: P21425, EVALUE 3.00e-22
AMIVRNAKDTAHTKAERNILEEVKHPFIVDLIYAFQTGGKLYLILEYLS

SEQ ID NO: 44386 - protein, 84 aa, Homo sapiens
  MAP TO AC005015.2; EXPRESSED IN ADULT LIVER, SIGNAL = 0.68; EXPRESSED IN PLACENTA, SIGNAL = 0.64; EXPRESSED IN LUNG, SIGNAL = 0.53; EXPRESSED IN BRAIN, SIGNAL = 0.71; EXPRESSED IN BONE MARROW, SIGNAL = 0.71; EXPRESSED IN FETAL LIVER, SIGNAL = 0.73; SWISSPROT HIT: P09064, EVALUE 1.40e+00
LPPNVPDVVQDRSDGAGVRLPAPVCLPGGLATGFSMGSWLCSFQGKPSGPLLPWVPRPPLLSRDSVLLVWEEGAQKWGLEFHLV

SEQ ID NO: 44387 - protein, 94 aa, Homo sapiens; identical to SEQ ID NO: 39752
  MAP TO AC000097.1; EXPRESSED IN PLACENTA, SIGNAL = 0.9; EXPRESSED IN LUNG, SIGNAL =   1; EXPRESSED IN FETAL LIVER, SIGNAL = 0.98; EXPRESSED IN BRAIN, SIGNAL = 1.2; EXPRESSED IN BONE MARROW, SIGNAL = 1.2; EXPRESSED IN ADULT LIVER, SIGNAL = 0.79; EST_HUMAN HIT: BF306996.1, EVALUE 4.00e-38; SWISSPROT HIT: O54693, EVALUE 1.10e+00

SEQ ID NO: 44388 - protein, 22 aa, Homo sapiens
  MAP TO AC000097.1; EXPRESSED IN PLACENTA, SIGNAL = 0.9; EXPRESSED IN LUNG, SIGNAL =   1; EXPRESSED IN FETAL LIVER, SIGNAL = 0.98; EXPRESSED IN BRAIN, SIGNAL = 1.2; EXPRESSED IN BONE MARROW, SIGNAL = 1.2; EXPRESSED IN ADULT LIVER, SIGNAL = 0.79; EST_HUMAN HIT: BF306996.1, EVALUE 9.00e-06
TTRNGSKAVTSPLVGMCPPSSP

SEQ ID NO: 44389 - protein, 76 aa, Homo sapiens
  MAP TO AC005209.1; EXPRESSED IN ADULT LIVER, SIGNAL = 0.89; EXPRESSED IN PLACENTA, SIGNAL = 0.9; EXPRESSED IN LUNG, SIGNAL = 1.1; EXPRESSED IN FETAL LIVER, SIGNAL = 0.85; EXPRESSED IN BRAIN, SIGNAL =   1; EXPRESSED IN BONE MARROW, SIGNAL = 0.98; SWISSPROT HIT: P23098, EVALUE 9.00e-31; EST_HUMAN HIT: AI286148.1, EVALUE 2.00e-28
NIHLVAKWLSTLEKKLEEHSENSHPEFRVFMSAEPAPSPEGHIIPQGILENSIKITNEPPTGMHANLHKALDNFTQ

SEQ ID NO: 44390 - protein, 24 aa, Homo sapiens
  MAP TO AC005209.1; EXPRESSED IN ADULT LIVER, SIGNAL = 0.89; EXPRESSED IN PLACENTA, SIGNAL = 0.9; EXPRESSED IN LUNG, SIGNAL = 1.1; EXPRESSED IN FETAL LIVER, SIGNAL = 0.85; EXPRESSED IN BRAIN, SIGNAL =   1; EXPRESSED IN BONE MARROW, SIGNAL = 0.98; SWISSPROT HIT: P52951, EVALUE 8.70e+00
SGSAPWRRSWRSTVRTATQSSGSS

SEQ ID NO: 44391 - protein, 45 aa, Homo sapiens
  MAP TO AC005077.1; EXPRESSED IN FETAL LIVER, SIGNAL = 0.67; EXPRESSED IN PLACENTA, SIGNAL = 0.85; EXPRESSED IN LUNG, SIGNAL =   1; EXPRESSED IN BRAIN, SIGNAL = 0.76; EXPRESSED IN BONE MARROW, SIGNAL = 0.69; EXPRESSED IN ADULT LIVER, SIGNAL = 0.75; EST_HUMAN HIT: AW501988.1, EVALUE 2.00e-15
LRNSCASVRPPVQGRMWLLRQPCLAGFLLQVLEGRVPQSQAEGDS

SEQ ID NO: 44392 - protein, 27 aa, Homo sapiens
  MAP TO AC003119.1; EXPRESSED IN LUNG, SIGNAL = 0.57; EXPRESSED IN BRAIN, SIGNAL = 0.55; EXPRESSED IN BONE MARROW, SIGNAL = 0.55; EXPRESSED IN ADULT LIVER, SIGNAL = 0.46; EST_HUMAN HIT: AL134154.1, EVALUE 4.60e+00
EDGVGVKNPIVQVKKRVQNLTLLGKGH

SEQ ID NO: 44393 - protein, 66 aa, Homo sapiens; identical to SEQ ID NO: 39949
  MAP TO AC004228.2; EXPRESSED IN PLACENTA, SIGNAL = 0.73; EXPRESSED IN LUNG, SIGNAL = 1.6; EXPRESSED IN FETAL LIVER, SIGNAL = 1.1; EXPRESSED IN BRAIN, SIGNAL = 0.84; EXPRESSED IN ADULT LIVER, SIGNAL = 1.1; EXPRESSED IN BONE MARROW, SIGNAL = 0.68; EST_HUMAN HIT: Z44979.1, EVALUE 1.00e-23

SEQ ID NO: 44394 - protein, 47 aa, Homo sapiens
  MAP TO AC004228.2; EXPRESSED IN PLACENTA, SIGNAL = 0.73; EXPRESSED IN LUNG, SIGNAL = 1.6; EXPRESSED IN FETAL LIVER, SIGNAL = 1.1; EXPRESSED IN BRAIN, SIGNAL = 0.84; EXPRESSED IN ADULT LIVER, SIGNAL = 1.1; EXPRESSED IN BONE MARROW, SIGNAL = 0.68; EST_HUMAN HIT: BE779962.1, EVALUE 4.00e-14
QPRVLPPPPGPHHRPGEHCMVHCLLLWQWLDSYPHHGLCPCYLSGEA

SEQ ID NO: 44395 - protein, 82 aa, Homo sapiens
  MAP TO AC006347.2; EXPRESSED IN ADULT LIVER, SIGNAL = 1.3; EXPRESSED IN PLACENTA, SIGNAL = 1.1; EXPRESSED IN LUNG, SIGNAL = 1.1; EXPRESSED IN BRAIN, SIGNAL = 0.92; EXPRESSED IN FETAL LIVER, SIGNAL = 1.5; EXPRESSED IN BONE MARROW, SIGNAL = 1.2; SWISSPROT HIT: P15056, EVALUE 1.00e-16; EST_HUMAN HIT: AU118767.1, EVALUE 1.00e-15
AYEEYTSKLDALQQREQQLLESLGNGTDFSVSSSASMDTVTSSSSSSLSVLPSSLSVFQNPTDVARSNPKSPQKPIVRVFLP

SEQ ID NO: 44396 - protein, 72 aa, Homo sapiens
  MAP TO AC005215.1; EXPRESSED IN PLACENTA, SIGNAL = 0.63; EXPRESSED IN LUNG, SIGNAL = 0.55; EXPRESSED IN BRAIN, SIGNAL = 0.63; EXPRESSED IN ADULT LIVER, SIGNAL = 0.53; EST_HUMAN HIT: AA469068.1, EVALUE 5.30e+00; SWISSPROT HIT: P16479, EVALUE 3.00e+00
PWSFRRVQRASRHYRLFSACKKSVVNHFNLLYFNRFSETCLLFHCLATLELSMTEVLHLFAEQKKVYFYSHI

SEQ ID NO: 44397 - protein, 44 aa, Homo sapiens
  MAP TO AC006354.2; EXPRESSED IN LUNG, SIGNAL = 0.49; EXPRESSED IN BRAIN, SIGNAL = 0.65; EXPRESSED IN BONE MARROW, SIGNAL = 0.55; EXPRESSED IN PLACENTA, SIGNAL = 0.7; EXPRESSED IN ADULT LIVER, SIGNAL = 0.57; SWISSPROT HIT: O47477, EVALUE 7.20e-01
NSRRKCSLMPELTLLLMIIWIHLKGCREITLGASLNILRSTTYW

SEQ ID NO: 44398 - protein, 59 aa, Homo sapiens
  MAP TO AC006388.3; EXPRESSED IN PLACENTA, SIGNAL = 0.76; EXPRESSED IN LUNG, SIGNAL = 0.72; EXPRESSED IN FETAL LIVER, SIGNAL = 1.7; EXPRESSED IN ADULT LIVER, SIGNAL = 1.5; EXPRESSED IN BRAIN, SIGNAL =   2; EXPRESSED IN BONE MARROW, SIGNAL = 0.7; EST_HUMAN HIT: BE888901.1, EVALUE 3.00e-26; SWISSPROT HIT: P35214, EVALUE 2.00e-27
VTELNEPLSNEERNLLSVAYKNVVGARRSSWRVISSIEQKTSADGNEKKIEMVRAYREK

SEQ ID NO: 44399 - protein, 34 aa, Homo sapiens
  MAP TO AC005219.1; EXPRESSED IN ADULT LIVER, SIGNAL = 1.4; EXPRESSED IN LUNG, SIGNAL = 0.61; EXPRESSED IN FETAL LIVER, SIGNAL = 1.8; EXPRESSED IN BRAIN, SIGNAL = 0.67; EXPRESSED IN BONE MARROW, SIGNAL = 0.69; EXPRESSED IN PLACENTA, SIGNAL = 0.76; EST_HUMAN HIT: AA081728.1, EVALUE 2.00e-12; SWISSPROT HIT: Q15582, EVALUE 1.00e-13
KNNVVSVNKEPVAEPDIMATNGVVHVITNVLQPP

SEQ ID NO: 44400 - protein, 22 aa, Homo sapiens
  MAP TO AC005219.1; EXPRESSED IN ADULT LIVER, SIGNAL = 1.4; EXPRESSED IN LUNG, SIGNAL = 0.61; EXPRESSED IN FETAL LIVER, SIGNAL = 1.8; EXPRESSED IN BRAIN, SIGNAL = 0.67; EXPRESSED IN BONE MARROW, SIGNAL = 0.69; EXPRESSED IN PLACENTA, SIGNAL = 0.76; EST_HUMAN HIT: AA081728.1, EVALUE 3.00e-03
HYSVFLLEKQCGECQQGACCRA

SEQ ID NO: 44401 - protein, 30 aa, Homo sapiens
  MAP TO AC003667.1; EXPRESSED IN FETAL LIVER, SIGNAL = 0.74; EXPRESSED IN BONE MARROW, SIGNAL = 0.78; EXPRESSED IN LUNG, SIGNAL = 0.83; EXPRESSED IN BRAIN, SIGNAL =   1; EXPRESSED IN ADULT LIVER, SIGNAL = 0.85; EXPRESSED IN PLACENTA, SIGNAL = 0.8
IINLNTTVISTAESVLMKHISWNATKTISF

SEQ ID NO: 44402 - protein, 18 aa, Homo sapiens
  MAP TO AC005225.2; EXPRESSED IN PLACENTA, SIGNAL = 0.66; EXPRESSED IN LUNG, SIGNAL = 0.8; EXPRESSED IN BRAIN, SIGNAL = 0.68; EXPRESSED IN FETAL LIVER, SIGNAL = 0.68; EXPRESSED IN BONE MARROW, SIGNAL = 0.63; EXPRESSED IN ADULT LIVER, SIGNAL = 0.64
LSSIIPACIQICWVGHLL

SEQ ID NO: 44403 - protein, 71 aa, Homo sapiens
  MAP TO AC005015.2; EXPRESSED IN PLACENTA, SIGNAL =   1; EXPRESSED IN LUNG, SIGNAL = 0.87; EXPRESSED IN FETAL LIVER, SIGNAL = 0.78; EXPRESSED IN ADULT LIVER, SIGNAL = 0.8; EXPRESSED IN BRAIN, SIGNAL = 2.5; EXPRESSED IN BONE MARROW, SIGNAL = 0.78; EST_HUMAN HIT: AA077633.1, EVALUE 2.00e-19; SWISSPROT HIT: O42184, EVALUE 3.00e-11
YFQCPPKFGLFAPIHKVIRIGFPSTSPAKAKKTKRMAMGVSALTHSPSSSSISSVSSVASSVGGRPSRSGL

SEQ ID NO: 44404 - protein, 70 aa, Homo sapiens
  MAP TO AC005015.2; EXPRESSED IN PLACENTA, SIGNAL =   1; EXPRESSED IN LUNG, SIGNAL = 0.87; EXPRESSED IN FETAL LIVER, SIGNAL = 0.78; EXPRESSED IN ADULT LIVER, SIGNAL = 0.8; EXPRESSED IN BRAIN, SIGNAL = 2.5; EXPRESSED IN BONE MARROW, SIGNAL = 0.78; EST_HUMAN HIT: AA077633.1, EVALUE 4.00e-20; SWISSPROT HIT: Q09751, EVALUE 7.60e+00
SLLLPQVLPVPTQVWSLRAHPQSDPYRLPIYQPSQGQEDQAYGHGCVSTDPQSQQFLHQLRQLCGLLRGG

SEQ ID NO: 44405 - protein, 50 aa, Homo sapiens
  MAP TO AC005875.1; EXPRESSED IN BRAIN, SIGNAL = 0.72; EXPRESSED IN BONE MARROW, SIGNAL = 0.61; EXPRESSED IN ADULT LIVER, SIGNAL = 0.75; EXPRESSED IN PLACENTA, SIGNAL = 0.68; EXPRESSED IN LUNG, SIGNAL = 0.82; EST_HUMAN HIT: AA868017.1, EVALUE 1.00e-11; SWISSPROT HIT: Q02357, EVALUE 1.60e-02
ALQCWREACANILVDSGPSPNIVDVYGNMALHYAVYSENLSVVAKLLSRG

SEQ ID NO: 44406 - protein, 35 aa, Homo sapiens
  MAP TO AC005875.1; EXPRESSED IN BRAIN, SIGNAL = 0.72; EXPRESSED IN BONE MARROW, SIGNAL = 0.61; EXPRESSED IN ADULT LIVER, SIGNAL = 0.75; EXPRESSED IN PLACENTA, SIGNAL = 0.68; EXPRESSED IN LUNG, SIGNAL = 0.82; SWISSPROT HIT: P80950, EVALUE 8.40e+00; EST_HUMAN HIT: AA868017.1, EVALUE 7.00e-07
STMLEGGLCKYSGRFWSQSKYCRCVWQHGSPLCCL

SEQ ID NO: 44407 - protein, 67 aa, Homo sapiens
  MAP TO AC005020.1; EXPRESSED IN LUNG, SIGNAL = 0.83; EXPRESSED IN BONE MARROW, SIGNAL = 0.58; EXPRESSED IN ADULT LIVER, SIGNAL =  13; EXPRESSED IN PLACENTA, SIGNAL = 0.7; EXPRESSED IN FETAL LIVER, SIGNAL = 3.5; EXPRESSED IN BRAIN, SIGNAL = 0.62; SWISSPROT HIT: P20815, EVALUE 3.00e-35; EST_HUMAN HIT: AI861809.1, EVALUE 2.00e-34
VQMEYLDMVVNETLRLFPVAIRLERTCKKDVEINGVFIPKGSMVVIPTYALHHDPKYWTEPEEFRPE

SEQ ID NO: 44408 - protein, 35 aa, Homo sapiens
  MAP TO AC005704.1; EXPRESSED IN PLACENTA, SIGNAL = 0.72; EXPRESSED IN LUNG, SIGNAL = 0.71; EXPRESSED IN BONE MARROW, SIGNAL = 0.68; EXPRESSED IN BRAIN, SIGNAL = 0.69; EXPRESSED IN ADULT LIVER, SIGNAL = 0.78; EST_HUMAN HIT: BE889830.1, EVALUE 4.40e+00
ELLPGFWKPASPRRPNCPYRFLCFEQRATNRWRQT

SEQ ID NO: 44409 - protein, 34 aa, Homo sapiens
  MAP TO AC005704.1; EXPRESSED IN PLACENTA, SIGNAL = 0.72; EXPRESSED IN LUNG, SIGNAL = 0.71; EXPRESSED IN BONE MARROW, SIGNAL = 0.68; EXPRESSED IN BRAIN, SIGNAL = 0.69; EXPRESSED IN ADULT LIVER, SIGNAL = 0.78; EST_HUMAN HIT: BE957580.2, EVALUE 5.70e+00
NYCQDSGSQPAPGGRTAPIDFYALSRELPTGGDK

SEQ ID NO: 44410 - protein, 53 aa, Homo sapiens
  MAP TO AC006305.1; EXPRESSED IN BONE MARROW, SIGNAL = 0.81; EXPRESSED IN PLACENTA, SIGNAL = 0.59; EXPRESSED IN LUNG, SIGNAL = 0.45; EXPRESSED IN BRAIN, SIGNAL = 0.55; EXPRESSED IN ADULT LIVER, SIGNAL = 0.55
ASPNLLKKALQQAIGVYYRINQQKRKAISTVATNDITMRRASALLRIPVIVNK

SEQ ID NO: 44411 - protein, 37 aa, Homo sapiens
  MAP TO AC006305.1; EXPRESSED IN BONE MARROW, SIGNAL = 0.81; EXPRESSED IN PLACENTA, SIGNAL = 0.59; EXPRESSED IN LUNG, SIGNAL = 0.45; EXPRESSED IN BRAIN, SIGNAL = 0.55; EXPRESSED IN ADULT LIVER, SIGNAL = 0.55; EST_HUMAN HIT: T06347.1, EVALUE 4.30e+00
PLLTCSKRPSSRQLGYTIESTNRNAKLSPPWLQMISQ

SEQ ID NO: 44412 - protein, 26 aa, Homo sapiens
  MAP TO AC006226.4; EXPRESSED IN PLACENTA, SIGNAL = 1.2; EXPRESSED IN LUNG, SIGNAL = 1.3; EXPRESSED IN BRAIN, SIGNAL = 1.3; EXPRESSED IN BONE MARROW, SIGNAL = 1.1; EXPRESSED IN ADULT LIVER, SIGNAL = 1.2; EXPRESSED IN FETAL LIVER, SIGNAL = 1.1
FLFQFQQTFALSILPKLLLFTSSMAS

SEQ ID NO: 44413 - protein, 41 aa, Homo sapiens
  MAP TO AC006377.3; EXPRESSED IN ADULT LIVER, SIGNAL = 0.67; EXPRESSED IN PLACENTA, SIGNAL = 0.65; EXPRESSED IN LUNG, SIGNAL = 0.68; EXPRESSED IN BRAIN, SIGNAL = 0.97; EXPRESSED IN BONE MARROW, SIGNAL = 0.58; EST_HUMAN HIT: N59154.1, EVALUE 2.00e-15; SWISSPROT HIT: Q14123, EVALUE 1.00e-17
SDPAILYNDRSVLENHHLSAAYRLLQDDEEMNILINLSKDD

SEQ ID NO: 44414 - protein, 17 aa, Homo sapiens
  MAP TO AC006377.3; EXPRESSED IN ADULT LIVER, SIGNAL = 0.67; EXPRESSED IN PLACENTA, SIGNAL = 0.65; EXPRESSED IN LUNG, SIGNAL = 0.68; EXPRESSED IN BRAIN, SIGNAL = 0.97; EXPRESSED IN BONE MARROW, SIGNAL = 0.58; EST_HUMAN HIT: N59154.1, EVALUE 6.40e-02
LIQLFCIMTDLYWRITI

SEQ ID NO: 44415 - protein, 45 aa, Homo sapiens
  MAP TO AC005029.1; EXPRESSED IN PLACENTA, SIGNAL = 0.95; EXPRESSED IN LUNG, SIGNAL = 0.86; EXPRESSED IN FETAL LIVER, SIGNAL = 1.3; EXPRESSED IN BRAIN, SIGNAL = 1.1; EXPRESSED IN BONE MARROW, SIGNAL = 1.1; EXPRESSED IN ADULT LIVER, SIGNAL = 0.98; EST_HUMAN HIT: AW609802.1, EVALUE 1.80e+00
LLNLSHPRSSIRKVTHGYFGISIQKEWKVMPVSHGEGKGNEDGRG

SEQ ID NO: 44416 - protein, 40 aa, Homo sapiens
  MAP TO AC005029.1; EXPRESSED IN PLACENTA, SIGNAL = 0.95; EXPRESSED IN LUNG, SIGNAL = 0.86; EXPRESSED IN FETAL LIVER, SIGNAL = 1.3; EXPRESSED IN BRAIN, SIGNAL = 1.1; EXPRESSED IN BONE MARROW, SIGNAL = 1.1; EXPRESSED IN ADULT LIVER, SIGNAL = 0.98; SWISSPROT HIT: P22437, EVALUE 6.30e+00; EST_HUMAN HIT: BF530400.1, EVALUE 3.70e-01
SSELIPPPKQYQESHSWLLWDKHSERMESYACQPWRREGK

SEQ ID NO: 44417 - protein, 78 aa, Homo sapiens
  MAP TO AC006238.1; EXPRESSED IN LUNG, SIGNAL = 0.82; EXPRESSED IN FETAL LIVER, SIGNAL = 1.1; EXPRESSED IN BRAIN, SIGNAL = 0.92; EXPRESSED IN PLACENTA, SIGNAL = 2.4; EXPRESSED IN BONE MARROW, SIGNAL = 2.6; EXPRESSED IN ADULT LIVER, SIGNAL = 0.95; SWISSPROT HIT: Q47689, EVALUE 6.30e+00; EST_HUMAN HIT: AA630331.1, EVALUE 7.00e-38
SVLTLLKVRCQATERRVLQQCTGCGLWLLQVPWTTALGSTAPAAGLHGWLLNFDCSIVSIFMGVQGWDLAACNKKEAK

SEQ ID NO: 44418 - protein, 67 aa, Homo sapiens [sequence omitted]

SEQ ID NO: 44419 - protein, 70 aa, Homo sapiens
  MAP TO AC004905.1; EXPRESSED IN PLACENTA, SIGNAL = 0.66; EXPRESSED IN LUNG, SIGNAL = 0.67; EXPRESSED IN BONE MARROW, SIGNAL = 0.54; EXPRESSED IN ADULT LIVER, SIGNAL = 0.57; EXPRESSED IN BRAIN, SIGNAL = 0.57; EST_HUMAN HIT: BE160579.1, EVALUE 1.40e+00; SWISSPROT HIT: P02832, EVALUE 3.00e-01
GNEERGWGEDNINPGLKIFLLVFKSSIPQIIKNSVAYEETTHYEPKPAKTAENRNRLGGNSNIEAIRHRL

SEQ ID NO: 44420 - protein, 48 aa, Homo sapiens
  MAP TO AC006320.2; EXPRESSED IN LUNG, SIGNAL = 0.76; EXPRESSED IN FETAL LIVER, SIGNAL = 0.95; EXPRESSED IN BRAIN, SIGNAL = 0.75; EXPRESSED IN BONE MARROW, SIGNAL = 0.86; EXPRESSED IN PLACENTA, SIGNAL = 0.87; EXPRESSED IN ADULT LIVER, SIGNAL = 0.94; EST_HUMAN HIT: AI813277.1, EVALUE 2.60e-01; SWISSPROT HIT: P09631, EVALUE 5.50e-01
WRGILAPDGLRQPPAGSWDGLQRPQASPASRTAGAAVQASSWAPGETE

SEQ ID NO: 44421 - protein, 47 aa, Homo sapiens
  MAP TO AC006320.2; EXPRESSED IN LUNG, SIGNAL = 0.76; EXPRESSED IN FETAL LIVER, SIGNAL = 0.95; EXPRESSED IN BRAIN, SIGNAL = 0.75; EXPRESSED IN BONE MARROW, SIGNAL = 0.86; EXPRESSED IN PLACENTA, SIGNAL = 0.87; EXPRESSED IN ADULT LIVER, SIGNAL = 0.94; EST_HUMAN HIT: BF304283.1, EVALUE 4.60e-01; SWISSPROT HIT: P22897, EVALUE 2.10e+00
LAGNPGPRWSTAAPSRLLGWLAAPAGFSSLQNCRSCGPSQLLGSGRN

SEQ ID NO: 44422 - protein, 47 aa, Homo sapiens
  MAP TO AC004958.1; EXPRESSED IN PLACENTA, SIGNAL =   1; EXPRESSED IN LUNG, SIGNAL = 0.97; EXPRESSED IN FETAL LIVER, SIGNAL = 0.94; EXPRESSED IN ADULT LIVER, SIGNAL = 1.1; EXPRESSED IN BRAIN, SIGNAL = 0.86; EXPRESSED IN BONE MARROW, SIGNAL = 0.97; EST_HUMAN HIT: AV706728.1, EVALUE 3.00e-21; SWISSPROT HIT: Q09461, EVALUE 1.00e-07
VTVISPLELIRTKMQSKKFSYVELHRFVSKKVSEDGWISLWRGWAPT

SEQ ID NO: 44423 - protein, 67 aa, Homo sapiens
  MAP TO AC004231.1; EXPRESSED IN ADULT LIVER, SIGNAL = 0.85; EXPRESSED IN PLACENTA, SIGNAL = 0.96; EXPRESSED IN LUNG, SIGNAL = 1.1; EXPRESSED IN BRAIN, SIGNAL = 0.83; EXPRESSED IN BONE MARROW, SIGNAL =   1; EXPRESSED IN FETAL LIVER, SIGNAL = 1.1; EST_HUMAN HIT: AU137923.1, EVALUE 1.00e-25; SWISSPROT HIT: P19001, EVALUE 4.00e-03
MNSGHSFSQTPSASFHGAGGGWGRPRSFPRAPTVHGGAGGARISLSFTTRSCPPPGGSWGSGRSSPL

SEQ ID NO: 44424 - protein, 48 aa, Homo sapiens
  MAP TO AC005013.1; EXPRESSED IN FETAL LIVER, SIGNAL = 0.89; EXPRESSED IN BONE MARROW, SIGNAL = 0.84; EXPRESSED IN PLACENTA, SIGNAL = 0.63; EXPRESSED IN BRAIN, SIGNAL = 0.79; EXPRESSED IN ADULT LIVER, SIGNAL = 1.1; EST_HUMAN HIT: AW151127.1, EVALUE 3.00e-11
PASPVPACSQQQVIQHNTITTSSSVSEVVGSSTLSQLTTHRTDLNPIL

SEQ ID NO: 44425 - protein, 29 aa, Homo sapiens
  MAP TO AC005013.1; EXPRESSED IN FETAL LIVER, SIGNAL = 0.89; EXPRESSED IN BONE MARROW, SIGNAL = 0.84; EXPRESSED IN PLACENTA, SIGNAL = 0.63; EXPRESSED IN BRAIN, SIGNAL = 0.79; EXPRESSED IN ADULT LIVER, SIGNAL = 1.1; EST_HUMAN HIT: AW151127.1, EVALUE 1.00e-08
LLLVLSQLAPSNKSSSIIPSLLPHRSARW

SEQ ID NO: 44426 - protein, 36 aa, Homo sapiens
  MAP TO AC005873.2; EXPRESSED IN PLACENTA, SIGNAL = 2.4; EXPRESSED IN BRAIN, SIGNAL = 0.6; EXPRESSED IN BONE MARROW, SIGNAL = 0.67; EXPRESSED IN ADULT LIVER, SIGNAL = 0.79; EXPRESSED IN LUNG, SIGNAL = 0.74; EST_HUMAN HIT: AW204958.1, EVALUE 1.50e-02
IKAPVGSVSCKGTHPTLHMAVFSLYPHVAKSKEQEP

SEQ ID NO: 44427 - protein, 36 aa, Homo sapiens
  MAP TO AC005873.2; EXPRESSED IN PLACENTA, SIGNAL = 2.4; EXPRESSED IN BRAIN, SIGNAL = 0.6; EXPRESSED IN BONE MARROW, SIGNAL = 0.67; EXPRESSED IN ADULT LIVER, SIGNAL = 0.79; EXPRESSED IN LUNG, SIGNAL = 0.74; EST_HUMAN HIT: AW847664.1, EVALUE 5.70e-02
DQGTSRFSVLQGHSSYFAHGCLLIVPSRGKEQRAGA

SEQ ID NO: 44428 - protein, 30 aa, Homo sapiens
  MAP TO AC004127.1; EXPRESSED IN BONE MARROW, SIGNAL = 0.59; EXPRESSED IN LUNG, SIGNAL = 0.47; EXPRESSED IN BRAIN, SIGNAL = 0.61; EST_HUMAN HIT: BE257173.1, EVALUE 1.00e-10
TPRSESSPGASVAMAGWATQSRRMRWSPAW

SEQ ID NO: 44429 - protein, 18 aa, Homo sapiens
  MAP TO AC005939.1; EXPRESSED IN FETAL LIVER, SIGNAL = 0.99; EXPRESSED IN ADULT LIVER, SIGNAL = 0.94; EXPRESSED IN PLACENTA, SIGNAL =   1; EXPRESSED IN BRAIN, SIGNAL = 0.8; EXPRESSED IN BONE MARROW, SIGNAL = 0.94; EXPRESSED IN LUNG, SIGNAL = 0.94
LFQIHRSLLNICVHSIIC

SEQ ID NO: 44430 - protein, 63 aa, Homo sapiens
  MAP TO AC004928.2; EXPRESSED IN PLACENTA, SIGNAL = 0.89; EXPRESSED IN LUNG, SIGNAL = 1.1; EXPRESSED IN FETAL LIVER, SIGNAL = 1.1; EXPRESSED IN BRAIN, SIGNAL = 1.3; EXPRESSED IN BONE MARROW, SIGNAL =   1; EXPRESSED IN ADULT LIVER, SIGNAL =   1; SWISSPROT HIT: P14616, EVALUE 7.90e-02
GPADTAVMHKLLSTSNSKSHFLPRKSKQTKRHKSGVLTAKYIILNERNAKDHTPSELQAFQGE

SEQ ID NO: 44431 - protein, 75 aa, Homo sapiens
  MAP TO AC005038.1; EXPRESSED IN LUNG, SIGNAL = 1.1; EXPRESSED IN ADULT LIVER, SIGNAL = 0.49; EXPRESSED IN BRAIN, SIGNAL = 0.97; EXPRESSED IN BONE MARROW, SIGNAL = 0.56; EST_HUMAN HIT: BE274034.1, EVALUE 3.00e-23
MSRLLGGTLERVCKAVLLLCLLHFLVAVILYFDVYAQHLAFFSRFSARGPAHALHPAASSSSSSSNCSRPNATAS

SEQ ID NO: 44432 - protein, 24 aa, Homo sapiens
  MAP TO AC005988.1; EXPRESSED IN PLACENTA, SIGNAL = 0.88; EXPRESSED IN BRAIN, SIGNAL =   2; EXPRESSED IN LUNG, SIGNAL = 1.2; EXPRESSED IN BONE MARROW, SIGNAL = 0.96; EXPRESSED IN FETAL LIVER, SIGNAL =   1; EXPRESSED IN ADULT LIVER, SIGNAL =   1
EAREENGQEPTGLWGTLDGLALPR

SEQ ID NO: 44433 - protein, 25 aa, Homo sapiens
  MAP TO AC005988.1; EXPRESSED IN PLACENTA, SIGNAL = 0.88; EXPRESSED IN BRAIN, SIGNAL =   2; EXPRESSED IN LUNG, SIGNAL = 1.2; EXPRESSED IN BONE MARROW, SIGNAL = 0.96; EXPRESSED IN FETAL LIVER, SIGNAL =   1; EXPRESSED IN ADULT LIVER, SIGNAL =   1; EST_HUMAN HIT: BE252409.1, EVALUE 8.00e+00
GSQRGKWAGTYWPLGYTGWSGSAQR

SEQ ID NO: 44434 - protein, 70 aa, Homo sapiens
  MAP TO AC004952.1; EXPRESSED IN PLACENTA, SIGNAL = 0.73; EXPRESSED IN LUNG, SIGNAL = 0.64; EXPRESSED IN FETAL LIVER, SIGNAL =   1; EXPRESSED IN BONE MARROW, SIGNAL = 0.77; EXPRESSED IN ADULT LIVER, SIGNAL = 0.85; EXPRESSED IN BRAIN, SIGNAL = 0.84
MSPACRVPDCLPPGQQQPPHLHHRGGRRHSEAVHSHRPGPGVRIHLQAVRQDEAGLGGATGGHRHHHREE

SEQ ID NO: 44435 - protein, 37 aa, Homo sapiens
  MAP TO AC002087.1; EXPRESSED IN LUNG, SIGNAL = 0.8; EXPRESSED IN BRAIN, SIGNAL = 0.76; EXPRESSED IN BONE MARROW, SIGNAL = 0.73; EXPRESSED IN PLACENTA, SIGNAL = 0.77; EXPRESSED IN ADULT LIVER, SIGNAL = 0.62
AQELRKSTADDTSLSHDISDVRDWEMEHLDWDNLKAD

SEQ ID NO: 44436 - protein, 38 aa, Homo sapiens
  MAP TO AC006287.1; EXPRESSED IN BRAIN, SIGNAL = 0.83; EXPRESSED IN ADULT LIVER, SIGNAL = 0.63; EXPRESSED IN PLACENTA, SIGNAL = 0.62; EXPRESSED IN LUNG, SIGNAL = 0.74; EXPRESSED IN BONE MARROW, SIGNAL = 0.68
CLHLNSAFRTLNPNFRFLNQFTRHEHPEEWREDDEEVR

SEQ ID NO: 44437 - protein, 61 aa, Homo sapiens
  MAP TO AC006321.1; EXPRESSED IN BRAIN, SIGNAL = 0.61; SWISSPROT HIT: O08774, EVALUE 6.00e+00; EST_HUMAN HIT: BE264039.1, EVALUE 4.60e+00
GLTQGVSHLPRFFPFSICCTKTPVTAQRPESVFTPSLLHSAGNSFTAGIRFSSHLASRSHA

SEQ ID NO: 44438 - protein, 26 aa, Homo sapiens
  MAP TO AC005549.1; EXPRESSED IN PLACENTA, SIGNAL =  20; EXPRESSED IN LUNG, SIGNAL = 0.85; EXPRESSED IN BONE MARROW, SIGNAL = 0.7; EXPRESSED IN ADULT LIVER, SIGNAL = 0.66; EXPRESSED IN BRAIN, SIGNAL = 0.66
LAGQETNRQGEEEVTIRARVMGPGHQ

SEQ ID NO: 44439 - protein, 35 aa, Homo sapiens
  MAP TO AC004949.1; EXPRESSED IN LUNG, SIGNAL = 0.97; EXPRESSED IN FETAL LIVER, SIGNAL = 0.84; EXPRESSED IN PLACENTA, SIGNAL = 0.86; EXPRESSED IN BRAIN, SIGNAL = 0.7; EXPRESSED IN BONE MARROW, SIGNAL = 0.71; EXPRESSED IN ADULT LIVER, SIGNAL = 0.73
HERKKSSPCKKGKSKVEQQHFIGDKQEHFTGDKHS

SEQ ID NO: 44440 - protein, 41 aa, Homo sapiens
  MAP TO AC005772.1; EXPRESSED IN BRAIN, SIGNAL = 0.84; EXPRESSED IN ADULT LIVER, SIGNAL = 0.74; EXPRESSED IN PLACENTA, SIGNAL = 0.68; EXPRESSED IN LUNG, SIGNAL = 0.66; EXPRESSED IN BONE MARROW, SIGNAL = 0.6; SWISSPROT HIT: Q33401, EVALUE 3.70e+00
EDEDGIQRRASNDPRGMLSDRARYPLNPIVSVDLLEQPGIL

SEQ ID NO: 44441 - protein, 119 aa, Homo sapiens
  MAP TO AC003685.1; EXPRESSED IN BONE MARROW, SIGNAL = 0.98; EXPRESSED IN PLACENTA, SIGNAL = 1.1; EXPRESSED IN LUNG, SIGNAL = 0.99; EXPRESSED IN FETAL LIVER, SIGNAL = 0.81; EXPRESSED IN ADULT LIVER, SIGNAL = 0.93; EXPRESSED IN BRAIN, SIGNAL = 0.94; EST_HUMAN HIT: AA431529.1, EVALUE 3.00e-03
MCYRQKRDYRHTRKLLNVLKEYIAEKQKDDEAEEAEAAAAAAEAAAAAEAAAAAAEVIVVEDEEEEEKEEEEEKEEEEEEGEEEGGGEEGEEGGGGGEGEETEEEEEEEEEEEEEEQIV

SEQ ID NO: 44442 - protein, 46 aa, Homo sapiens
  MAP TO AC005031.1; EXPRESSED IN PLACENTA, SIGNAL = 0.83; EXPRESSED IN LUNG, SIGNAL = 0.7; EXPRESSED IN FETAL LIVER, SIGNAL = 1.1; EXPRESSED IN BRAIN, SIGNAL = 0.6; EXPRESSED IN BONE MARROW, SIGNAL = 0.8; EXPRESSED IN ADULT LIVER, SIGNAL = 0.8; EST_HUMAN HIT: AA490188.1, EVALUE 4.00e-09
LSFRSLGTASSRSAHWSCGPRFSTSFPTPFPANHIRKLLPRAVWAP

SEQ ID NO: 44443 - protein, 41 aa, Homo sapiens
  MAP TO AC003070.1; EXPRESSED IN BONE MARROW, SIGNAL = 0.81; EXPRESSED IN PLACENTA, SIGNAL = 0.68; EXPRESSED IN LUNG, SIGNAL = 0.81; EXPRESSED IN FETAL LIVER, SIGNAL = 0.84; EXPRESSED IN BRAIN, SIGNAL = 0.65; EXPRESSED IN ADULT LIVER, SIGNAL = 0.8
QCSNWQLLLLLLLLLLLLLLLPPPNTTNKNNNNNNNSYSLY

SEQ ID NO: 44444 - protein, 75 aa, Homo sapiens
  MAP TO AC004945.1; EXPRESSED IN PLACENTA, SIGNAL = 0.95; EXPRESSED IN ADULT LIVER, SIGNAL = 1.2; EXPRESSED IN LUNG, SIGNAL = 0.7; EXPRESSED IN FETAL LIVER, SIGNAL = 1.9; EXPRESSED IN BRAIN, SIGNAL = 1.2; EXPRESSED IN BONE MARROW, SIGNAL = 0.82; SWISSPROT HIT: P13798, EVALUE 7.60e+00
LPGEMKTVAGIETYLYYILIPNLFSQACRTPAQLKIGNLSDVMKDEIVVWVVFSDACRICNVHAHRYICVFIAFQ

SEQ ID NO: 44445 - protein, 59 aa, Homo sapiens
  MAP TO AC004382.1; EXPRESSED IN BRAIN, SIGNAL = 1.1; EXPRESSED IN PLACENTA, SIGNAL = 1.3; EXPRESSED IN LUNG, SIGNAL = 1.1; EXPRESSED IN BONE MARROW, SIGNAL = 1.1; EXPRESSED IN ADULT LIVER, SIGNAL = 1.4; EXPRESSED IN FETAL LIVER, SIGNAL = 1.1; SWISSPROT HIT: O65992, EVALUE 6.10e-01; EST_HUMAN HIT: BE383345.1, EVALUE 2.00e-31
RFNVFLLPCPNLDVYGECKLQITHENIYLWDIHNPRVKLVSWPLCSLRRYGRDATRFTF

SEQ ID NO: 44446 - protein, 63 aa, Homo sapiens
  MAP TO AC004382.1; EXPRESSED IN BRAIN, SIGNAL = 1.1; EXPRESSED IN PLACENTA, SIGNAL = 1.3; EXPRESSED IN LUNG, SIGNAL = 1.1; EXPRESSED IN BONE MARROW, SIGNAL = 1.1; EXPRESSED IN ADULT LIVER, SIGNAL = 1.4; EXPRESSED IN FETAL LIVER, SIGNAL = 1.1; SWISSPROT HIT: Q15744, EVALUE 1.50e+00; EST_HUMAN HIT: BF316066.1, EVALUE 3.00e-32
PHSRSLQCLPAALPQPGRVWRVQAADHPREHLPLGHPQPPCEARLVAPLLTAPLWPGCHTLYL

SEQ ID NO: 44447 - protein, 53 aa, Homo sapiens
  MAP TO AC004542.1; EXPRESSED IN PLACENTA, SIGNAL =   1; EXPRESSED IN LUNG, SIGNAL =   1; EXPRESSED IN BONE MARROW, SIGNAL = 1.2; EXPRESSED IN FETAL LIVER, SIGNAL = 1.2; EXPRESSED IN BRAIN, SIGNAL = 1.2; EXPRESSED IN ADULT LIVER, SIGNAL = 1.3; SWISSPROT HIT: Q14149, EVALUE 1.00e-03; EST_HUMAN HIT: AW881141.1, EVALUE 3.30e-01
EFFCLLRALKEPKELNFVFGVNIEHRDLDGMFIYNCSRLIKMYEKVGPQLEGG

SEQ ID NO: 44448 - protein, 37 aa, Homo sapiens
  MAP TO AC005039.1; EXPRESSED IN FETAL LIVER, SIGNAL = 0.78; EXPRESSED IN BONE MARROW, SIGNAL = 0.79; EXPRESSED IN PLACENTA, SIGNAL = 0.88; EXPRESSED IN LUNG, SIGNAL = 0.97; EXPRESSED IN BRAIN, SIGNAL =   1; EXPRESSED IN ADULT LIVER, SIGNAL = 0.86; EST_HUMAN HIT: AW512200.1, EVALUE 1.30e-01
WRLESLRTRPRQIQCLKRTCALTLTQTQLLFIVSSQS

SEQ ID NO: 44449 - protein, 37 aa, Homo sapiens
  MAP TO AC003957.1; EXPRESSED IN LUNG, SIGNAL = 1.1; EXPRESSED IN BRAIN, SIGNAL = 0.86; EXPRESSED IN BONE MARROW, SIGNAL = 0.99; EXPRESSED IN PLACENTA, SIGNAL =   1; EXPRESSED IN FETAL LIVER, SIGNAL = 0.86; EXPRESSED IN ADULT LIVER, SIGNAL = 0.88; SWISSPROT HIT: P53792, EVALUE 1.30e+00
MAANSTSDLHTPGTQLSVADIIVITVYFALNVAVGIW

SEQ ID NO: 44450 - protein, 27 aa, Homo sapiens
  MAP TO AC003957.1; EXPRESSED IN LUNG, SIGNAL = 1.1; EXPRESSED IN BRAIN, SIGNAL = 0.86; EXPRESSED IN BONE MARROW, SIGNAL = 0.99; EXPRESSED IN PLACENTA, SIGNAL =   1; EXPRESSED IN FETAL LIVER, SIGNAL = 0.86; EXPRESSED IN ADULT LIVER, SIGNAL = 0.88
SGSYLVPAAGQPWPPTPPATSTLPGRS

SEQ ID NO: 44451 - protein, 42 aa, Homo sapiens
  MAP TO AC003083.1; EXPRESSED IN LUNG, SIGNAL = 1.1; EXPRESSED IN FETAL LIVER, SIGNAL = 0.99; EXPRESSED IN PLACENTA, SIGNAL = 0.99; EXPRESSED IN BRAIN, SIGNAL =   1; EXPRESSED IN BONE MARROW, SIGNAL = 1.1; EXPRESSED IN ADULT LIVER, SIGNAL = 1.1; SWISSPROT HIT: Q09461, EVALUE 2.00e-05; EST_HUMAN HIT: AV706427.1, EVALUE 7.00e-19
MQSKKFSYVELHRFVSKKVSEDGWISLWRGWAPTVLRDVPFS

SEQ ID NO: 44452 - protein, 43 aa, Homo sapiens
  MAP TO AC003083.1; EXPRESSED IN LUNG, SIGNAL = 1.1; EXPRESSED IN FETAL LIVER, SIGNAL = 0.99; EXPRESSED IN PLACENTA, SIGNAL = 0.99; EXPRESSED IN BRAIN, SIGNAL =   1; EXPRESSED IN BONE MARROW, SIGNAL = 1.1; EXPRESSED IN ADULT LIVER, SIGNAL = 1.1; EST_HUMAN HIT: AV706427.1, EVALUE 1.00e-09
RCSPRSFLTWNCIDLSARKYLKMVGFPFGGAGLLLFLEMYLSQ

SEQ ID NO: 44453 - protein, 77 aa, Homo sapiens
  MAP TO AC004547.1; EXPRESSED IN PLACENTA, SIGNAL = 0.94; EXPRESSED IN BRAIN, SIGNAL =   1; EXPRESSED IN BONE MARROW, SIGNAL = 1.1; EXPRESSED IN ADULT LIVER, SIGNAL = 0.77; EXPRESSED IN LUNG, SIGNAL = 0.75; EXPRESSED IN FETAL LIVER, SIGNAL = 0.86
AWYTITIITTTTTIITVTINIIITTIVIITTTITTTIIIFTTITITIIIFLLLIIIAKACHVPDTVLNKYKVSASFH

SEQ ID NO: 44454 - protein, 24 aa, Homo sapiens
  MAP TO AC005004.1; EXPRESSED IN LUNG, SIGNAL = 1.1; EXPRESSED IN BRAIN, SIGNAL = 1.2; EXPRESSED IN BONE MARROW, SIGNAL = 0.94; EXPRESSED IN PLACENTA, SIGNAL = 0.91; EXPRESSED IN FETAL LIVER, SIGNAL = 0.98; EXPRESSED IN ADULT LIVER, SIGNAL =   1
VNPKVFPHIKLGDIVEIAHPNDEY

SEQ ID NO: 44455 - protein, 103 aa, Homo sapiens
  MAP TO AC004551.1; EXPRESSED IN PLACENTA, SIGNAL = 1.3; EXPRESSED IN BRAIN, SIGNAL = 1.3; EXPRESSED IN ADULT LIVER, SIGNAL = 1.3; EXPRESSED IN LUNG, SIGNAL = 1.4; EXPRESSED IN FETAL LIVER, SIGNAL = 1.3; EXPRESSED IN BONE MARROW, SIGNAL = 1.3; SWISSPROT HIT: P29728, EVALUE 3.00e-42; EST_HUMAN HIT: BE893041.1, EVALUE 9.00e-21
CQKKIKDLPSLSPYALELLTVYAWEQGCRKDNFDIAEGVRTVLELIKCQEKLCIYWMVNYNFEDETIRNILLHQLQSARCQASHTLSLYLIIRMPGIPLWNEI

SEQ ID NO: 44456 - protein, 90 aa, Homo sapiens
  MAP TO AC005230.1; EXPRESSED IN ADULT LIVER, SIGNAL =   1; EXPRESSED IN PLACENTA, SIGNAL = 1.3; EXPRESSED IN LUNG, SIGNAL = 0.98; EXPRESSED IN BRAIN, SIGNAL = 1.1; EXPRESSED IN FETAL LIVER, SIGNAL =   1; EXPRESSED IN BONE MARROW, SIGNAL = 1.1; SWISSPROT HIT: P18490, EVALUE 1.00e-36; EST_HUMAN HIT: U74315.1, EVALUE 9.00e-41
VNKECVRGLWAGQQQELVFLRNRNPERGSIQNAKQALRNMINSSCDQPIGYPIFVSPLTTSYSDSHEQLKDILGGPISLGNIRNFIVSTW

SEQ ID NO: 44457 - protein, 26 aa, Homo sapiens
  MAP TO AC004417.1; EXPRESSED IN PLACENTA, SIGNAL = 1.1; EXPRESSED IN BRAIN, SIGNAL = 1.2; EXPRESSED IN BONE MARROW, SIGNAL = 0.99; EXPRESSED IN ADULT LIVER, SIGNAL = 1.2; EXPRESSED IN LUNG, SIGNAL = 1.1; EXPRESSED IN FETAL LIVER, SIGNAL = 1.1
IITCGMLLVLLTFNSQECLPFRAGVG

SEQ ID NO: 44458 - protein, 27 aa, Homo sapiens
  MAP TO AC004417.1; EXPRESSED IN PLACENTA, SIGNAL = 1.1; EXPRESSED IN BRAIN, SIGNAL = 1.2; EXPRESSED IN BONE MARROW, SIGNAL = 0.99; EXPRESSED IN ADULT LIVER, SIGNAL = 1.2; EXPRESSED IN LUNG, SIGNAL = 1.1; EXPRESSED IN FETAL LIVER, SIGNAL = 1.1
HHNLWHAASAADIQQPGMSSLQGRGRQ

SEQ ID NO: 44459 - protein, 56 aa, Homo sapiens
  MAP TO AC004553.1; EXPRESSED IN PLACENTA, SIGNAL = 0.69; EXPRESSED IN BONE MARROW, SIGNAL = 0.69; EXPRESSED IN ADULT LIVER, SIGNAL = 0.68; EXPRESSED IN FETAL LIVER, SIGNAL = 0.82; EXPRESSED IN LUNG, SIGNAL = 0.64; EXPRESSED IN BRAIN, SIGNAL = 0.67
MSLRKSTPPTPDPRLTNTDHGWCHRIVDTSEAVLPPPLPPPSLLLPPPFLSPLPLT

SEQ ID NO: 44460 - protein, 164 aa, Homo sapiens
  MAP TO AC004553.1; EXPRESSED IN PLACENTA, SIGNAL = 0.69; EXPRESSED IN BONE MARROW, SIGNAL = 0.69; EXPRESSED IN ADULT LIVER, SIGNAL = 0.68; EXPRESSED IN FETAL LIVER, SIGNAL = 0.82; EXPRESSED IN LUNG, SIGNAL = 0.64; EXPRESSED IN BRAIN, SIGNAL = 0.67; EST_HUMAN HIT: AA812204.1, EVALUE 3.00e-06; SWISSPROT HIT: P73720, EVALUE 3.50e+00
LQQTSFEMSHQEGSTGGLPDLVTESLFSSPEEQSGVAAVTAASSDIEMAATEPSTGDGGDTRDGGFLNDASTENQNTDSESSSEDVELESMGEGLFGYPLVGEETEREEEEEEMEEEGEEEEQPRMCPRCGGTNHDQCLLDEDQALEEWISSETSALPRSRWQV

SEQ ID NO: 44461 - protein, 44 aa, Homo sapiens
  MAP TO AC006477.2; EXPRESSED IN FETAL LIVER, SIGNAL = 0.85; EXPRESSED IN BONE MARROW, SIGNAL = 0.98; EXPRESSED IN ADULT LIVER, SIGNAL = 0.91; EXPRESSED IN PLACENTA, SIGNAL =   1; EXPRESSED IN LUNG, SIGNAL = 1.1; EXPRESSED IN BRAIN, SIGNAL = 0.94; EST_HUMAN HIT: AA179279.1, EVALUE 3.00e-03; SWISSPROT HIT: P38613, EVALUE 2.80e+00
SIIVKVPSSLQAHLQLSGKEVDVNSEVHVQEMAEVRKDDVVTVT

SEQ ID NO: 44462 - protein, 71 aa, Homo sapiens
  MAP TO AC004626.1; EXPRESSED IN PLACENTA, SIGNAL = 0.84; EXPRESSED IN LUNG, SIGNAL = 0.75; EXPRESSED IN BRAIN, SIGNAL = 0.75; EXPRESSED IN BONE MARROW, SIGNAL = 0.66; EXPRESSED IN ADULT LIVER, SIGNAL = 0.73; EST_HUMAN HIT: BE742664.1, EVALUE 7.10e+00; SWISSPROT HIT: Q02934, EVALUE 4.40e+00
AILYNKDSIDALFNMTPPTSALGACFVFSPKEGIIEPSGVQAIQISFSSTILGNFEEEFLVNVNGSPEPVK

SEQ ID NO: 44463 - protein, 34 aa, Homo sapiens
  MAP TO AC004626.1; EXPRESSED IN PLACENTA, SIGNAL = 0.84; EXPRESSED IN LUNG, SIGNAL = 0.75; EXPRESSED IN BRAIN, SIGNAL = 0.75; EXPRESSED IN BONE MARROW, SIGNAL = 0.66; EXPRESSED IN ADULT LIVER, SIGNAL = 0.73
DTVQQRQHRCSLQHDPSNFSFGGLLCFQSQGRHH

SEQ ID NO: 44464 - protein, 49 aa, Homo sapiens
  MAP TO AC005229.1; EXPRESSED IN PLACENTA, SIGNAL = 0.82; EXPRESSED IN LUNG, SIGNAL =   1; EXPRESSED IN FETAL LIVER, SIGNAL = 0.92; EXPRESSED IN ADULT LIVER, SIGNAL = 1.2; EXPRESSED IN BRAIN, SIGNAL = 1.1; EXPRESSED IN BONE MARROW, SIGNAL = 0.91; EST_HUMAN HIT: AA305185.1, EVALUE 6.00e-22; SWISSPROT HIT: Q13616, EVALUE 5.00e-23
EDDAFAKGPTLTVYKESFESQFLADTERFYTRESTEFLQQNPVTEYMKK

SEQ ID NO: 44465 - protein, 67 aa, Homo sapiens
  MAP TO AC005069.2; EXPRESSED IN LUNG, SIGNAL =   1; EXPRESSED IN FETAL LIVER, SIGNAL = 0.87; EXPRESSED IN BONE MARROW, SIGNAL = 0.78; EXPRESSED IN PLACENTA, SIGNAL = 1.1; EXPRESSED IN BRAIN, SIGNAL = 0.78; EXPRESSED IN ADULT LIVER, SIGNAL = 0.88; EST_HUMAN HIT: AU140892.1, EVALUE 5.00e-12
NEFLAFEGPILLDMRIKHLIKTNQLSQATALAKLCSDHPEIGIKGSFKQTYLVCLCTSSPNGKLIEE

SEQ ID NO: 44466 - protein, 25 aa, Homo sapiens
  MAP TO AC005094.1; EXPRESSED IN LUNG, SIGNAL = 0.78; EXPRESSED IN BONE MARROW, SIGNAL = 0.89; EXPRESSED IN PLACENTA, SIGNAL = 0.99; EXPRESSED IN FETAL LIVER, SIGNAL = 0.96; EXPRESSED IN BRAIN, SIGNAL = 0.84; EXPRESSED IN ADULT LIVER, SIGNAL = 0.9
MYYMKEKSVISKENKDHDNLHFQNK

SEQ ID NO: 44467 - protein, 27 aa, Homo sapiens
  MAP TO AC000117.1; EXPRESSED IN LUNG, SIGNAL = 1.6; EXPRESSED IN BRAIN, SIGNAL = 0.67; EST_HUMAN HIT: BE970966.1, EVALUE 1.10e-01
APKYKCSDACNSNTPKKSHEVRHLSEE

SEQ ID NO: 44468 - protein, 85 aa, Homo sapiens
  MAP TO AC002091.1; EXPRESSED IN LUNG, SIGNAL = 0.45; EXPRESSED IN ADULT LIVER, SIGNAL = 0.49; EXPRESSED IN BRAIN, SIGNAL = 2.3; EST_HUMAN HIT: AW672785.1, EVALUE 4.00e-17; SWISSPROT HIT: O02696, EVALUE 2.00e-21
LSDGMDSGYVEDSEESSSEWPWRRGSQERRGHRRPGQKFIRIYKLFKSTSQLVLRRDSRSLEGSSDTALPLRRAGSLCSPLDEPV

SEQ ID NO: 44469 - protein, 64 aa, Homo sapiens
  MAP TO AC002091.1; EXPRESSED IN LUNG, SIGNAL = 0.45; EXPRESSED IN ADULT LIVER, SIGNAL = 0.49; EXPRESSED IN BRAIN, SIGNAL = 2.3; EST_HUMAN HIT: AW672785.1, EVALUE 7.00e-07
SSQGSWEMMKRRKRRRRRWRRTWKLTGTVPREIPCSPPALWRPMTPPCPLHPPRPRGRPSRAIC

SEQ ID NO: 44470 - protein, 69 aa, Homo sapiens
  MAP TO AC000120.1; EXPRESSED IN LUNG, SIGNAL = 0.49; EXPRESSED IN BRAIN, SIGNAL = 0.56; EXPRESSED IN ADULT LIVER, SIGNAL = 0.5; EST_HUMAN HIT: AW752746.1, EVALUE 2.00e-35; SWISSPROT HIT: Q13402, EVALUE 5.10e+00
NLSTSEGVSKEMHHLQRMFLQNCWEIPTYGAAFFTGQIFTKASPSNHKVIPVYVGVNIKGLHLLNMETK

SEQ ID NO: 44471 - protein, 61 aa, Homo sapiens
  MAP TO AC005209.1; EXPRESSED IN LUNG, SIGNAL = 0.55; EXPRESSED IN FETAL LIVER, SIGNAL = 1.3; EXPRESSED IN BONE MARROW, SIGNAL = 0.67; EXPRESSED IN PLACENTA, SIGNAL = 0.76; EXPRESSED IN BRAIN, SIGNAL = 0.58; EXPRESSED IN ADULT LIVER, SIGNAL = 0.55; EST_HUMAN HIT: BE048015.1, EVALUE 2.00e-17; SWISSPROT HIT: P23098, EVALUE 5.00e-20
VKALLEEILERVTDEFNIPELMAKVEERTPYIVVAFQECGRMNILTREIQRSLRELELGLK

SEQ ID NO: 44472 - protein, 52 aa, Homo sapiens
  MAP TO AC005243.1; EXPRESSED IN BONE MARROW, SIGNAL = 0.74; EXPRESSED IN PLACENTA, SIGNAL = 0.95; EXPRESSED IN LUNG, SIGNAL = 1.2; EXPRESSED IN FETAL LIVER, SIGNAL = 0.89; EXPRESSED IN ADULT LIVER, SIGNAL = 0.87; EXPRESSED IN BRAIN, SIGNAL = 0.79; EST_HUMAN HIT: AA180819.1, EVALUE 3.80e+00
RSTEGRFVFKILPCSGRVVIVIIRGTLVCPRLSFLGFTGIHVEFPFLLNCCP

SEQ ID NO: 44473 - protein, 52 aa, Homo sapiens
  MAP TO AC004801.1; EXPRESSED IN PLACENTA, SIGNAL = 0.75; EXPRESSED IN LUNG, SIGNAL = 0.73; EXPRESSED IN BRAIN, SIGNAL =   1; EXPRESSED IN BONE MARROW, SIGNAL = 0.56; EXPRESSED IN ADULT LIVER, SIGNAL = 0.65; SWISSPROT HIT: P22917, EVALUE 1.20e+00; EST_HUMAN HIT: AV704090.1, EVALUE 2.00e-23
RLQEREHSVHDSVELHLRVPLEKEIPVTVVQETQKKGHKLTDSEDEFPEITE

SEQ ID NO: 44474 - protein, 52 aa, Homo sapiens
  MAP TO AC005077.1; EXPRESSED IN LUNG, SIGNAL = 2.2; EXPRESSED IN FETAL LIVER, SIGNAL = 1.4; EXPRESSED IN BRAIN, SIGNAL = 1.3; EXPRESSED IN BONE MARROW, SIGNAL = 1.3; EXPRESSED IN PLACENTA, SIGNAL = 1.2; EXPRESSED IN ADULT LIVER, SIGNAL = 1.3; EST_HUMAN HIT: AA401706.1, EVALUE 6.00e-03; SWISSPROT HIT: P22144, EVALUE 2.10e+00
QEAGKFKIKKSTDVGVWWFIEGTFSLCPHMARLSAVSSKCTNPNHEGSTFMN

SEQ ID NO: 44475 - protein, 45 aa, Homo sapiens
  MAP TO AC004664.1; EXPRESSED IN PLACENTA, SIGNAL = 0.7; EXPRESSED IN ADULT LIVER, SIGNAL = 0.71; EXPRESSED IN LUNG, SIGNAL = 0.68; EXPRESSED IN FETAL LIVER, SIGNAL = 1.2; EXPRESSED IN BRAIN, SIGNAL = 0.77; EXPRESSED IN BONE MARROW, SIGNAL = 0.56; EST_HUMAN HIT: AV689702.1, EVALUE 8.00e-01; SWISSPROT HIT: P79928, EVALUE 3.60e+00
LAQGWIWPRAVVCPSLTMTTSKPSLSSSGCHDTCREPWWDGSATS

SEQ ID NO: 44476 - protein, 43 aa, Homo sapiens
  MAP TO AC006534.2; EXPRESSED IN LUNG, SIGNAL = 0.76; EXPRESSED IN FETAL LIVER, SIGNAL = 0.92; EXPRESSED IN BRAIN, SIGNAL = 0.66; EXPRESSED IN PLACENTA, SIGNAL = 0.84; EXPRESSED IN BONE MARROW, SIGNAL = 0.72; EXPRESSED IN ADULT LIVER, SIGNAL = 0.78; EST_HUMAN HIT: AI929214.1, EVALUE 4.00e-18
KDSEKHIEVEVRKFLALKQTPDFHTVIGDTVTGLLERCKAEPS

SEQ ID NO: 44477 - protein, 37 aa, Homo sapiens
  MAP TO AC003964.1; EXPRESSED IN PLACENTA, SIGNAL = 0.69; EXPRESSED IN LUNG, SIGNAL = 0.69; EXPRESSED IN ADULT LIVER, SIGNAL = 0.55; EXPRESSED IN BRAIN, SIGNAL = 0.55; EXPRESSED IN BONE MARROW, SIGNAL = 0.63; EST_HUMAN HIT: R43609.1, EVALUE 3.30e+00
RGYRGNGRQQLGRRMESAGGFKLGMEPLSGGGVCELD

SEQ ID NO: 44478 - protein, 19 aa, Homo sapiens
  MAP TO AC005079.1; EXPRESSED IN PLACENTA, SIGNAL = 0.6; EXPRESSED IN LUNG, SIGNAL = 0.74; EXPRESSED IN BONE MARROW, SIGNAL = 0.64; EXPRESSED IN BRAIN, SIGNAL = 0.63; EXPRESSED IN ADULT LIVER, SIGNAL = 0.74
ALGLLQDQLSEGPNQRQQH

SEQ ID NO: 44479 - protein, 88 aa, Homo sapiens
  MAP TO AC005220.1; EXPRESSED IN PLACENTA, SIGNAL = 0.7; EXPRESSED IN LUNG, SIGNAL = 1.3; EXPRESSED IN BONE MARROW, SIGNAL = 0.73; EXPRESSED IN BRAIN, SIGNAL =   2; EXPRESSED IN ADULT LIVER, SIGNAL = 0.68; EST_HUMAN HIT: AI825504.1, EVALUE 2.00e-26; SWISSPROT HIT: P75072, EVALUE 8.30e+00
TSDSTEKTITPPEPEPTGAPQKGKEGSSKDKKSAAEMNKQKSNKQEAKEPAQCTEQATVDTNSLQNGDKLQKRPEKRQQSLGGFFKGL

SEQ ID NO: 44480 - protein, 29 aa, Homo sapiens
  MAP TO AC005220.1; EXPRESSED IN PLACENTA, SIGNAL = 0.7; EXPRESSED IN LUNG, SIGNAL = 1.3; EXPRESSED IN BONE MARROW, SIGNAL = 0.73; EXPRESSED IN BRAIN, SIGNAL =   2; EXPRESSED IN ADULT LIVER, SIGNAL = 0.68; EST_HUMAN HIT: AA644590.1, EVALUE 6.00e-10
LSHRQSLNQQEHHRRVKRAPRRTRSQQPR

SEQ ID NO: 44481 - protein, 61 aa, Homo sapiens
  MAP TO AC005225.2; EXPRESSED IN PLACENTA, SIGNAL = 0.66; EXPRESSED IN LUNG, SIGNAL = 0.76; EXPRESSED IN ADULT LIVER, SIGNAL = 0.55; EXPRESSED IN BRAIN, SIGNAL = 0.72; EXPRESSED IN BONE MARROW, SIGNAL = 0.66; SWISSPROT HIT: P24154, EVALUE 3.50e+00; EST_HUMAN HIT: AA758903.1, EVALUE 4.60e+00
GQIGQVSPELTDLLLWAIHYEESPGVRLEACRSILALKLQGDRVRDTFLDVLLLENHDAVL

SEQ ID NO: 44482 - protein, 52 aa, Homo sapiens
  MAP TO AC004682.1; EXPRESSED IN ADULT LIVER, SIGNAL = 0.81; EXPRESSED IN PLACENTA, SIGNAL = 1.1; EXPRESSED IN LUNG, SIGNAL = 0.89; EXPRESSED IN BRAIN, SIGNAL = 0.97; EXPRESSED IN FETAL LIVER, SIGNAL = 0.93; EXPRESSED IN BONE MARROW, SIGNAL = 0.89; EST_HUMAN HIT: AW852053.1, EVALUE 2.00e-25; SWISSPROT HIT: Q92620, EVALUE 2.00e-26
QADRDWYMMDEGYDEFHNPLAYSSEDYVRRREQHLHKQKQKRISAQRRQINE

SEQ ID NO: 44483 - protein, 24 aa, Homo sapiens
  MAP TO AC005185.1; EXPRESSED IN PLACENTA, SIGNAL = 0.81; EXPRESSED IN BRAIN, SIGNAL = 0.56; EXPRESSED IN BONE MARROW, SIGNAL = 0.64; EXPRESSED IN ADULT LIVER, SIGNAL = 0.57; EXPRESSED IN LUNG, SIGNAL = 0.66
LVWGTSWTKSLSNFSFSFSLWLDE

SEQ ID NO: 44484 - protein, 38 aa, Homo sapiens
  MAP TO AC004655.1; EXPRESSED IN PLACENTA, SIGNAL = 0.89; EXPRESSED IN LUNG, SIGNAL = 0.96; EXPRESSED IN BRAIN, SIGNAL = 1.1; EXPRESSED IN BONE MARROW, SIGNAL = 0.99; EXPRESSED IN ADULT LIVER, SIGNAL = 0.88; EXPRESSED IN FETAL LIVER, SIGNAL = 0.76; EST_HUMAN HIT: AU126949.1, EVALUE 8.00e-14; SWISSPROT HIT: P19836, EVALUE 6.00e-15
DRPVRVYADGIFDLFHSGHARALMQAKTLFPNSYLLVG

SEQ ID NO: 44485 - protein, 167 aa, Homo sapiens
  MAP TO AC006077.1; EXPRESSED IN BRAIN, SIGNAL = 1.1; EXPRESSED IN BONE MARROW, SIGNAL = 0.96; EXPRESSED IN FETAL LIVER, SIGNAL =   1; EXPRESSED IN ADULT LIVER, SIGNAL = 1.1; EXPRESSED IN PLACENTA, SIGNAL = 0.88; EXPRESSED IN LUNG, SIGNAL = 1.1; SWISSPROT HIT: P08399, EVALUE 2.80e-02; EST_HUMAN HIT: AI393853.1, EVALUE 2.00e-47
KMMHPVASSNPAFCGPGKPSCLNEDAMRAADQFDIYSSQQSKYSHTVNHKPMVCQRQDPLNETHLQTTSGRSIEIKDELKKKKNLNRSGKRGRPSGTTKSAGYRTSTGRPLGTTKAAGFKTSPGRPLGTTKAAGYKVSPGRPPGSIKALSRLADLGYGCGTAAFPYP

SEQ ID NO: 44486 - protein, 103 aa, Homo sapiens [sequence omitted]

SEQ ID NO: 44487 - protein, 121 aa, Homo sapiens
  MAP TO AC002465.1; EXPRESSED IN LUNG, SIGNAL = 0.6; EXPRESSED IN BRAIN, SIGNAL = 0.62; EXPRESSED IN BONE MARROW, SIGNAL = 0.64; EXPRESSED IN ADULT LIVER, SIGNAL = 0.65; SWISSPROT HIT: P09544, EVALUE 8.00e-42; EST_HUMAN HIT: AU136463.1, EVALUE 8.00e-41
YMRATGGSSRVMCDNVPGLVSSQRQLCHRHPDVMRAISQGVAEWTAECQHQFRQHRWNCNTLDRDHSLFGRVLLRSKSPAFTQPYGSPLMHSSLTPSSKTLLIFYCILFHQKFVQLGVIVP

SEQ ID NO: 44488 - protein, 19 aa, Homo sapiens
  MAP TO AC004920.1; EXPRESSED IN BRAIN, SIGNAL = 0.56; EXPRESSED IN ADULT LIVER, SIGNAL = 0.44; EXPRESSED IN LUNG, SIGNAL = 0.42
KQEWARVFTPQSSTQDPWD

SEQ ID NO: 44489 - protein, 72 aa, Homo sapiens
  MAP TO AC005162.1; EXPRESSED IN LUNG, SIGNAL = 0.77; EXPRESSED IN PLACENTA, SIGNAL = 0.86; EXPRESSED IN BRAIN, SIGNAL = 0.84; EXPRESSED IN BONE MARROW, SIGNAL = 0.7; EXPRESSED IN ADULT LIVER, SIGNAL = 0.7; EST_HUMAN HIT: H05683.1, EVALUE 3.60e-01; SWISSPROT HIT: P07320, EVALUE 9.40e-01
ARIPQHGTHENVATSHCQLSWYVSRCRTSVPRDACHHLLSTPNAKLFSSLGGFGQRGRNGSSQRPAAPWASK

SEQ ID NO: 44490 - protein, 52 aa, Homo sapiens
  MAP TO AC005162.1; EXPRESSED IN LUNG, SIGNAL = 0.77; EXPRESSED IN PLACENTA, SIGNAL = 0.86; EXPRESSED IN BRAIN, SIGNAL = 0.84; EXPRESSED IN BONE MARROW, SIGNAL = 0.7; EXPRESSED IN ADULT LIVER, SIGNAL = 0.7; EST_HUMAN HIT: BF691532.1, EVALUE 1.30e+00
SNFCPQRRLSSPAVYSKCQVVFFTWWLWAEGEKWLITKTSSTLGFKGGGYTC

SEQ ID NO: 44491 - protein, 45 aa, Homo sapiens
  MAP TO AC005084.1; EXPRESSED IN BONE MARROW, SIGNAL = 0.84; EXPRESSED IN ADULT LIVER, SIGNAL = 0.89; EXPRESSED IN PLACENTA, SIGNAL = 0.8; EXPRESSED IN FETAL LIVER, SIGNAL = 0.72; EXPRESSED IN BRAIN, SIGNAL = 0.75; EXPRESSED IN LUNG, SIGNAL = 0.88; EST_HUMAN HIT: BF060842.1, EVALUE 2.00e-08; SWISSPROT HIT: Q14168, EVALUE 1.90e-01
SLLEAHDIVASKCYDSPPSSPEMNNSSINNQLLPVDAIRILGIHK

SEQ ID NO: 44492 - protein, 52 aa, Homo sapiens
  MAP TO AC005091.1; EXPRESSED IN PLACENTA, SIGNAL =   1; EXPRESSED IN BRAIN, SIGNAL = 0.72; EXPRESSED IN BONE MARROW, SIGNAL = 0.87; EXPRESSED IN ADULT LIVER, SIGNAL = 0.79; EXPRESSED IN LUNG, SIGNAL = 0.83; EXPRESSED IN FETAL LIVER, SIGNAL = 0.68; EST_HUMAN HIT: BE972475.1, EVALUE 2.20e+00
ADLTVQSLRCMDFLWWDVGMVREMGLQRRKIFSCQRSIIWITKIDGSSFCPS

SEQ ID NO: 44493 - protein, 36 aa, Homo sapiens
  MAP TO AC005229.1; EXPRESSED IN PLACENTA, SIGNAL = 0.96; EXPRESSED IN FETAL LIVER, SIGNAL = 0.9; EXPRESSED IN BRAIN, SIGNAL = 0.86; EXPRESSED IN LUNG, SIGNAL =   1; EXPRESSED IN BONE MARROW, SIGNAL = 1.1; EXPRESSED IN ADULT LIVER, SIGNAL = 0.86
VGDGGEEKFQTDSSDFSHFKYVKSLKRLLAILSYMQ

SEQ ID NO: 44494 - protein, 61 aa, Homo sapiens
  MAP TO AC005304.1; EXPRESSED IN PLACENTA, SIGNAL = 0.96; EXPRESSED IN FETAL LIVER, SIGNAL = 0.76; EXPRESSED IN LUNG, SIGNAL = 1.1; EXPRESSED IN BRAIN, SIGNAL = 0.75; EXPRESSED IN BONE MARROW, SIGNAL = 1.4; EXPRESSED IN ADULT LIVER, SIGNAL = 0.85; SWISSPROT HIT: P42780, EVALUE 4.50e+00; EST_HUMAN HIT: AW952338.1, EVALUE 1.00e-11
LVAPLYVRATGRDHCLVLSEGQGMNKDDCPAQKRKRLFSTLSSYSPWSLRVMQRAVAACPG

SEQ ID NO: 44495 - protein, 38 aa, Homo sapiens
  MAP TO AC005527.3; EXPRESSED IN PLACENTA, SIGNAL = 1.3; EXPRESSED IN FETAL LIVER, SIGNAL = 0.93; EXPRESSED IN LUNG, SIGNAL = 1.1; EXPRESSED IN BRAIN, SIGNAL = 0.97; EXPRESSED IN BONE MARROW, SIGNAL = 1.1; EXPRESSED IN ADULT LIVER, SIGNAL = 0.89; EST_HUMAN HIT: BE019811.1, EVALUE 2.00e-05
LAEKYRECLSNKEKILKEIEVKKEYLSSLQPRLNSIMQ

SEQ ID NO: 44496 - protein, 27 aa, Homo sapiens
  MAP TO AC005527.3; EXPRESSED IN PLACENTA, SIGNAL = 1.3; EXPRESSED IN FETAL LIVER, SIGNAL = 0.93; EXPRESSED IN LUNG, SIGNAL = 1.1; EXPRESSED IN BRAIN, SIGNAL = 0.97; EXPRESSED IN BONE MARROW, SIGNAL = 1.1; EXPRESSED IN ADULT LIVER, SIGNAL = 0.89
LFPPPTGWQRSTESAYLTRRRFSRRLR

SEQ ID NO: 44497 - protein, 38 aa, Homo sapiens
  MAP TO AC005138.1; EXPRESSED IN LUNG, SIGNAL = 0.72; EXPRESSED IN BRAIN, SIGNAL = 0.56; EXPRESSED IN PLACENTA, SIGNAL = 0.8; EXPRESSED IN BONE MARROW, SIGNAL = 0.56; EXPRESSED IN ADULT LIVER, SIGNAL = 0.71; EST_HUMAN HIT: AI656614.1, EVALUE 1.00e-03
PRLTAFTLQSCGRSHIWACLSNCWGSRGALCWNVGSRV

SEQ ID NO: 44498 - protein, 27 aa, Homo sapiens
  MAP TO AC004140.1; EXPRESSED IN BONE MARROW, SIGNAL = 1.3; EXPRESSED IN PLACENTA, SIGNAL = 1.5; EXPRESSED IN LUNG, SIGNAL = 1.6; EXPRESSED IN FETAL LIVER, SIGNAL = 1.6; EXPRESSED IN ADULT LIVER, SIGNAL = 1.5; EXPRESSED IN BRAIN, SIGNAL = 1.5; EST_HUMAN HIT: AV721103.1, EVALUE 6.00e-09
WLMKGVQCRIMKEDVNKLPNIIYSASF

SEQ ID NO: 44499 - protein, 57 aa, Homo sapiens
  MAP TO AC002492.1; EXPRESSED IN BRAIN, SIGNAL = 0.65; EXPRESSED IN BONE MARROW, SIGNAL = 0.51; SWISSPROT HIT: Q02152, EVALUE 6.00e+00
LLRVDTRLRLEHLLLLDPEQGDHPLETIPFLLQGRARIICLELEKQLPGIPWAVIFA

SEQ ID NO: 44500 - protein, 37 aa, Homo sapiens
  MAP TO AC005154.1; EXPRESSED IN PLACENTA, SIGNAL = 0.68; EXPRESSED IN FETAL LIVER, SIGNAL = 1.1; EXPRESSED IN BONE MARROW, SIGNAL = 0.97; EXPRESSED IN LUNG, SIGNAL = 0.86; EXPRESSED IN BRAIN, SIGNAL = 0.91; EXPRESSED IN ADULT LIVER, SIGNAL = 0.96; SWISSPROT HIT: P32641, EVALUE 3.70e+00; EST_HUMAN HIT: AI471738.1, EVALUE 9.60e+00
LEMPSSGHTCHFTELPQLSSFSIFLDPSQFVLLTNSD

SEQ ID NO: 44501 - protein, 33 aa, Homo sapiens
  MAP TO AC005536.2; EXPRESSED IN LUNG, SIGNAL = 0.69; EXPRESSED IN BRAIN, SIGNAL = 0.66; EXPRESSED IN BONE MARROW, SIGNAL = 0.5; EXPRESSED IN ADULT LIVER, SIGNAL = 0.62; EXPRESSED IN PLACENTA, SIGNAL = 0.71
YVVNYFTLQKNNTHLKSGKHEKGHVEKNSATDE

SEQ ID NO: 44502 - protein, 45 aa, Homo sapiens
  MAP TO AC004108.1; EXPRESSED IN BRAIN, SIGNAL = 0.91; EXPRESSED IN ADULT LIVER, SIGNAL = 0.74; EXPRESSED IN HELA, SIGNAL = 2.2; EXPRESSED IN BONE MARROW, SIGNAL = 0.78; EXPRESSED IN PLACENTA, SIGNAL = 0.78; EXPRESSED IN LUNG, SIGNAL = 0.82; EXPRESSED IN FETAL LIVER, SIGNAL = 0.86; SWISSPROT HIT: Q09890, EVALUE 4.80e+00
GLPSRMAFQLLGGLRFLWIFYDLFILRMEIIKCYIHVEELKCTIY

SEQ ID NO: 44503 - protein, 36 aa, Homo sapiens
  MAP TO AC005539.1; EXPRESSED IN PLACENTA, SIGNAL = 5.1; EXPRESSED IN BONE MARROW, SIGNAL = 0.68; EXPRESSED IN LUNG, SIGNAL = 0.9; EXPRESSED IN FETAL LIVER, SIGNAL = 0.8; EXPRESSED IN BRAIN, SIGNAL = 0.81; EXPRESSED IN ADULT LIVER, SIGNAL = 0.8; EST_HUMAN HIT: AW802708.1, EVALUE 8.00e-06
FIPGMQSWFQHMQNNQCDTLYQQYEGQKPYNHFHQC

SEQ ID NO: 44504 - protein, 81 aa, Homo sapiens
  MAP TO AC002528.1; EXPRESSED IN PLACENTA, SIGNAL = 0.95; EXPRESSED IN LUNG, SIGNAL = 1.3; EXPRESSED IN FETAL LIVER, SIGNAL = 1.1; EXPRESSED IN BRAIN, SIGNAL = 0.97; EXPRESSED IN ADULT LIVER, SIGNAL = 0.86; EXPRESSED IN BONE MARROW, SIGNAL = 0.97; EST_HUMAN HIT: D57764.1, EVALUE 8.00e-41; SWISSPROT HIT: P08123, EVALUE 1.00e-41
FEYNVEGVTSKEMATQLAFMRLLANYASQNITYHCKNSIAYMDEETGNLKKAVILQGSNDVELVAEGNSRFTYTVLVDGCS

SEQ ID NO: 44505 - protein, 39 aa, Homo sapiens
  MAP TO AC002528.1; EXPRESSED IN PLACENTA, SIGNAL = 0.95; EXPRESSED IN LUNG, SIGNAL = 1.3; EXPRESSED IN FETAL LIVER, SIGNAL = 1.1; EXPRESSED IN BRAIN, SIGNAL = 0.97; EXPRESSED IN ADULT LIVER, SIGNAL = 0.86; EXPRESSED IN BONE MARROW, SIGNAL = 0.97; EST_HUMAN HIT: AI357874.1, EVALUE 1.00e-18; SWISSPROT HIT: P04488, EVALUE 8.30e+00
PRKWLPNLPSCACWPTMPLRTSPTTARTALHTWMRRLAT

SEQ ID NO: 44506 - protein, 29 aa, Homo sapiens
  MAP TO AC004123.1; EXPRESSED IN BRAIN, SIGNAL = 0.94; EXPRESSED IN BONE MARROW, SIGNAL = 0.86; EXPRESSED IN ADULT LIVER, SIGNAL = 0.9; EXPRESSED IN PLACENTA, SIGNAL = 0.72; EXPRESSED IN FETAL LIVER, SIGNAL = 0.92; EXPRESSED IN LUNG, SIGNAL = 0.85
ISDPKSHHSHHSLSFHHSSGMTVLIKILL

SEQ ID NO: 44507 - protein, 20 aa, Homo sapiens
  MAP TO AC004123.1; EXPRESSED IN BRAIN, SIGNAL = 0.94; EXPRESSED IN BONE MARROW, SIGNAL = 0.86; EXPRESSED IN ADULT LIVER, SIGNAL = 0.9; EXPRESSED IN PLACENTA, SIGNAL = 0.72; EXPRESSED IN FETAL LIVER, SIGNAL = 0.92; EXPRESSED IN LUNG, SIGNAL = 0.85
FQIQKAITVIILSLSTTQVE

SEQ ID NO: 44508 - protein, 25 aa, Homo sapiens
  MAP TO AC005350.1; EXPRESSED IN BONE MARROW, SIGNAL = 0.71; EXPRESSED IN PLACENTA, SIGNAL = 0.79; EXPRESSED IN LUNG, SIGNAL = 0.88; EXPRESSED IN FETAL LIVER, SIGNAL = 0.71; EXPRESSED IN BRAIN, SIGNAL = 0.81; EXPRESSED IN ADULT LIVER, SIGNAL = 0.64
TSISDRPSQTMRTALLKVTNAHHLA

SEQ ID NO: 44509 - protein, 103 aa, Homo sapiens
  MAP TO AC002536.1; EXPRESSED IN PLACENTA, SIGNAL = 0.92; EXPRESSED IN FETAL LIVER, SIGNAL =   1; EXPRESSED IN BONE MARROW, SIGNAL = 1.1; EXPRESSED IN ADULT LIVER, SIGNAL = 0.97; EXPRESSED IN LUNG, SIGNAL =   1; EXPRESSED IN BRAIN, SIGNAL = 1.1; SWISSPROT HIT: P47832, EVALUE 1.00e-42; EST_HUMAN HIT: AI751026.1, EVALUE 3.00e-42
ELRQKYNVRSMPIRKDDEVQVVRGHYKGQQIGKVIQVYRKKYVIYIERVQREKANGTTVHVGIHPSKVVITRLKLDKDRKKILERKAKSQQVGKEKGKYKEEL

SEQ ID NO: 44510 - protein, 33 aa, Homo sapiens
  MAP TO AC004808.1; EXPRESSED IN HELA, SIGNAL = 2.3; EXPRESSED IN PLACENTA, SIGNAL = 0.76; EXPRESSED IN BRAIN, SIGNAL = 1.2; EXPRESSED IN ADULT LIVER, SIGNAL = 0.76; EXPRESSED IN LUNG, SIGNAL = 0.85; EXPRESSED IN FETAL LIVER, SIGNAL = 0.81; EXPRESSED IN BONE MARROW, SIGNAL = 0.88; EST_HUMAN HIT: AA883236.1, EVALUE 2.00e-11
LQTSDVVIHRKENEGFGFVIISSLNRPESGSTI

SEQ ID NO: 44511 - protein, 29 aa, Homo sapiens
  MAP TO AC004808.1; EXPRESSED IN HELA, SIGNAL = 2.3; EXPRESSED IN PLACENTA, SIGNAL = 0.76; EXPRESSED IN BRAIN, SIGNAL = 1.2; EXPRESSED IN ADULT LIVER, SIGNAL = 0.76; EXPRESSED IN LUNG, SIGNAL = 0.85; EXPRESSED IN FETAL LIVER, SIGNAL = 0.81; EXPRESSED IN BONE MARROW, SIGNAL = 0.88; EST_HUMAN HIT: AI207753.1, EVALUE 9.00e-07
VCGIFCRGALPREREKSRLCIHPPQLSTQ

SEQ ID NO: 44512 - protein, 53 aa, Homo sapiens
  MAP TO AC004129.1; EXPRESSED IN LUNG, SIGNAL = 0.68; EXPRESSED IN BRAIN, SIGNAL = 0.98; EXPRESSED IN FETAL LIVER, SIGNAL = 1.8; EXPRESSED IN BONE MARROW, SIGNAL = 1.2; EXPRESSED IN ADULT LIVER, SIGNAL = 1.7; EXPRESSED IN PLACENTA, SIGNAL =   1; SWISSPROT HIT: Q99698, EVALUE 3.60e+00
GEREGNGSRLMEERSQQGARGYTSLQSVTSLMHEALTCQSNLIQLLPCGVMRD

SEQ ID NO: 44513 - protein, 76 aa, Homo sapiens
  MAP TO AC005084.1; EXPRESSED IN LUNG, SIGNAL = 0.61; EXPRESSED IN BRAIN, SIGNAL = 0.69; EXPRESSED IN BONE MARROW, SIGNAL = 0.66; EXPRESSED IN ADULT LIVER, SIGNAL = 0.5; SWISSPROT HIT: Q14168, EVALUE 1.00e-25; EST_HUMAN HIT: AA256164.1, EVALUE 9.00e-38
GVTFRVENNDLVIARILHGGMIDRQGLLHVGDIIKEVNGHEVGNNPKELQELLKNISGSVTLKILPSYRDTITPQQ

SEQ ID NO: 44514 - protein, 30 aa, Homo sapiens
  MAP TO AC005229.1; EXPRESSED IN LUNG, SIGNAL = 0.93; EXPRESSED IN BRAIN, SIGNAL = 0.98; EXPRESSED IN BONE MARROW, SIGNAL = 0.87; EXPRESSED IN ADULT LIVER, SIGNAL = 0.86; EXPRESSED IN PLACENTA, SIGNAL = 0.79; EXPRESSED IN FETAL LIVER, SIGNAL = 1.1
VFFAIRKCGRQESEKREERTGLGDQKMPKH

SEQ ID NO: 44515 - protein, 39 aa, Homo sapiens
  MAP TO AC004038.1; EXPRESSED IN LUNG, SIGNAL = 1.3; EXPRESSED IN FETAL LIVER, SIGNAL = 0.9; EXPRESSED IN BRAIN, SIGNAL = 0.58; EXPRESSED IN BONE MARROW, SIGNAL = 1.3; EXPRESSED IN ADULT LIVER, SIGNAL = 0.88; EXPRESSED IN PLACENTA, SIGNAL = 1.3; EST_HUMAN HIT: H87208.1, EVALUE 1.00e-07
GGIPEGGIVITGEDSSICVFAPEEFPVAQNMEVEDSDID

SEQ ID NO: 44516 - protein, 70 aa, Homo sapiens
  MAP TO AC005294.1; EXPRESSED IN PLACENTA, SIGNAL = 0.92; EXPRESSED IN LUNG, SIGNAL = 0.9; EXPRESSED IN FETAL LIVER, SIGNAL = 0.85; EXPRESSED IN BRAIN, SIGNAL = 0.64; EXPRESSED IN ADULT LIVER, SIGNAL = 0.9; EXPRESSED IN BONE MARROW, SIGNAL = 0.82; SWISSPROT HIT: Q01368, EVALUE 1.40e+00; EST_HUMAN HIT: BF671717.1, EVALUE 7.20e+00
PFSNFPVAFPPCMVAVKGLAGAANALHGLVSPHLVELFSGFSPSLNRPSISSPHSFELAVSSAWDALSSE

SEQ ID NO: 44517 - protein, 48 aa, Homo sapiens
  MAP TO AC005509.1; EXPRESSED IN BONE MARROW, SIGNAL = 0.69; EXPRESSED IN PLACENTA, SIGNAL = 0.71; EXPRESSED IN LUNG, SIGNAL = 0.9; EXPRESSED IN FETAL LIVER, SIGNAL = 0.78; EXPRESSED IN BRAIN, SIGNAL = 0.69; EXPRESSED IN ADULT LIVER, SIGNAL = 0.62; EST_HUMAN HIT: AI678202.1, EVALUE 2.00e-13; SWISSPROT HIT: P01133, EVALUE 8.00e-23
ASSDLIWPSGITIDFLTDKLYWCDAKQSVIEMANLDGSKRRRLTQNDV

SEQ ID NO: 44518 - protein, 26 aa, Homo sapiens
  MAP TO AC005304.1; EXPRESSED IN LUNG, SIGNAL = 0.94; EXPRESSED IN BRAIN, SIGNAL = 0.7; EXPRESSED IN BONE MARROW, SIGNAL = 0.85; EXPRESSED IN ADULT LIVER, SIGNAL = 0.88; EXPRESSED IN PLACENTA, SIGNAL = 0.8; EXPRESSED IN FETAL LIVER, SIGNAL = 0.87
HPVVKRLRAKNLTANFIIPDRNGGGQ

SEQ ID NO: 44519 - protein, 25 aa, Homo sapiens
  MAP TO AC005304.1; EXPRESSED IN LUNG, SIGNAL = 0.94; EXPRESSED IN BRAIN, SIGNAL = 0.7; EXPRESSED IN BONE MARROW, SIGNAL = 0.85; EXPRESSED IN ADULT LIVER, SIGNAL = 0.88; EXPRESSED IN PLACENTA, SIGNAL = 0.8; EXPRESSED IN FETAL LIVER, SIGNAL = 0.87
ILWSKDLEPKILQPISSFQTGTEVD

SEQ ID NO: 44520 - protein, 20 aa, Homo sapiens
  MAP TO AC002059.3; EXPRESSED IN PLACENTA, SIGNAL = 0.94; EXPRESSED IN ADULT LIVER, SIGNAL = 1.1; EXPRESSED IN LUNG, SIGNAL = 1.1; EXPRESSED IN FETAL LIVER, SIGNAL = 1.1; EXPRESSED IN BRAIN, SIGNAL = 1.3; EXPRESSED IN BONE MARROW, SIGNAL = 0.98
INVIKGNHCHTHIQENAYPA

SEQ ID NO: 44521 - protein, 55 aa, Homo sapiens
  MAP TO AC005600.1; EXPRESSED IN ADULT LIVER, SIGNAL = 0.63; EXPRESSED IN PLACENTA, SIGNAL = 3.6; EXPRESSED IN LUNG, SIGNAL = 0.64; EXPRESSED IN BRAIN, SIGNAL = 0.72; EXPRESSED IN BONE MARROW, SIGNAL = 0.61; SWISSPROT HIT: P49815, EVALUE 8.00e-21
AMACPNEVVSYEIVLSITRLIKKYRKELQVVAWDILLNIIERLLQQLQVGWGQEL

SEQ ID NO: 44522 - protein, 66 aa, Homo sapiens
  MAP TO AC006409.2; EXPRESSED IN LUNG, SIGNAL = 0.63; EXPRESSED IN BRAIN, SIGNAL = 0.67; EXPRESSED IN ADULT LIVER, SIGNAL = 0.6; EST_HUMAN HIT: BE263297.1, EVALUE 4.00e-32; SWISSPROT HIT: P46097, EVALUE 4.00e-17
PYVKVWLMYKDKRVEKKKTVTMKRNLNPIFNESFAFDIPTEKLRETTIIITVMDKDKLSRNDVIGK

SEQ ID NO: 44523 - protein, 107 aa, Homo sapiens
  MAP TO AC005610.1; EXPRESSED IN BONE MARROW, SIGNAL = 0.61; EXPRESSED IN ADULT LIVER, SIGNAL = 0.64; EXPRESSED IN LUNG, SIGNAL = 0.73; EXPRESSED IN BRAIN, SIGNAL = 0.84; EST_HUMAN HIT: AU122197.1, EVALUE 9.70e-02; SWISSPROT HIT: P55982, EVALUE 3.60e+00
APPQFAARVPVCLRRSGPALWALLLFLKHVRHDPSSWSLHHLFPCLELSSPRDPYPLPKGPPSASPSESVSLPTSSQYSSPTSTVPQALTSADLLHLSSPLETELHM

SEQ ID NO: 44524 - protein, 40 aa, Homo sapiens
  MAP TO AC006241.1; EXPRESSED IN ADULT LIVER, SIGNAL = 0.64; EXPRESSED IN LUNG, SIGNAL = 0.95; EXPRESSED IN PLACENTA, SIGNAL = 0.96; EXPRESSED IN FETAL LIVER, SIGNAL = 0.89; EXPRESSED IN BRAIN, SIGNAL = 0.87; EXPRESSED IN BONE MARROW, SIGNAL = 0.82; EST_HUMAN HIT: BF333723.1, EVALUE 5.00e-16
PEAGTQLPKIIFSRDEKVLGQSQEPNVNPASAGNQTQKTQ

SEQ ID NO: 44525 - protein, 21 aa, Homo sapiens
  MAP TO AC005510.3; EXPRESSED IN BRAIN, SIGNAL = 0.6; EXPRESSED IN ADULT LIVER, SIGNAL = 0.66; EXPRESSED IN PLACENTA, SIGNAL = 0.69; EXPRESSED IN BONE MARROW, SIGNAL = 0.71; EXPRESSED IN LUNG, SIGNAL = 0.68
YNKMLVQTNFKWSHIHFHRFP

SEQ ID NO: 44526 - protein, 31 aa, Homo sapiens
  MAP TO AC004098.1; EXPRESSED IN BRAIN, SIGNAL = 0.61; EXPRESSED IN BONE MARROW, SIGNAL = 0.77; EXPRESSED IN ADULT LIVER, SIGNAL = 0.76; EXPRESSED IN PLACENTA, SIGNAL = 0.59; EXPRESSED IN LUNG, SIGNAL = 0.45; EST_HUMAN HIT: AI014355.1, EVALUE 4.00e-07; SWISSPROT HIT: P46460, EVALUE 3.00e-08
IEVGLVVGNSQVAFEKAENSSLNLIGKIYSF

SEQ ID NO: 44527 - protein, 60 aa, Homo sapiens
  MAP TO AC005324.1; EXPRESSED IN LUNG, SIGNAL = 0.71; EXPRESSED IN BRAIN, SIGNAL = 0.66; EXPRESSED IN BONE MARROW, SIGNAL = 0.65; EXPRESSED IN ADULT LIVER, SIGNAL = 0.5; EST_HUMAN HIT: BE299066.1, EVALUE 3.10e-01; SWISSPROT HIT: Q09855, EVALUE 2.30e-01
IHYSGGDLIAVSSNRKIHLLDIIQVKAIPVEFRGHAGSVRALFLCEEENFLLSGSYDLSI

SEQ ID NO: 44528 - protein, 38 aa, Homo sapiens
  MAP TO AC003682.1; EXPRESSED IN LUNG, SIGNAL = 0.41; EXPRESSED IN BONE MARROW, SIGNAL = 0.51; EXPRESSED IN BRAIN, SIGNAL = 0.61; EXPRESSED IN ADULT LIVER, SIGNAL = 0.41; EST_HUMAN HIT: AA573446.1, EVALUE 1.00e-16; SWISSPROT HIT: Q28691, EVALUE 6.40e+00
KNGKFGHRGRCTEGRRCEDTGRTSSSQGTHGATRSRDR

SEQ ID NO: 44529 - protein, 45 aa, Homo sapiens
  MAP TO AC003682.1; EXPRESSED IN LUNG, SIGNAL = 0.41; EXPRESSED IN BONE MARROW, SIGNAL = 0.51; EXPRESSED IN BRAIN, SIGNAL = 0.61; EXPRESSED IN ADULT LIVER, SIGNAL = 0.41; EST_HUMAN HIT: AA573446.1, EVALUE 1.00e-19; SWISSPROT HIT: Q57809, EVALUE 8.20e+00
LIDYDCVLRKMGNLVTEADVQREDDVKTQEEHLQAKEHTGLPEAE

SEQ ID NO: 44530 - protein, 50 aa, Homo sapiens
  MAP TO AC003043.1; EXPRESSED IN PLACENTA, SIGNAL = 0.67; EXPRESSED IN LUNG, SIGNAL = 0.69; EXPRESSED IN BONE MARROW, SIGNAL = 0.49; EXPRESSED IN BRAIN, SIGNAL = 0.66; EXPRESSED IN ADULT LIVER, SIGNAL = 0.56; EST_HUMAN HIT: AW878361.1, EVALUE 1.00e-11; SWISSPROT HIT: P39188, EVALUE 7.00e-03
STLGNLLVPHSWEVTISMLNLVWTPDLHSALQSRTGLKQSSCFSLPSSWD

SEQ ID NO: 44531 - protein, 66 aa, Homo sapiens
  MAP TO AC002073.1; EXPRESSED IN ADULT LIVER, SIGNAL = 0.61; EXPRESSED IN LUNG, SIGNAL = 0.64; EXPRESSED IN BRAIN, SIGNAL = 0.6; EXPRESSED IN BONE MARROW, SIGNAL = 0.59; SWISSPROT HIT: P16219, EVALUE 1.00e-01; EST_HUMAN HIT: AW410961.1, EVALUE 2.00e-31
SFADSQGWQARGPRPLHLLRTPVQGGPVGAAMALARAEGRTALSSATSAWTQPRMPSSACVATSSG

SEQ ID NO: 44532 - protein, 76 aa, Homo sapiens
  MAP TO AC003007.1; EXPRESSED IN ADULT LIVER, SIGNAL = 0.58; EXPRESSED IN LUNG, SIGNAL = 0.67; EXPRESSED IN BRAIN, SIGNAL = 0.64; EXPRESSED IN BONE MARROW, SIGNAL = 0.6; EST_HUMAN HIT: AI520718.1, EVALUE 6.00e-31; SWISSPROT HIT: P19711, EVALUE 8.00e+00
VVAVARAVYQAVLSLKNIPVLETAYKLILGEMTCALNNLLHSLQLPESCSEIKHEAFKNHVFNVDNAKFVVKFDLN

SEQ ID NO: 44533 - protein, 95 aa, Homo sapiens
  MAP TO AC000384.1; EXPRESSED IN LUNG, SIGNAL = 0.66; EXPRESSED IN BRAIN, SIGNAL = 0.67; EXPRESSED IN BONE MARROW, SIGNAL = 0.62; EXPRESSED IN ADULT LIVER, SIGNAL = 0.67; EST_HUMAN HIT: AU121706.1, EVALUE 3.00e-13; SWISSPROT HIT: P45844, EVALUE 5.00e-14
GLPQTEQALPLQVGGVMAEKALEAVGCGLGPGAVAMAVTLEDGAEPPVLTTHLKKVENHITEAQRFSHLPKRSAVDIEFVELSYSVREGPCWRKR

SEQ ID NO: 44534 - protein, 39 aa, Homo sapiens
  MAP TO AC003082.1; EXPRESSED IN PLACENTA, SIGNAL = 0.66; EXPRESSED IN LUNG, SIGNAL = 0.58; EXPRESSED IN BRAIN, SIGNAL = 0.71; EXPRESSED IN BONE MARROW, SIGNAL = 0.63; EXPRESSED IN ADULT LIVER, SIGNAL = 0.51
FQVKKNKTSGIVLVLLSGELKKEEEERTNKKNERGGGEQ

SEQ ID NO: 44535 - protein, 57 aa, Homo sapiens
  MAP TO AC005683.2; EXPRESSED IN LUNG, SIGNAL = 0.58; EXPRESSED IN PLACENTA, SIGNAL = 0.63; EXPRESSED IN BRAIN, SIGNAL = 1.7; EXPRESSED IN BONE MARROW, SIGNAL = 0.52; EXPRESSED IN ADULT LIVER, SIGNAL = 0.4; SWISSPROT HIT: P35331, EVALUE 7.00e-20; EST_HUMAN HIT: AV709544.1, EVALUE 5.00e-27
NSTHELGPLVDLKIPANKTRWTLKNLNFSTRYKFYFYAQTSAGSGSQITEEAVTTVD

SEQ ID NO: 44536 - protein, 28 aa, Homo sapiens
  MAP TO AC003684.1; EXPRESSED IN LUNG, SIGNAL = 0.47; EXPRESSED IN PLACENTA, SIGNAL = 0.58; EXPRESSED IN BRAIN, SIGNAL = 0.65; EXPRESSED IN ADULT LIVER, SIGNAL = 1.2; SWISSPROT HIT: P41212, EVALUE 6.60e+00; EST_HUMAN HIT: BF664464.1, EVALUE 7.90e+00
CCAGNWRGPHPASDSLLHNPQSREVLHA

SEQ ID NO: 44537 - protein, 47 aa, Homo sapiens
  MAP TO AC003002.1; EXPRESSED IN BRAIN, SIGNAL = 0.63; EXPRESSED IN BONE MARROW, SIGNAL = 0.57; EXPRESSED IN ADULT LIVER, SIGNAL = 0.91; EXPRESSED IN LUNG, SIGNAL = 0.56; EST_HUMAN HIT: BE670351.1, EVALUE 3.00e-08; SWISSPROT HIT: Q60696, EVALUE 3.70e-02
PMNLTEVGAASQGAPPDPSSECRSPEEGPCRSGPCVPKRGAFLCGVP

SEQ ID NO: 44538 - protein, 46 aa, Homo sapiens
  MAP TO AC005703.1; EXPRESSED IN BRAIN, SIGNAL = 0.69; EXPRESSED IN PLACENTA, SIGNAL =   1; EXPRESSED IN LUNG, SIGNAL = 0.58; EXPRESSED IN BONE MARROW, SIGNAL = 0.59; EXPRESSED IN ADULT LIVER, SIGNAL = 0.6; EST_HUMAN HIT: N71737.1, EVALUE 8.00e-07
CGHLHGEAPGVASQLGLLLRFRLHPGLGGLPPGPSQRCHLCDLAET

SEQ ID NO: 44539 - protein, 23 aa, Homo sapiens
  MAP TO AC004384.1; EXPRESSED IN PLACENTA, SIGNAL = 0.62; EXPRESSED IN ADULT LIVER, SIGNAL = 0.49; EXPRESSED IN LUNG, SIGNAL = 0.48; EXPRESSED IN BRAIN, SIGNAL = 0.58; EXPRESSED IN BONE MARROW, SIGNAL = 0.51
EKFPILRWTVSTKKEIPIPGDNQ

SEQ ID NO: 44540 - protein, 54 aa, Homo sapiens
  MAP TO AC004169.3; EXPRESSED IN LUNG, SIGNAL = 0.46; EXPRESSED IN BRAIN, SIGNAL = 0.73; EXPRESSED IN ADULT LIVER, SIGNAL = 0.54; EXPRESSED IN BONE MARROW, SIGNAL = 0.77; SWISSPROT HIT: O54861, EVALUE 9.00e-03; EST_HUMAN HIT: BE067923.1, EVALUE 4.00e-07
QLLTLMFLLQGDRCIMGQQRSFRKRKSTSWCIKGRSFTSALTSRVCECRDSDFL

SEQ ID NO: 44541 - protein, 34 aa, Homo sapiens
  MAP TO AC005831.1; EXPRESSED IN LUNG, SIGNAL = 0.68; EXPRESSED IN BONE MARROW, SIGNAL = 0.62; EXPRESSED IN ADULT LIVER, SIGNAL = 0.61; EXPRESSED IN BRAIN, SIGNAL = 0.62; SWISSPROT HIT: P17964, EVALUE 6.00e-03; EST_HUMAN HIT: AA677514.1, EVALUE 2.30e-01
EAVGDRVPVLLLGNKLDNEKEREVPRGLGEQLAT

SEQ ID NO: 44542 - protein, 52 aa, Homo sapiens
  MAP TO AC004066.1; EXPRESSED IN PLACENTA, SIGNAL = 0.58; EXPRESSED IN LUNG, SIGNAL = 0.76; EXPRESSED IN BRAIN, SIGNAL = 0.64; EXPRESSED IN BONE MARROW, SIGNAL = 0.52; EXPRESSED IN ADULT LIVER, SIGNAL = 0.47; EST_HUMAN HIT: BF576314.1, EVALUE 2.00e-23; SWISSPROT HIT: Q44697, EVALUE 4.70e+00
MSALLRLLRTGAPAAACLRLGTSAGTGSRRAMALYHTEERGQPCSQNYRLFF

SEQ ID NO: 44543 - protein, 66 aa, Homo sapiens
  MAP TO AC002477.1; EXPRESSED IN BRAIN, SIGNAL = 1.7; EXPRESSED IN PLACENTA, SIGNAL = 2.1; EXPRESSED IN LUNG, SIGNAL = 0.46; EXPRESSED IN HELA, SIGNAL = 2.2; EXPRESSED IN BONE MARROW, SIGNAL = 2.1; EXPRESSED IN ADULT LIVER, SIGNAL = 1.9; EXPRESSED IN FETAL LIVER, SIGNAL = 1.9; EST_HUMAN HIT: BE535227.1, EVALUE 5.00e-07
RSPDREASGSGGRRRSSSKSPKPSKSARSPRGRRSRSHSCSRSGDRNGLTHQLGGLSQGSRNQSYR

SEQ ID NO: 44544 - protein, 51 aa, Homo sapiens
  MAP TO AC005884.1; EXPRESSED IN BRAIN, SIGNAL = 0.85; EXPRESSED IN PLACENTA, SIGNAL = 0.8; EXPRESSED IN LUNG, SIGNAL = 0.99; EXPRESSED IN BONE MARROW, SIGNAL = 0.89; EXPRESSED IN ADULT LIVER, SIGNAL = 0.87; EXPRESSED IN FETAL LIVER, SIGNAL = 0.71; EST_HUMAN HIT: BF001692.1, EVALUE 4.00e-11
PHRRLWMGPQFQFKTIHPSGQTTVISSSSSVLQSHGPSDTPQPLLDFDTDD

SEQ ID NO: 44545 - protein, 76 aa, Homo sapiens
  MAP TO AC002364.1; EXPRESSED IN BRAIN, SIGNAL = 0.55; EXPRESSED IN ADULT LIVER, SIGNAL = 0.57; EXPRESSED IN LUNG, SIGNAL = 0.48; SWISSPROT HIT: P37709, EVALUE 1.90e+00; EST_HUMAN HIT: BE515100.1, EVALUE 2.00e-27
SCRSSLAELMARTSLDLELDLQASRTRQRQLNEELCALRELRQRLEDAQLRGQTDLPPWVLRDERLRGLLREAERQ

SEQ ID NO: 44546 - protein, 41 aa, Homo sapiens
  MAP TO AC006075.1; EXPRESSED IN PLACENTA, SIGNAL = 0.67; EXPRESSED IN BRAIN, SIGNAL = 0.7; EXPRESSED IN ADULT LIVER, SIGNAL = 0.48; EXPRESSED IN LUNG, SIGNAL = 0.5; EXPRESSED IN BONE MARROW, SIGNAL = 0.57; SWISSPROT HIT: Q9RQW7, EVALUE 8.30e+00; EST_HUMAN HIT: AU118435.1, EVALUE 4.00e-18
TDGQPQTQPSENTENKSQPKRLHVSNIPFRFRDPDLRQMFG

SEQ ID NO: 44547 - protein, 33 aa, Homo sapiens
  MAP TO AC004844.1; EXPRESSED IN LUNG, SIGNAL = 0.56; EXPRESSED IN BRAIN, SIGNAL = 0.63; EXPRESSED IN BONE MARROW, SIGNAL = 0.51; EXPRESSED IN ADULT LIVER, SIGNAL = 0.52; EXPRESSED IN PLACENTA, SIGNAL = 0.57
GLSSVLCLSRDPTINHMQLQLLKLFLQCEFPKR

SEQ ID NO: 44548 - protein, 41 aa, Homo sapiens
  MAP TO AC002070.1; EXPRESSED IN ADULT LIVER, SIGNAL = 0.51; EXPRESSED IN LUNG, SIGNAL = 0.53; EXPRESSED IN BRAIN, SIGNAL = 0.65; EXPRESSED IN BONE MARROW, SIGNAL = 0.65; SWISSPROT HIT: Q00971, EVALUE 2.80e+00
RTNCDINIHYKSGVCNTMRAKFYSVAQEAGFCLQDKMEILM

SEQ ID NO: 44549 - protein, 55 aa, Homo sapiens
  MAP TO AC002070.1; EXPRESSED IN ADULT LIVER, SIGNAL = 0.51; EXPRESSED IN LUNG, SIGNAL = 0.53; EXPRESSED IN BRAIN, SIGNAL = 0.65; EXPRESSED IN BONE MARROW, SIGNAL = 0.65; SWISSPROT HIT: Q9X8P6, EVALUE 3.10e-01
FHLVLQAEASLLGYAVKLGPHGVTHPTLVVDVDVTISAAVDTDKKGLGNGAQGCP

SEQ ID NO: 44550 - protein, 33 aa, Homo sapiens
  MAP TO AC002490.1; EXPRESSED IN PLACENTA, SIGNAL = 0.69; EXPRESSED IN LUNG, SIGNAL = 0.78; EXPRESSED IN BRAIN, SIGNAL = 0.9; EXPRESSED IN ADULT LIVER, SIGNAL = 0.7; EXPRESSED IN BONE MARROW, SIGNAL = 0.71; EST_HUMAN HIT: BF057636.1, EVALUE 1.00e-14
AIAPQPCEQQAHPVDRWWEREVMPLGLQLEFCH

SEQ ID NO: 44551 - protein, 28 aa, Homo sapiens
  MAP TO AC000121.1; EXPRESSED IN LUNG, SIGNAL = 0.55; EXPRESSED IN BRAIN, SIGNAL = 0.57; EXPRESSED IN BONE MARROW, SIGNAL = 0.51; EXPRESSED IN ADULT LIVER, SIGNAL = 0.44; SWISSPROT HIT: P76008, EVALUE 2.90e+00
VECNNCETGEQCGAIMHGNAVTFCEPYG

SEQ ID NO: 44552 - protein, 41 aa, Homo sapiens
  MAP TO AC006322.2; EXPRESSED IN ADULT LIVER, SIGNAL = 0.46; EXPRESSED IN LUNG, SIGNAL = 0.54; EXPRESSED IN BRAIN, SIGNAL = 0.56; EST_HUMAN HIT: BF700780.1, EVALUE 1.00e-17; SWISSPROT HIT: Q14563, EVALUE 1.00e-18
PEERIIYGVENSSTFLECSPKSQRALVYWQFQRRNEERKEE

SEQ ID NO: 44553 - protein, 67 aa, Homo sapiens
  MAP TO AC003104.1; EXPRESSED IN PLACENTA, SIGNAL = 0.6; EXPRESSED IN LUNG, SIGNAL = 0.51; EXPRESSED IN BRAIN, SIGNAL = 0.67; EXPRESSED IN BONE MARROW, SIGNAL = 0.63; EXPRESSED IN ADULT LIVER, SIGNAL = 0.44; EST_HUMAN HIT: AU116850.1, EVALUE 8.00e-33; SWISSPROT HIT: Q44427, EVALUE 3.00e+00
VHLVTQHGEEFRRMLDGRWTVTTLSGDMGPRAGFGHLARCHDLLICTAELLQMALTSPEEEEHVELT

SEQ ID NO: 44554 - protein, 32 aa, Homo sapiens
  MAP TO AC004682.1; EXPRESSED IN BRAIN, SIGNAL = 0.56; EXPRESSED IN PLACENTA, SIGNAL = 0.6; EXPRESSED IN LUNG, SIGNAL = 0.58; EXPRESSED IN BONE MARROW, SIGNAL = 0.53; EXPRESSED IN ADULT LIVER, SIGNAL = 0.47
SLLRCSISSSEARKGGKITSFSSLGATPRRVT

SEQ ID NO: 44555 - protein, 68 aa, Homo sapiens
  MAP TO AC004877.1; EXPRESSED IN PLACENTA, SIGNAL = 0.71; EXPRESSED IN LUNG, SIGNAL = 0.59; EXPRESSED IN BRAIN, SIGNAL = 0.58; EXPRESSED IN ADULT LIVER, SIGNAL = 0.55; EXPRESSED IN BONE MARROW, SIGNAL = 0.57; EST_HUMAN HIT: BE794607.1, EVALUE 2.00e-05
TLVGFTWLAPAPRALEMLPLTAAPATLAPVWPLLPSAPGNSCPETSCFEPFALLRQPARALALTTEGP

SEQ ID NO: 44556 - protein, 39 aa, Homo sapiens
  MAP TO AC006299.1; EXPRESSED IN LUNG, SIGNAL = 0.46; EXPRESSED IN BRAIN, SIGNAL = 0.62; EXPRESSED IN BONE MARROW, SIGNAL = 0.82; EXPRESSED IN ADULT LIVER, SIGNAL = 0.53; EST_HUMAN HIT: AU135945.1, EVALUE 9.00e-05; SWISSPROT HIT: P11369, EVALUE 7.00e-06
IETRQGCVLSSLVFNIMLGVLASAIKQAKEIQKIHIEKE

SEQ ID NO: 44557 - protein, 54 aa, Homo sapiens
  MAP TO AC006319.2; EXPRESSED IN LUNG, SIGNAL = 0.56; EXPRESSED IN BRAIN, SIGNAL = 0.71; EXPRESSED IN BONE MARROW, SIGNAL = 0.58; EXPRESSED IN ADULT LIVER, SIGNAL = 0.59; EST_HUMAN HIT: AA504140.1, EVALUE 3.00e-03
PETSVASVASASVFLIPAGLIPPTLPDRLRSACATNLGPTPRVSHMQSGKDCVS

SEQ ID NO: 44558 - protein, 42 aa, Homo sapiens
  MAP TO AC006319.2; EXPRESSED IN LUNG, SIGNAL = 0.56; EXPRESSED IN BRAIN, SIGNAL = 0.71; EXPRESSED IN BONE MARROW, SIGNAL = 0.58; EXPRESSED IN ADULT LIVER, SIGNAL = 0.59; EST_HUMAN HIT: AI884398.1, EVALUE 4.10e+00
QKPLWPALPLLQFFSFLLGSFHPLCPTGCAQLVLPTSVLRQG

SEQ ID NO: 44559 - protein, 38 aa, Homo sapiens
  MAP TO AC006458.2; EXPRESSED IN LUNG, SIGNAL = 0.44; EXPRESSED IN BRAIN, SIGNAL = 0.56; EXPRESSED IN ADULT LIVER, SIGNAL = 0.48
AALSDPLTAIGEVGSMPCGAVFHLEVVGGSQDSEHQSQ

SEQ ID NO: 44560 - protein, 110 aa, Homo sapiens
  MAP TO AC006463.3; EXPRESSED IN LUNG, SIGNAL = 0.46; EXPRESSED IN BRAIN, SIGNAL = 0.63; EXPRESSED IN ADULT LIVER, SIGNAL = 0.51; EXPRESSED IN PLACENTA, SIGNAL = 0.66; EST_HUMAN HIT: W52673.1, EVALUE 5.00e-57; SWISSPROT HIT: O87667, EVALUE 2.50e+00
FLKSDRVARMVQSGGCSANDFREVFKKNIEKRVRSLPEIDGLSKETVLSSWIAKYDAIYRGEEDLCKQPNRMALSAVSELILSKEQLYEMFQQILGIKKLEHQLLYNACQ

SEQ ID NO: 44561 - protein, 62 aa, Homo sapiens
  MAP TO AC005028.1; EXPRESSED IN BRAIN, SIGNAL = 0.64; EXPRESSED IN ADULT LIVER, SIGNAL = 0.46; EST_HUMAN HIT: AI690322.1, EVALUE 1.00e-05; SWISSPROT HIT: O14256, EVALUE 1.20e+00
LTSNHRNNHGSIIQHHLKHMILLLMYCQKVSGTLLLCHNAYIIHLTSFHRHGITSHHHKKKK

SEQ ID NO: 44562 - protein, 51 aa, Homo sapiens
  MAP TO AC005042.1; EXPRESSED IN BRAIN, SIGNAL = 0.65; EST_HUMAN HIT: AU126185.1, EVALUE 1.00e-26
NTPCETWSTGSPAAMAPVSCLMRPWQPSAVLCTRSPAKTWRTQKPWPTQEA

SEQ ID NO: 44563 - protein, 40 aa, Homo sapiens
  MAP TO AC004656.1; EXPRESSED IN LUNG, SIGNAL = 0.76; EXPRESSED IN BRAIN, SIGNAL = 0.91; EXPRESSED IN BONE MARROW, SIGNAL = 0.73; EXPRESSED IN PLACENTA, SIGNAL = 1.8; EXPRESSED IN ADULT LIVER, SIGNAL = 0.56; SWISSPROT HIT: Q15120, EVALUE 2.00e-18; EST_HUMAN HIT: AA156158.1, EVALUE 3.00e-12
GVIEYKEKFGFDPFISTNIQYFLDRFYTNRISFRMLINQH

SEQ ID NO: 44564 - protein, 81 aa, Homo sapiens
  MAP TO AC002480.1; EXPRESSED IN PLACENTA, SIGNAL = 1.3; EXPRESSED IN LUNG, SIGNAL = 0.65; EXPRESSED IN BRAIN, SIGNAL = 0.66; EXPRESSED IN BONE MARROW, SIGNAL = 0.61; EXPRESSED IN ADULT LIVER, SIGNAL = 0.54
REEGGREGGREKGREREKKKKKEEEEGEEEEEEEGEEEEAEGEKRTEGKREERNRKRERVRPSWSQQLSIPSGLPSQGLFF

SEQ ID NO: 44565 - protein, 57 aa, Homo sapiens
  MAP TO AC005079.1; EXPRESSED IN PLACENTA, SIGNAL = 0.87; EXPRESSED IN LUNG, SIGNAL = 0.59; EXPRESSED IN BRAIN, SIGNAL = 0.76; EXPRESSED IN ADULT LIVER, SIGNAL = 0.47; SWISSPROT HIT: P26767, EVALUE 2.70e+00; EST_HUMAN HIT: AW368587.1, EVALUE 1.00e-07
FCHVYITEHSYVSVKAKVSSIAQEILKVVAEKIQYAEEDLALVAITFSGGKLFSTLE

SEQ ID NO: 44566 - protein, 71 aa, Homo sapiens
  MAP TO AC002091.1; EXPRESSED IN FETAL LIVER, SIGNAL = 0.72; EXPRESSED IN BRAIN, SIGNAL = 0.66; SWISSPROT HIT: O84752, EVALUE 6.00e+00
MYFTSLASSRPSASFGRHVQRDFDPGLVVLNGDAIVHLEIWGVVALAVIVIGSHYYHLVVRDQRYYMSSMH

SEQ ID NO: 44567 - protein, 112 aa, Homo sapiens
  MAP TO AC000385.1; EXPRESSED IN BRAIN, SIGNAL = 0.56; EST_HUMAN HIT: AL042377.1, EVALUE 4.00e-10; SWISSPROT HIT: P56695, EVALUE 7.20e-01
MPSPSPGGPTEPALRRPSSAERPLAPYPSSSPGAGRAPQPWPALPAAPKPLASPEAGMAGPGGRRTTSLPKRRGCGCSWRGEAQNPRTARTGRTRRGQAGRRPAPRQVAKAE

SEQ ID NO: 44568 - protein, 48 aa, Homo sapiens
  MAP TO AC002553.1; EXPRESSED IN BRAIN, SIGNAL = 0.59; EST_HUMAN HIT: BE256147.1, EVALUE 3.00e-20; SWISSPROT HIT: P81274, EVALUE 4.20e-01
TIVLMSDLATTLDAQGRFDEAYIYMQRASDLARQINHPELHMVLSNLA

SEQ ID NO: 44569 - protein, 46 aa, Homo sapiens
  MAP TO AC003663.1; EXPRESSED IN BRAIN, SIGNAL = 0.73; EXPRESSED IN BONE MARROW, SIGNAL = 0.55; EST_HUMAN HIT: AA316632.1, EVALUE 4.00e-20; SWISSPROT HIT: P52292, EVALUE 3.00e-18
ETRRHRIEVNVELRKAKKDDQMLKRRNVSSFPDDATSPLQENCNNQ

SEQ ID NO: 44570 - protein, 41 aa, Homo sapiens
  MAP TO AC003007.1; EXPRESSED IN BRAIN, SIGNAL = 0.65; EXPRESSED IN BONE MARROW, SIGNAL = 0.56; EXPRESSED IN ADULT LIVER, SIGNAL = 0.53; EST_HUMAN HIT: AA939218.1, EVALUE 2.00e-18; SWISSPROT HIT: P94464, EVALUE 3.70e+00
PLFGEALRSCKQHDVRPWMQALRYTVYQNQLLEKIKVKWFS

SEQ ID NO: 44571 - protein, 40 aa, Homo sapiens
  MAP TO AC002523.1; EXPRESSED IN BONE MARROW, SIGNAL = 0.53; EXPRESSED IN ADULT LIVER, SIGNAL = 0.44; EXPRESSED IN LUNG, SIGNAL = 0.51; EXPRESSED IN BRAIN, SIGNAL =   2; EXPRESSED IN PLACENTA, SIGNAL = 1.6; EXPRESSED IN FETAL LIVER, SIGNAL = 1.6; EXPRESSED IN HELA, SIGNAL = 1.7
FSKEKTEASPQDFPGQEAVMPHLDTEGCLKASGPQCPRYP

SEQ ID NO: 44572 - protein, 46 aa, Homo sapiens
  MAP TO AC006208.3; EXPRESSED IN LUNG, SIGNAL = 0.85; EXPRESSED IN BRAIN, SIGNAL = 0.86; SWISSPROT HIT: P24238, EVALUE 6.20e+00; EST_HUMAN HIT: AW402076.1, EVALUE 3.00e-19
KMENYELIHSSRVKFTYPSEEEIGDLTFTVAQKMAEPEKAPALSIL

SEQ ID NO: 44573 - protein, 105 aa, Homo sapiens
  MAP TO AB019438.1; EXPRESSED IN BRAIN, SIGNAL = 0.56; EST_HUMAN HIT: AW405472.1, EVALUE 5.00e-44; SWISSPROT HIT: P06331, EVALUE 2.00e-36
VLSQVQLQESGPGLVKPSETLSLTCTVSGGSISSYYWSWIRQPPGKGLEWIGYIYYSGSTNYNPSLKSRVTISVDTSKNQFSLKLSSVTAADTAVYYCARDTVRG

SEQ ID NO: 44574 - protein, 68 aa, Homo sapiens
  MAP TO AC005297.1; EXPRESSED IN PLACENTA, SIGNAL = 0.68; EXPRESSED IN ADULT LIVER, SIGNAL = 0.63; EXPRESSED IN FETAL LIVER, SIGNAL = 0.52; EXPRESSED IN BRAIN, SIGNAL = 0.65; EXPRESSED IN BONE MARROW, SIGNAL = 0.51; EST_HUMAN HIT: AW271505.1, EVALUE 2.00e-04; SWISSPROT HIT: P38742, EVALUE 3.40e-02
IKEHNYKEIKRNKELNDLPRESDRHKHEYYHTILVSIKSNEQDSLRTEWDEYNDYKLSKKLYENPRMP

SEQ ID NO: 44575 - protein, 113 aa, Homo sapiens
  MAP TO AC006385.3; EXPRESSED IN BRAIN, SIGNAL = 0.76; SWISSPROT HIT: P11137, EVALUE 2.00e-46; EST_HUMAN HIT: AA760692.1, EVALUE 1.00e-42
SEPIRRAGKSGTSTPTTPGSTAITPGTPPSYSSRTPGTPGTPSYPRTPHTPGTPKSAILVPSEKKVAIIRTPPKSPATPKQLRLINQPLPDLKNVKSKIGSTDNIKYQPKGGQ

SEQ ID NO: 44576 - protein, 39 aa, Homo sapiens
  MAP TO AC006385.3; EXPRESSED IN BRAIN, SIGNAL = 0.76; EST_HUMAN HIT: AA760692.1, EVALUE 5.00e-17
PPSLPSWCRVRRRSPSYVLLQNLLRLPSSFGLLTNHCQT

SEQ ID NO: 44577 - protein, 48 aa, Homo sapiens
  MAP TO AC006329.2; EXPRESSED IN BRAIN, SIGNAL = 0.55; EST_HUMAN HIT: AW026449.1, EVALUE 9.00e-13; SWISSPROT HIT: P41453, EVALUE 8.10e+00
PPLNKLKLVHSNLEDDPEEIRMEFIKYLKSIINSMSESRDREEMSIMT

SEQ ID NO: 44578 - protein, 43 aa, Homo sapiens
  MAP TO AC000380.1; EXPRESSED IN BRAIN, SIGNAL = 0.56; EST_HUMAN HIT: BE261930.1, EVALUE 1.80e+00
CTLQQDCTNSSQQHFWTSASEGPSRCPAMTVLPSEIDVRQEYP

SEQ ID NO: 44579 - protein, 65 aa, Homo sapiens
  MAP TO AC013597.3; EXPRESSED IN ADULT LIVER, SIGNAL = 0.64; EXPRESSED IN BRAIN, SIGNAL = 0.73; EXPRESSED IN BONE MARROW, SIGNAL = 0.64; EXPRESSED IN PLACENTA, SIGNAL = 0.61; EXPRESSED IN FETAL LIVER, SIGNAL = 0.63; EST_HUMAN HIT: BF696759.1, EVALUE 7.50e+00; SWISSPROT HIT: P39635, EVALUE 2.60e+00
WSGWSTYQVTFEQMLERDKGGKWIFGRIPIQAEEMPVHTGSYMTTCLGNFQTAENPSELNRGSKK

SEQ ID NO: 44580 - protein, 40 aa, Homo sapiens
  MAP TO AC015785.3; EXPRESSED IN LUNG, SIGNAL =   1; EXPRESSED IN PLACENTA, SIGNAL = 0.89; EXPRESSED IN BONE MARROW, SIGNAL = 0.91; EXPRESSED IN FETAL LIVER, SIGNAL = 0.97; EXPRESSED IN BRAIN, SIGNAL = 0.98; EXPRESSED IN ADULT LIVER, SIGNAL = 1.1
DSRMMEWSVWVRMQGQNCGRERWWWSRWSSGFGSWQACSR

SEQ ID NO: 44581 - protein, 83 aa, Homo sapiens
  MAP TO AL133352.10; EXPRESSED IN BONE MARROW, SIGNAL = 0.85; EXPRESSED IN PLACENTA, SIGNAL = 0.67; EXPRESSED IN ADULT LIVER, SIGNAL = 0.57; EXPRESSED IN FETAL LIVER, SIGNAL = 0.93; EXPRESSED IN BRAIN, SIGNAL = 0.72; EST_HUMAN HIT: BF309962.1, EVALUE 5.00e-44; SWISSPROT HIT: Q17308, EVALUE 3.40e+00
EPVVLTDTNLVYPALKWDLEYLQENIGNGDFSVYSASTHKFLYYDEKKMANFQNFKPRSNREEMKFHEFVEKLQDIQQRGGEE

SEQ ID NO: 44582 - protein, 31 aa, Homo sapiens
  MAP TO AC008164.3; EXPRESSED IN PLACENTA, SIGNAL = 0.58; EXPRESSED IN FETAL LIVER, SIGNAL = 0.72; EXPRESSED IN BRAIN, SIGNAL = 0.52; EXPRESSED IN BONE MARROW, SIGNAL = 0.48; EST_HUMAN HIT: AL041984.1, EVALUE 7.70e+00; SWISSPROT HIT: O43914, EVALUE 6.50e+00
PTQGCLSSAHSAPICSRLLLSPWLLAQSGLC

SEQ ID NO: 44583 - protein, 31 aa, Homo sapiens
  MAP TO AC008164.3; EXPRESSED IN PLACENTA, SIGNAL = 0.58; EXPRESSED IN FETAL LIVER, SIGNAL = 0.72; EXPRESSED IN BRAIN, SIGNAL = 0.52; EXPRESSED IN BONE MARROW, SIGNAL = 0.48
RDHSGPVTMAIGEDVSRWEHYVQNLNILVLG

SEQ ID NO: 44584 - protein, 59 aa, Homo sapiens
  MAP TO AC010503.3; EXPRESSED IN ADULT LIVER, SIGNAL = 0.69; EXPRESSED IN FETAL LIVER, SIGNAL = 0.6; EXPRESSED IN BRAIN, SIGNAL = 1.2; EXPRESSED IN BONE MARROW, SIGNAL = 0.51; EST_HUMAN HIT: AW379976.1, EVALUE 1.00e-26; SWISSPROT HIT: P40464, EVALUE 2.00e-05
SIEGGPQLSMLGLLRHILSQEGMRGLYRGIAPNFMKVIPAVSISYVVYENMKQALGVTS

SEQ ID NO: 44585 - protein, 35 aa, Homo sapiens
  MAP TO AC010503.3; EXPRESSED IN ADULT LIVER, SIGNAL = 0.69; EXPRESSED IN FETAL LIVER, SIGNAL = 0.6; EXPRESSED IN BRAIN, SIGNAL = 1.2; EXPRESSED IN BONE MARROW, SIGNAL = 0.51; SWISSPROT HIT: P02800, EVALUE 2.20e+00; EST_HUMAN HIT: AW379976.1, EVALUE 2.00e-16
PPSRVAPSCPCWVCYVTSCPRRACGASTGGSPPTS

SEQ ID NO: 44586 - protein, 59 aa, Homo sapiens
  MAP TO AL133377.4; EXPRESSED IN PLACENTA, SIGNAL = 0.77; EXPRESSED IN BRAIN, SIGNAL = 0.83; EXPRESSED IN BONE MARROW, SIGNAL = 0.61; EXPRESSED IN FETAL LIVER, SIGNAL = 0.66; EST_HUMAN HIT: AA368914.1, EVALUE 1.60e+00; SWISSPROT HIT: P08548, EVALUE 2.70e+00
LETVYLICTPTSTAASFTVTTTWKQPQCPLTKGWASTCVSSYGAVASTLRRTQTYLPCG

SEQ ID NO: 44587 - protein, 53 aa, Homo sapiens
  MAP TO AL118520.12; EXPRESSED IN FETAL LIVER, SIGNAL = 0.67; EXPRESSED IN BRAIN, SIGNAL = 1.1; EXPRESSED IN BONE MARROW, SIGNAL = 0.66; EXPRESSED IN PLACENTA, SIGNAL = 0.66; EXPRESSED IN ADULT LIVER, SIGNAL = 0.65; EST_HUMAN HIT: BE712850.1, EVALUE 5.00e-24; SWISSPROT HIT: Q62625, EVALUE 3.00e-20
RRLQLNPTQAFFLLVNQHSMVSVSTPIADIYEQEKDEDGFLYMVYASQETFGF

SEQ ID NO: 44588 - protein, 41 aa, Homo sapiens
  MAP TO AC018583.3; EXPRESSED IN PLACENTA, SIGNAL = 0.83; EXPRESSED IN FETAL LIVER, SIGNAL = 0.81; EXPRESSED IN BONE MARROW, SIGNAL = 0.78; EXPRESSED IN ADULT LIVER, SIGNAL = 0.74; EXPRESSED IN BRAIN, SIGNAL = 1.9; EST_HUMAN HIT: AU127993.1, EVALUE 2.00e-20; SWISSPROT HIT: Q99435, EVALUE 2.00e-21
IDECAEGRHYCRENTMCVNTPGSFMCICKTGYIRIDDYSCT

SEQ ID NO: 44589 - protein, 42 aa, Homo sapiens
  MAP TO AC018583.3; EXPRESSED IN PLACENTA, SIGNAL = 0.83; EXPRESSED IN FETAL LIVER, SIGNAL = 0.81; EXPRESSED IN BONE MARROW, SIGNAL = 0.78; EXPRESSED IN ADULT LIVER, SIGNAL = 0.74; EXPRESSED IN BRAIN, SIGNAL = 1.9; EST_HUMAN HIT: H15375.1, EVALUE 8.00e-16
TSMSVLKGAITVVKIQCVSTPRVLLCASAKLDTSELMIIHVQ

SEQ ID NO: 44590 - protein, 52 aa, Homo sapiens
  MAP TO AC011938.3; EXPRESSED IN PLACENTA, SIGNAL = 0.63; EXPRESSED IN FETAL LIVER, SIGNAL = 0.53; EXPRESSED IN BONE MARROW, SIGNAL = 0.55; EXPRESSED IN ADULT LIVER, SIGNAL = 0.65; EXPRESSED IN BRAIN, SIGNAL = 0.78; SWISSPROT HIT: P30957, EVALUE 6.00e-17
WSGSNIRWGQAFRLRHLTTGHYLALTEDQGLILQDRAKSDTKSTAFSFRASK

SEQ ID NO: 44591 - protein, 24 aa, Homo sapiens
  MAP TO AC011938.3; EXPRESSED IN PLACENTA, SIGNAL = 0.63; EXPRESSED IN FETAL LIVER, SIGNAL = 0.53; EXPRESSED IN BONE MARROW, SIGNAL = 0.55; EXPRESSED IN ADULT LIVER, SIGNAL = 0.65; EXPRESSED IN BRAIN, SIGNAL = 0.78
GVAVTSDGARLSDSGISPQATTWP

SEQ ID NO: 44592 - protein, 29 aa, Homo sapiens
  MAP TO AP001537.1; EXPRESSED IN LUNG, SIGNAL = 1.1; EXPRESSED IN PLACENTA, SIGNAL = 1.3; EXPRESSED IN BRAIN, SIGNAL = 1.2; EXPRESSED IN ADULT LIVER, SIGNAL = 1.1; EXPRESSED IN FETAL LIVER, SIGNAL =   1; EXPRESSED IN BONE MARROW, SIGNAL =   1; EST_HUMAN HIT: AA961849.1, EVALUE 4.60e+00; SWISSPROT HIT: Q9Z972, EVALUE 1.70e+00
NLIWMEQQSANWKTWNPSFSYSVWWPLTR

SEQ ID NO: 44593 - protein, 17 aa, Homo sapiens
  MAP TO AP001537.1; EXPRESSED IN LUNG, SIGNAL = 1.1; EXPRESSED IN PLACENTA, SIGNAL = 1.3; EXPRESSED IN BRAIN, SIGNAL = 1.2; EXPRESSED IN ADULT LIVER, SIGNAL = 1.1; EXPRESSED IN FETAL LIVER, SIGNAL =   1; EXPRESSED IN BONE MARROW, SIGNAL =   1
DVESQLLLQCVVAPDKK

SEQ ID NO: 44594 - protein, 25 aa, Homo sapiens
  MAP TO AC013332.4; EXPRESSED IN BRAIN, SIGNAL = 0.59; EXPRESSED IN PLACENTA, SIGNAL = 0.53; EXPRESSED IN FETAL LIVER, SIGNAL = 0.72; EXPRESSED IN ADULT LIVER, SIGNAL = 0.74; EXPRESSED IN BONE MARROW, SIGNAL = 0.66; EST_HUMAN HIT: BE148406.1, EVALUE 8.20e-02
MKQREPSPDPESADTLILDFSSSRS

SEQ ID NO: 44595 - protein, 39 aa, Homo sapiens
  MAP TO AC013597.3; EXPRESSED IN BONE MARROW, SIGNAL =   1; EXPRESSED IN ADULT LIVER, SIGNAL = 0.82; EXPRESSED IN PLACENTA, SIGNAL = 0.74; EXPRESSED IN FETAL LIVER, SIGNAL = 0.63; EXPRESSED IN BRAIN, SIGNAL = 0.55
TPSSCDFSKTSNLLQRRTTEIIQPEKFLHKEMQGLCAQH

SEQ ID NO: 44596 - protein, 40 aa, Homo sapiens
  MAP TO AC013597.3; EXPRESSED IN BONE MARROW, SIGNAL =   1; EXPRESSED IN ADULT LIVER, SIGNAL = 0.82; EXPRESSED IN PLACENTA, SIGNAL = 0.74; EXPRESSED IN FETAL LIVER, SIGNAL = 0.63; EXPRESSED IN BRAIN, SIGNAL = 0.55
VPLVVVISPKLLTCYKGGQQRLSSQRSSYIKKCRACVLSM

SEQ ID NO: 44597 - protein, 35 aa, Homo sapiens
  MAP TO U82670.2; EXPRESSED IN PLACENTA, SIGNAL = 0.52; EXPRESSED IN FETAL LIVER, SIGNAL = 0.58; EXPRESSED IN BONE MARROW, SIGNAL = 0.6; EXPRESSED IN ADULT LIVER, SIGNAL = 0.72; EXPRESSED IN BRAIN, SIGNAL = 0.71
IPSLAMSAQSLVGATGEPELLSTAVRFVILFLSAK

SEQ ID NO: 44598 - protein, 87 aa, Homo sapiens
  MAP TO AC010492.4; EXPRESSED IN ADULT LIVER, SIGNAL = 0.91; EXPRESSED IN PLACENTA, SIGNAL = 0.91; EXPRESSED IN BRAIN, SIGNAL = 1.1; EXPRESSED IN LUNG, SIGNAL = 0.99; EXPRESSED IN FETAL LIVER, SIGNAL = 1.1; EXPRESSED IN BONE MARROW, SIGNAL = 1.7; EST_HUMAN HIT: BF516168.1, EVALUE 1.00e-11
VELEETVVRRQAAVRTLGQQARVWLVRVLLNLLVVALLGAAFYGVYWATGCTVELQVRTVLEEEARGSWNLHFQRWREGTEVWDARD

SEQ ID NO: 44599 - protein, 55 aa, Homo sapiens
  MAP TO AC010492.4; EXPRESSED IN ADULT LIVER, SIGNAL = 0.91; EXPRESSED IN PLACENTA, SIGNAL = 0.91; EXPRESSED IN BRAIN, SIGNAL = 1.1; EXPRESSED IN LUNG, SIGNAL = 0.99; EXPRESSED IN FETAL LIVER, SIGNAL = 1.1; EXPRESSED IN BONE MARROW, SIGNAL = 1.7; EST_HUMAN HIT: BF516168.1, EVALUE 4.00e-16
WSWRRQWCGARLRCGRWASKPGFGWCGCCSTCWWSRSWGQPSMASTGLRGAPWSC

SEQ ID NO: 44600 - protein, 56 aa, Homo sapiens
  MAP TO AC026212.1; EXPRESSED IN PLACENTA, SIGNAL = 0.49; EXPRESSED IN ADULT LIVER, SIGNAL = 0.67; EXPRESSED IN BRAIN, SIGNAL = 0.64; EXPRESSED IN FETAL LIVER, SIGNAL =   2; EXPRESSED IN BONE MARROW, SIGNAL = 0.64; EST_HUMAN HIT: AU133187.1, EVALUE 3.00e-19; SWISSPROT HIT: P43116, EVALUE 6.00e+00
APGTPPPCAGPCSGRATCATSIGALVGMAPFARLWSGGCTTSGGKRAALGGVQFRD

SEQ ID NO: 44601 - protein, 62 aa, Homo sapiens
  MAP TO AC015842.4; EXPRESSED IN LUNG, SIGNAL = 0.97; EXPRESSED IN ADULT LIVER, SIGNAL = 1.2; EXPRESSED IN BRAIN, SIGNAL = 0.91; EXPRESSED IN BONE MARROW, SIGNAL = 0.81; EXPRESSED IN PLACENTA, SIGNAL = 1.1; EXPRESSED IN FETAL LIVER, SIGNAL = 0.96; EST_HUMAN HIT: AI968815.1, EVALUE 6.80e-01; SWISSPROT HIT: O08858, EVALUE 7.50e+00
MLRPAVTHPTSVRALDGGCCPTCRMGSVLGFTRPLIFVCVCLLFFRQQRKESWSWSQPLELQ

SEQ ID NO: 44602 - protein, 26 aa, Homo sapiens
  MAP TO AC009597.4; EXPRESSED IN ADULT LIVER, SIGNAL = 0.79; EXPRESSED IN BRAIN, SIGNAL = 0.8; EXPRESSED IN BONE MARROW, SIGNAL = 0.62; EXPRESSED IN PLACENTA, SIGNAL = 0.51; EXPRESSED IN FETAL LIVER, SIGNAL = 0.7
FTSGLVNPSMSTENYWRSTQLTSHHT

SEQ ID NO: 44603 - protein, 48 aa, Homo sapiens
  MAP TO AC013629.3; EXPRESSED IN PLACENTA, SIGNAL = 0.52; EXPRESSED IN ADULT LIVER, SIGNAL = 0.57; EXPRESSED IN BRAIN, SIGNAL = 0.51; EXPRESSED IN BONE MARROW, SIGNAL = 0.44; EST_HUMAN HIT: BF032330.1, EVALUE 3.00e+00; SWISSPROT HIT: P42961, EVALUE 2.80e+00
MGWCRRSGEDWQRLLKITYLLVFIGRKSKHIGSSTLTPAPFKQTSASL

SEQ ID NO: 44604 - protein, 52 aa, Homo sapiens
  MAP TO AF241727.1; EXPRESSED IN PLACENTA, SIGNAL = 0.55; EXPRESSED IN BONE MARROW, SIGNAL = 0.47; EXPRESSED IN FETAL LIVER, SIGNAL = 0.75; EXPRESSED IN BRAIN, SIGNAL = 7.2; SWISSPROT HIT: P41732, EVALUE 1.00e-28; EST_HUMAN HIT: BE741256.1, EVALUE 2.00e-27
LSCCGVQNYTNWSTSPYFLEHGIPPSCCMNETDCNPQDLHNLTVAATKVNQK

SEQ ID NO: 44605 - protein, 22 aa, Homo sapiens
  MAP TO AF241727.1; EXPRESSED IN PLACENTA, SIGNAL = 0.55; EXPRESSED IN BONE MARROW, SIGNAL = 0.47; EXPRESSED IN FETAL LIVER, SIGNAL = 0.75; EXPRESSED IN BRAIN, SIGNAL = 7.2; EST_HUMAN HIT: BF527213.1, EVALUE 7.00e-06; SWISSPROT HIT: P10515, EVALUE 8.80e+00
RTTPTGAPAPTSWSMASPPAAA

SEQ ID NO: 44606 - protein, 93 aa, Homo sapiens
  MAP TO AL161777.1; EXPRESSED IN LUNG, SIGNAL = 1.1; EXPRESSED IN PLACENTA, SIGNAL = 0.93; EXPRESSED IN FETAL LIVER, SIGNAL = 0.87; EXPRESSED IN BONE MARROW, SIGNAL = 1.1; EXPRESSED IN BRAIN, SIGNAL = 0.97; EXPRESSED IN ADULT LIVER, SIGNAL = 1.1; EST_HUMAN HIT: AW904102.1, EVALUE 6.00e-04; SWISSPROT HIT: P10911, EVALUE 7.00e-33
ARQCCDEGECLLANQEIDKFQSKEDAQKALQDIENFLEMALPFINYEPETLQYEFDVILSPELKVEAFLFSNKYLKKIIIAVLWVGGVLLPHS

SEQ ID NO: 44607 - protein, 29 aa, Homo sapiens
  MAP TO AL133260.7; EXPRESSED IN LUNG, SIGNAL = 0.88; EXPRESSED IN PLACENTA, SIGNAL = 0.66; EXPRESSED IN ADULT LIVER, SIGNAL = 0.71; EXPRESSED IN FETAL LIVER, SIGNAL = 0.95; EXPRESSED IN BRAIN, SIGNAL = 0.68; EXPRESSED IN BONE MARROW, SIGNAL = 0.86; EST_HUMAN HIT: BF675159.1, EVALUE 4.60e+00
EPPESRHLAHHLCILRAGCRVCHIVVLYK

SEQ ID NO: 44608 - protein, 21 aa, Homo sapiens
  MAP TO AC011272.3; EXPRESSED IN PLACENTA, SIGNAL = 0.75; EXPRESSED IN BONE MARROW, SIGNAL = 0.59; EXPRESSED IN ADULT LIVER, SIGNAL = 0.68; EXPRESSED IN FETAL LIVER, SIGNAL = 0.52; EXPRESSED IN BRAIN, SIGNAL = 0.63
SNIELIKRAINCEKPKDDRGK

SEQ ID NO: 44609 - protein, 19 aa, Homo sapiens
  MAP TO AC011272.3; EXPRESSED IN PLACENTA, SIGNAL = 0.75; EXPRESSED IN BONE MARROW, SIGNAL = 0.59; EXPRESSED IN ADULT LIVER, SIGNAL = 0.68; EXPRESSED IN FETAL LIVER, SIGNAL = 0.52; EXPRESSED IN BRAIN, SIGNAL = 0.63
CSAEWVFLWQSKTEPTFLS

SEQ ID NO: 44610 - protein, 68 aa, Homo sapiens
  MAP TO AL161441.2; EXPRESSED IN ADULT LIVER, SIGNAL = 0.61; EXPRESSED IN PLACENTA, SIGNAL = 0.57; EXPRESSED IN BRAIN, SIGNAL = 0.67; EXPRESSED IN BONE MARROW, SIGNAL = 0.61; EXPRESSED IN FETAL LIVER, SIGNAL = 0.67; EST_HUMAN HIT: AW956456.1, EVALUE 1.40e+00; SWISSPROT HIT: P37465, EVALUE 5.80e+00
AGLRLHDVYERKPKKIVADKCCKLRLTWGFSSREIEKHRYRCRSSCKTTMGVGQVVGRSKEEKTVVKQ

SEQ ID NO: 44611 - protein, 35 aa, Homo sapiens
  MAP TO AL161441.2; EXPRESSED IN ADULT LIVER, SIGNAL = 0.61; EXPRESSED IN PLACENTA, SIGNAL = 0.57; EXPRESSED IN BRAIN, SIGNAL = 0.67; EXPRESSED IN BONE MARROW, SIGNAL = 0.61; EXPRESSED IN FETAL LIVER, SIGNAL = 0.67
GLDLDCMMFMKGNQRKLLLTNAASYDLHGVSHLEK

SEQ ID NO: 44612 - protein, 60 aa, Homo sapiens
  MAP TO AL162261.1; EXPRESSED IN PLACENTA, SIGNAL =   1; EXPRESSED IN BONE MARROW, SIGNAL = 1.1; EXPRESSED IN ADULT LIVER, SIGNAL =   1; EXPRESSED IN FETAL LIVER, SIGNAL = 0.84; EXPRESSED IN BRAIN, SIGNAL =   1; EXPRESSED IN LUNG, SIGNAL = 0.99; EST_HUMAN HIT: AW205774.1, EVALUE 1.00e-18; SWISSPROT HIT: O04931, EVALUE 6.00e+00
DGNATLPFAPGKTSRVPSDSGVFSSDPRANWSSIRNFPLAKCVGIELHASLSTSAEWLLR

SEQ ID NO: 44613 - protein, 25 aa, Homo sapiens
  MAP TO AC019281.4; EXPRESSED IN BRAIN, SIGNAL = 0.45; EST_HUMAN HIT: AV723718.1, EVALUE 1.00e-08
VKPKITKDSIFPCPDGLLYMPGPHL

SEQ ID NO: 44614 - protein, 25 aa, Homo sapiens
  MAP TO AC019281.4; EXPRESSED IN BRAIN, SIGNAL = 0.45; EST_HUMAN HIT: AV723718.1, EVALUE 1.00e-07
SSPKSQKIASSHVQMDCSICLVLTW

SEQ ID NO: 44615 - protein, 76 aa, Homo sapiens
  MAP TO AL157392.2; EXPRESSED IN PLACENTA, SIGNAL = 0.73; EXPRESSED IN ADULT LIVER, SIGNAL = 0.73; EXPRESSED IN FETAL LIVER, SIGNAL = 0.92; EXPRESSED IN BRAIN, SIGNAL = 0.76; EXPRESSED IN BONE MARROW, SIGNAL = 0.92; SWISSPROT HIT: P55972, EVALUE 1.30e-01; EST_HUMAN HIT: BF023607.1, EVALUE 3.00e-27
EAELERLEREFAIQSQITEAARRLASDPNVSKKLKKQRKTSYLNALKKLQEIENAINENRIKSGKKPTQRASLIID

SEQ ID NO: 44616 - protein, 23 aa, Homo sapiens
  MAP TO AL157392.2; EXPRESSED IN PLACENTA, SIGNAL = 0.73; EXPRESSED IN ADULT LIVER, SIGNAL = 0.73; EXPRESSED IN FETAL LIVER, SIGNAL = 0.92; EXPRESSED IN BRAIN, SIGNAL = 0.76; EXPRESSED IN BONE MARROW, SIGNAL = 0.92
KLSWNAWNESLPFSPRLRRPPAA

SEQ ID NO: 44617 - protein, 55 aa, Homo sapiens
  MAP TO AC010397.3; EXPRESSED IN FETAL LIVER, SIGNAL = 0.51; EXPRESSED IN BRAIN, SIGNAL = 0.57; EXPRESSED IN BONE MARROW, SIGNAL = 0.57; EXPRESSED IN PLACENTA, SIGNAL = 0.68; EXPRESSED IN ADULT LIVER, SIGNAL = 0.52; EST_HUMAN HIT: AI023313.1, EVALUE 4.00e-17; SWISSPROT HIT: P19811, EVALUE 4.60e+00
PPERQIVVGICSMAKKSKSKPMKEILERISLFKYITVVVFEEEVILNEPVENWPL

SEQ ID NO: 44618 - protein, 21 aa, Homo sapiens
  MAP TO AC010397.3; EXPRESSED IN FETAL LIVER, SIGNAL = 0.51; EXPRESSED IN BRAIN, SIGNAL = 0.57; EXPRESSED IN BONE MARROW, SIGNAL = 0.57; EXPRESSED IN PLACENTA, SIGNAL = 0.68; EXPRESSED IN ADULT LIVER, SIGNAL = 0.52; EST_HUMAN HIT: AI057425.1, EVALUE 3.00e-07
HQKGRLWLEYVPWQRNPNPNQ

SEQ ID NO: 44619 - protein, 27 aa, Homo sapiens
  MAP TO AL136313.3; EXPRESSED IN BRAIN, SIGNAL = 0.5; EXPRESSED IN PLACENTA, SIGNAL = 0.64; EXPRESSED IN ADULT LIVER, SIGNAL = 0.6; EXPRESSED IN FETAL LIVER, SIGNAL = 0.59; EXPRESSED IN BONE MARROW, SIGNAL = 0.44; EST_HUMAN HIT: AU127831.1, EVALUE 2.00e-08
IGNKLISLVGLLKHYHKTVRMTDECSS

SEQ ID NO: 44620 - protein, 48 aa, Homo sapiens
  MAP TO AC018583.3; EXPRESSED IN BRAIN, SIGNAL = 0.83; EXPRESSED IN PLACENTA, SIGNAL = 0.66; EXPRESSED IN FETAL LIVER, SIGNAL = 0.57; EXPRESSED IN BONE MARROW, SIGNAL = 0.55; EXPRESSED IN ADULT LIVER, SIGNAL = 0.77; EST_HUMAN HIT: AI241516.1, EVALUE 4.50e-01; SWISSPROT HIT: Q9ZM35, EVALUE 6.20e+00
ISLKNLDLINDAKLGLLTNNKNSYHLLSACYVSGILLSVDYHIESFLN

SEQ ID NO: 44621 - protein, 42 aa, Homo sapiens
  MAP TO AC011938.3; EXPRESSED IN BRAIN, SIGNAL = 0.44; SWISSPROT HIT: P30957, EVALUE 7.00e-12
EVLQTLQDLIAYFQPPEEEMRHEDKQNKLRSLKNRQNLFKEE

SEQ ID NO: 44622 - protein, 33 aa, Homo sapiens
  MAP TO AL122058.19; EXPRESSED IN LUNG, SIGNAL = 0.91; EXPRESSED IN PLACENTA, SIGNAL =   1; EXPRESSED IN ADULT LIVER, SIGNAL = 1.1; EXPRESSED IN BONE MARROW, SIGNAL = 0.9; EXPRESSED IN BRAIN, SIGNAL = 0.79; EXPRESSED IN FETAL LIVER, SIGNAL = 0.88
PLKRLLRKLTWHILRRQLKTRTHALGLRCSGKG

SEQ ID NO: 44623 - protein, 39 aa, Homo sapiens
  MAP TO AC019221.3; EXPRESSED IN PLACENTA, SIGNAL =   1; EXPRESSED IN FETAL LIVER, SIGNAL = 0.79; EXPRESSED IN BONE MARROW, SIGNAL = 0.73; EXPRESSED IN LUNG, SIGNAL = 0.93; EXPRESSED IN ADULT LIVER, SIGNAL = 1.5; EXPRESSED IN BRAIN, SIGNAL =   1; EST_HUMAN HIT: AA583968.1, EVALUE 1.00e-16
AMTLPPFLEFGVPSPAHLRAWTVERKRPGRLLRTDRQPL

SEQ ID NO: 44624 - protein, 73 aa, Homo sapiens
  MAP TO AC009597.4; EXPRESSED IN LUNG, SIGNAL = 1.1; EXPRESSED IN PLACENTA, SIGNAL = 1.1; EXPRESSED IN ADULT LIVER, SIGNAL = 1.2; EXPRESSED IN FETAL LIVER, SIGNAL = 1.3; EXPRESSED IN BRAIN, SIGNAL = 1.2; EXPRESSED IN BONE MARROW, SIGNAL = 1.1; EST_HUMAN HIT: AI401162.1, EVALUE 1.00e-04
NATLFGKLKKKMLKVKIISLRHVSQEIQSENWVFDISEIQTEIEKLPMVDHSVIIIGQRRNFQVHLAQIVCAN

SEQ ID NO: 44625 - protein, 28 aa, Homo sapiens
  MAP TO AC011181.5; EXPRESSED IN PLACENTA, SIGNAL = 0.51; EXPRESSED IN FETAL LIVER, SIGNAL =   7; EXPRESSED IN BONE MARROW, SIGNAL = 0.79; EXPRESSED IN ADULT LIVER, SIGNAL = 0.94; EXPRESSED IN BRAIN, SIGNAL = 0.81; EST_HUMAN HIT: AV647851.1, EVALUE 2.00e-05
ESLIPITMEKFKLLYLLLFPGKQSQEST

SEQ ID NO: 44626 - protein, 28 aa, Homo sapiens
  MAP TO AC011255.3; EXPRESSED IN ADULT LIVER, SIGNAL = 1.4; EXPRESSED IN PLACENTA, SIGNAL = 1.3; EXPRESSED IN FETAL LIVER, SIGNAL = 1.2; EXPRESSED IN BONE MARROW, SIGNAL = 1.2; EXPRESSED IN LUNG, SIGNAL = 1.5; EXPRESSED IN BRAIN, SIGNAL = 1.1
KITLTATWKMCWGETRLQEIRAVNKLLL

SEQ ID NO: 44627 - protein, 30 aa, Homo sapiens
  MAP TO AC019263.4; EXPRESSED IN BRAIN, SIGNAL = 0.77; EXPRESSED IN LUNG, SIGNAL = 1.2; EXPRESSED IN PLACENTA, SIGNAL = 1.1; EXPRESSED IN ADULT LIVER, SIGNAL = 1.1; EXPRESSED IN FETAL LIVER, SIGNAL = 0.84; EXPRESSED IN BONE MARROW, SIGNAL = 0.87
FMPILPYIFPIMKMLTFCYIMEKGRICLTL

SEQ ID NO: 44628 - protein, 37 aa, Homo sapiens
  MAP TO AC022036.3; EXPRESSED IN PLACENTA, SIGNAL = 0.97; EXPRESSED IN FETAL LIVER, SIGNAL = 0.77; EXPRESSED IN ADULT LIVER, SIGNAL =   1; EXPRESSED IN BRAIN, SIGNAL = 0.78; EXPRESSED IN BONE MARROW, SIGNAL = 0.78; EXPRESSED IN LUNG, SIGNAL = 0.92; SWISSPROT HIT: P39188, EVALUE 3.70e+00; EST_HUMAN HIT: H65747.1, EVALUE 1.00e-03
LEHNSVITAHCNLKLLVSCNPPTLAYFKTILNKKYKK

SEQ ID NO: 44629 - protein, 30 aa, Homo sapiens
  MAP TO AC022036.3; EXPRESSED IN PLACENTA, SIGNAL = 0.97; EXPRESSED IN FETAL LIVER, SIGNAL = 0.77; EXPRESSED IN ADULT LIVER, SIGNAL =   1; EXPRESSED IN BRAIN, SIGNAL = 0.78; EXPRESSED IN BONE MARROW, SIGNAL = 0.78; EXPRESSED IN LUNG, SIGNAL = 0.92
WSTTVSSQLTVTSNSWFHAILPPWPILKLF

SEQ ID NO: 44630 - protein, 32 aa, Homo sapiens
  MAP TO AC018528.3; EXPRESSED IN ADULT LIVER, SIGNAL = 1.2; EXPRESSED IN BONE MARROW, SIGNAL = 1.1; EXPRESSED IN LUNG, SIGNAL = 1.1; EXPRESSED IN BRAIN, SIGNAL = 0.75; EXPRESSED IN PLACENTA, SIGNAL = 1.1; EXPRESSED IN FETAL LIVER, SIGNAL = 0.84
ILNYEKLQVKRQIFFTGTDLKQANSETFAEKQ

SEQ ID NO: 44631 - protein, 19 aa, Homo sapiens
  MAP TO AC018528.3; EXPRESSED IN ADULT LIVER, SIGNAL = 1.2; EXPRESSED IN BONE MARROW, SIGNAL = 1.1; EXPRESSED IN LUNG, SIGNAL = 1.1; EXPRESSED IN BRAIN, SIGNAL = 0.75; EXPRESSED IN PLACENTA, SIGNAL = 1.1; EXPRESSED IN FETAL LIVER, SIGNAL = 0.84
YLITRNYKLSVKFSSQEQI

SEQ ID NO: 44632 - protein, 116 aa, Homo sapiens
  MAP TO AC011686.3; EXPRESSED IN ADULT LIVER, SIGNAL = 0.76; EXPRESSED IN BRAIN, SIGNAL = 0.82; EXPRESSED IN PLACENTA, SIGNAL = 0.61; EXPRESSED IN FETAL LIVER, SIGNAL = 0.85; EXPRESSED IN BONE MARROW, SIGNAL = 0.87; SWISSPROT HIT: P47179, EVALUE 1.60e-01; EST_HUMAN HIT: BE313013.1, EVALUE 8.00e-54
VKSEIPKVPKQPLVLHHPRMTTTKSPSKDMLEPEAELAEDLPTTKSTSVESEMPTENLEGHSPSCRTFVPLPPICSNSTVHSEETLSHLSDTTVRLSPERPSDEDSKSTESIFLTQ

SEQ ID NO: 44633 - protein, 61 aa, Homo sapiens
  MAP TO AL139819.2; EXPRESSED IN PLACENTA, SIGNAL = 0.74; EXPRESSED IN ADULT LIVER, SIGNAL = 0.77; EXPRESSED IN FETAL LIVER, SIGNAL = 0.98; EXPRESSED IN BRAIN, SIGNAL = 0.84; EXPRESSED IN BONE MARROW, SIGNAL = 1.1; SWISSPROT HIT: P29035, EVALUE 5.20e-01; EST_HUMAN HIT: AA252743.1, EVALUE 2.00e-29
RKGIFTGSSGLQIVYLSGTESLNEPVPGYSFSPKDVSSLRMMLCTTSQFKGVDILLTSPWP

SEQ ID NO: 44634 - protein, 22 aa, Homo sapiens
  MAP TO AL139819.2; EXPRESSED IN PLACENTA, SIGNAL = 0.74; EXPRESSED IN ADULT LIVER, SIGNAL = 0.77; EXPRESSED IN FETAL LIVER, SIGNAL = 0.98; EXPRESSED IN BRAIN, SIGNAL = 0.84; EXPRESSED IN BONE MARROW, SIGNAL = 1.1; EST_HUMAN HIT: BE271389.1, EVALUE 3.00e-05
VVKVSSLEARGCRLCTSVGQNP

SEQ ID NO: 44635 - protein, 40 aa, Homo sapiens
  MAP TO AC015772.5; EXPRESSED IN ADULT LIVER, SIGNAL = 0.52; EXPRESSED IN PLACENTA, SIGNAL = 0.69; EXPRESSED IN FETAL LIVER, SIGNAL = 0.65; EXPRESSED IN BRAIN, SIGNAL = 0.93; EXPRESSED IN BONE MARROW, SIGNAL = 0.65
DIQALFVPASEEWVKNSTYLRTALRIKYLMYSPQKCACLR

SEQ ID NO: 44636 - protein, 23 aa, Homo sapiens
  MAP TO AC015772.5; EXPRESSED IN ADULT LIVER, SIGNAL = 0.52; EXPRESSED IN PLACENTA, SIGNAL = 0.69; EXPRESSED IN FETAL LIVER, SIGNAL = 0.65; EXPRESSED IN BRAIN, SIGNAL = 0.93; EXPRESSED IN BONE MARROW, SIGNAL = 0.65
IFKLSLFLHLKNGLRIAPTFGLL

SEQ ID NO: 44637 - protein, 92 aa, Homo sapiens
  MAP TO AC016498.4; EXPRESSED IN BONE MARROW, SIGNAL = 0.5; EXPRESSED IN PLACENTA, SIGNAL = 0.79; EXPRESSED IN BRAIN, SIGNAL = 0.67; EST_HUMAN HIT: AU131881.1, EVALUE 5.00e-20; SWISSPROT HIT: Q92917, EVALUE 1.70e+00
SERLVVTPALLPGGDLGCLRGPFLGHLRDLHSLPASRVEIHCLRGILFIVAWSKREGFLEELAMDLAVGSGPWLPGGTSHLPWARLCPLSLQ

SEQ ID NO: 44638 - protein, 30 aa, Homo sapiens
  MAP TO AC016498.4; EXPRESSED IN BONE MARROW, SIGNAL = 0.5; EXPRESSED IN PLACENTA, SIGNAL = 0.79; EXPRESSED IN BRAIN, SIGNAL = 0.67; EST_HUMAN HIT: AU131881.1, EVALUE 3.00e-12
WTPAPGASVPSPQKPYSIMKSWSCRPASPE

SEQ ID NO: 44639 - protein, 59 aa, Homo sapiens
  MAP TO AC017086.3; EXPRESSED IN PLACENTA, SIGNAL = 0.51; EXPRESSED IN ADULT LIVER, SIGNAL = 0.85; EXPRESSED IN FETAL LIVER, SIGNAL = 0.65; EXPRESSED IN BRAIN, SIGNAL = 0.6; EXPRESSED IN BONE MARROW, SIGNAL = 0.53; EST_HUMAN HIT: AW177702.1, EVALUE 3.60e-02
SEGWKSKIKVLAALIPSEGYEEESVPFLSLVSDDLLVLWTENLCPSKIHMLKPNPQCNS

SEQ ID NO: 44640 - protein, 40 aa, Homo sapiens
  MAP TO AC018537.3; EXPRESSED IN PLACENTA, SIGNAL = 0.51; EXPRESSED IN ADULT LIVER, SIGNAL = 0.51; EXPRESSED IN FETAL LIVER, SIGNAL = 0.46; EXPRESSED IN BRAIN, SIGNAL = 0.44
IFGTGVLVKFCKYPKDMVNKIKSQVLLKMLDQLTIIFPVH

SEQ ID NO: 44641 - protein, 36 aa, Homo sapiens
  MAP TO AC022860.3; EXPRESSED IN BONE MARROW, SIGNAL = 0.97; EXPRESSED IN ADULT LIVER, SIGNAL = 0.76; EXPRESSED IN LUNG, SIGNAL = 1.7; EXPRESSED IN PLACENTA, SIGNAL = 0.6; EXPRESSED IN FETAL LIVER, SIGNAL =   1; EXPRESSED IN BRAIN, SIGNAL = 1.1; EST_HUMAN HIT: AU124131.1, EVALUE 1.00e-13; SWISSPROT HIT: P34110, EVALUE 7.00e-04
VFPDEFHLQTLNPFLRTCAELHQNVNVKNIIIALID

SEQ ID NO: 44642 - protein, 40 aa, Homo sapiens
  MAP TO AC013685.3; EXPRESSED IN BONE MARROW, SIGNAL = 0.63; EXPRESSED IN ADULT LIVER, SIGNAL = 0.69; EXPRESSED IN PLACENTA, SIGNAL = 0.69; EXPRESSED IN FETAL LIVER, SIGNAL = 0.53; EXPRESSED IN BRAIN, SIGNAL = 0.65
FHISAPDIALSSSEFGALVSALHSHHALKTSVFSLSHQIS

SEQ ID NO: 44643 - protein, 17 aa, Homo sapiens
  MAP TO AL136171.3; EXPRESSED IN BONE MARROW, SIGNAL = 0.55; EXPRESSED IN LUNG, SIGNAL = 0.84; EXPRESSED IN PLACENTA, SIGNAL = 0.6; EXPRESSED IN ADULT LIVER, SIGNAL = 0.71; EXPRESSED IN FETAL LIVER, SIGNAL = 0.5; EXPRESSED IN BRAIN, SIGNAL = 0.54; EST_HUMAN HIT: AA249072.1, EVALUE 1.00e-02
MCPTITISQEVVRMQWL

SEQ ID NO: 44644 - protein, 79 aa, Homo sapiens
  MAP TO AP001432.1; EXPRESSED IN PLACENTA, SIGNAL = 0.72; EXPRESSED IN BRAIN, SIGNAL = 0.84; EXPRESSED IN BONE MARROW, SIGNAL = 0.88; EXPRESSED IN ADULT LIVER, SIGNAL = 0.88; EXPRESSED IN FETAL LIVER, SIGNAL = 0.8; EST_HUMAN HIT: BE386363.1, EVALUE 5.00e-40; SWISSPROT HIT: P97739, EVALUE 8.60e+00
YLRDSLPKSWVFSEPLMLNYKCLKSMNTCLEGRFQMLVPSCSSLEAQLRRSVQATGLEERPALPERLQQEGSEEAGGLS

SEQ ID NO: 44645 - protein, 73 aa, Homo sapiens
  MAP TO AC013490.3; EXPRESSED IN LUNG, SIGNAL = 1.4; EXPRESSED IN PLACENTA, SIGNAL = 1.1; EXPRESSED IN HELA, SIGNAL = 2.4; EXPRESSED IN FETAL LIVER, SIGNAL = 1.9; EXPRESSED IN BONE MARROW, SIGNAL = 1.6; EXPRESSED IN ADULT LIVER, SIGNAL = 1.4; EXPRESSED IN BRAIN, SIGNAL = 2.1; EST_HUMAN HIT: H10884.1, EVALUE 9.00e-36; SWISSPROT HIT: P47869, EVALUE 3.00e-39
EYTIDVFFRQKWKDERLKFKGPMNILRLNNLMASKIWTPDTFFHNGKKSVAHNMTMPNKLLRIQDDGTLLYTM

SEQ ID NO: 44646 - protein, 63 aa, Homo sapiens
  MAP TO AC021701.3; EXPRESSED IN LUNG, SIGNAL = 0.86; EXPRESSED IN ADULT LIVER, SIGNAL = 0.97; EXPRESSED IN FETAL LIVER, SIGNAL = 0.91; EXPRESSED IN PLACENTA, SIGNAL = 0.9; EXPRESSED IN BRAIN, SIGNAL = 0.82; EXPRESSED IN BONE MARROW, SIGNAL = 0.91; SWISSPROT HIT: P38360, EVALUE 3.00e-01
MSTALFLLSLDMPISLEYPNIHEAVVAYLEQLNSENYSIYKRTAEAVYSIECTCNFLSDIGKE

SEQ ID NO: 44647 - protein, 31 aa, Homo sapiens
  MAP TO AC021701.3; EXPRESSED IN LUNG, SIGNAL = 0.86; EXPRESSED IN ADULT LIVER, SIGNAL = 0.97; EXPRESSED IN FETAL LIVER, SIGNAL = 0.91; EXPRESSED IN PLACENTA, SIGNAL = 0.9; EXPRESSED IN BRAIN, SIGNAL = 0.82; EXPRESSED IN BONE MARROW, SIGNAL = 0.91
CQQHYFSFLWTCLFLWNIQIFMKLLWPIWNS

SEQ ID NO: 44648 - protein, 32 aa, Homo sapiens
  MAP TO AC008528.4; EXPRESSED IN ADULT LIVER, SIGNAL = 0.58; EXPRESSED IN BRAIN, SIGNAL = 0.7; EXPRESSED IN BONE MARROW, SIGNAL = 0.49; EXPRESSED IN PLACENTA, SIGNAL = 0.57; EXPRESSED IN FETAL LIVER, SIGNAL = 0.63; SWISSPROT HIT: Q9TT92, EVALUE 3.00e-03; EST_HUMAN HIT: AW630434.1, EVALUE 2.60e+00
MVPSKLPGMTYTADEQCQILFGPLASFCQEMQ

SEQ ID NO: 44649 - protein, 18 aa, Homo sapiens
  MAP TO AC010802.4; EXPRESSED IN ADULT LIVER, SIGNAL = 0.86; EXPRESSED IN PLACENTA, SIGNAL = 1.4; EXPRESSED IN BRAIN, SIGNAL = 0.91; EXPRESSED IN BONE MARROW, SIGNAL = 0.98; EXPRESSED IN FETAL LIVER, SIGNAL = 0.73; EST_HUMAN HIT: AI797598.1, EVALUE 3.00e-04
WTHRMPYPPSWYSTQHCL

SEQ ID NO: 44650 - protein, 165 aa, Homo sapiens
  MAP TO AL138934.2; EXPRESSED IN PLACENTA, SIGNAL = 0.55; EXPRESSED IN FETAL LIVER, SIGNAL = 0.51; EXPRESSED IN BONE MARROW, SIGNAL = 0.52; EXPRESSED IN BRAIN, SIGNAL = 0.45; EST_HUMAN HIT: AA017021.1, EVALUE 4.00e-47; SWISSPROT HIT: Q92729, EVALUE 4.00e-06
VFQYFLDTDLLPYTKYSYYIETTNVHGSTRSVAVTYKTKPGVPEGNLTLSYIIPIGSDSVTLTWTTLSNQSGPIEKYILSCAPLAGGQPCVSYEGHETSATIWNLVPFAKYDFSVQACTSGGCLHSLPITVTTAQAPPQRLSPPKMQKISSTELHVEWSPPAELN

SEQ ID NO: 44651 - protein, 33 aa, Homo sapiens
  MAP TO AC023114.3; EXPRESSED IN LUNG, SIGNAL = 0.89; EXPRESSED IN PLACENTA, SIGNAL = 0.99; EXPRESSED IN ADULT LIVER, SIGNAL =   1; EXPRESSED IN FETAL LIVER, SIGNAL = 0.78; EXPRESSED IN BRAIN, SIGNAL = 0.92; EXPRESSED IN BONE MARROW, SIGNAL = 0.8
CGCCSVPTALKDDGNNVDFDCSGHFCETAPFSH

SEQ ID NO: 44652 - protein, 89 aa, Homo sapiens
  MAP TO AC013751.3; EXPRESSED IN BONE MARROW, SIGNAL = 0.53; EXPRESSED IN PLACENTA, SIGNAL = 0.69; EXPRESSED IN ADULT LIVER, SIGNAL =  12; EXPRESSED IN BRAIN, SIGNAL = 0.6; SWISSPROT HIT: P98166, EVALUE 1.30e+00
VKVTVDPDPSLVYRPEVDQEAAKDKAGFQSYVSGPLLDHVFTTDKLMNMHHTVDFVRSKHAWFGDFSYKKMKVMEAVDLLHGLVDESDS

SEQ ID NO: 44653 - protein, 27 aa, Homo sapiens
  MAP TO AL139245.2; EXPRESSED IN ADULT LIVER, SIGNAL = 0.84; EXPRESSED IN BONE MARROW, SIGNAL = 0.62; EXPRESSED IN PLACENTA, SIGNAL = 0.75; EXPRESSED IN BRAIN, SIGNAL = 0.62; EXPRESSED IN FETAL LIVER, SIGNAL = 0.54
AADHQQHGPLEAKTGLTVTDVFAISSL

SEQ ID NO: 44654 - protein, 61 aa, Homo sapiens
  MAP TO AC011055.6; EXPRESSED IN PLACENTA, SIGNAL = 1.6; EXPRESSED IN BRAIN, SIGNAL = 0.5; EXPRESSED IN LUNG, SIGNAL =   1; EXPRESSED IN ADULT LIVER, SIGNAL = 0.8; EXPRESSED IN BONE MARROW, SIGNAL = 0.48; EXPRESSED IN FETAL LIVER, SIGNAL = 1.4; EST_HUMAN HIT: AI471069.1, EVALUE 2.00e+00
KPYHHILRYQNLHLWCGLCFHVLAQNSSGRCSRSHYPSHIVAHIPILCASSQGQRPVHSIF

SEQ ID NO: 44655 - protein, 55 aa, Homo sapiens
  MAP TO AC010492.4; EXPRESSED IN LUNG, SIGNAL = 1.2; EXPRESSED IN PLACENTA, SIGNAL = 1.3; EXPRESSED IN ADULT LIVER, SIGNAL = 1.4; EXPRESSED IN FETAL LIVER, SIGNAL = 1.6; EXPRESSED IN BRAIN, SIGNAL = 1.4; EXPRESSED IN BONE MARROW, SIGNAL = 1.6; EST_HUMAN HIT: AW021656.1, EVALUE 4.00e-11; SWISSPROT HIT: P39961, EVALUE 4.60e+00
IPLCPNRGHGGYRGRGRSWFPWWQRAWWQKWYLDHPLRISRRIQRRFHGSGVCRF

SEQ ID NO: 44656 - protein, 27 aa, Homo sapiens
  MAP TO AC022045.2; EXPRESSED IN LUNG, SIGNAL =   2; EXPRESSED IN BRAIN, SIGNAL = 1.6; EXPRESSED IN PLACENTA, SIGNAL = 1.5; EXPRESSED IN FETAL LIVER, SIGNAL = 1.7; EXPRESSED IN ADULT LIVER, SIGNAL = 1.4; EXPRESSED IN BONE MARROW, SIGNAL = 1.3
LPQAIRMYTCGLELRSLTVMLCQSQTG

SEQ ID NO: 44657 - protein, 18 aa, Homo sapiens
  MAP TO AC022045.2; EXPRESSED IN LUNG, SIGNAL =   2; EXPRESSED IN BRAIN, SIGNAL = 1.6; EXPRESSED IN PLACENTA, SIGNAL = 1.5; EXPRESSED IN FETAL LIVER, SIGNAL = 1.7; EXPRESSED IN ADULT LIVER, SIGNAL = 1.4; EXPRESSED IN BONE MARROW, SIGNAL = 1.3; EST_HUMAN HIT: AI479610.1, EVALUE 2.80e+00
CLRPSGCIPAGLSSEALQ

SEQ ID NO: 44658 - protein, 29 aa, Homo sapiens
  MAP TO AC019099.3; EXPRESSED IN ADULT LIVER, SIGNAL = 1.1; EXPRESSED IN FETAL LIVER, SIGNAL = 1.2; EXPRESSED IN BRAIN, SIGNAL = 1.2; EXPRESSED IN BONE MARROW, SIGNAL =   1; EXPRESSED IN LUNG, SIGNAL = 1.3; EXPRESSED IN PLACENTA, SIGNAL = 1.2; EST_HUMAN HIT: BE867157.1, EVALUE 2.00e-07; SWISSPROT HIT: Q14624, EVALUE 2.20e+00
IKEKEEAQSEYRGAVTQGHGAYLMSQDAP

SEQ ID NO: 44659 - protein, 36 aa, Homo sapiens
  MAP TO AC011207.3; EXPRESSED IN LUNG, SIGNAL = 1.2; EXPRESSED IN ADULT LIVER, SIGNAL = 1.3; EXPRESSED IN BRAIN, SIGNAL = 1.6; EXPRESSED IN BONE MARROW, SIGNAL = 1.3; EXPRESSED IN PLACENTA, SIGNAL = 1.7; EXPRESSED IN FETAL LIVER, SIGNAL = 2.1; EST_HUMAN HIT: AI307288.1, EVALUE 1.00e-13; SWISSPROT HIT: Q63622, EVALUE 2.00e-14
GKHCILDVSGNAIKRLQVAQLYPIAIFIKPRSLEPL

SEQ ID NO: 44660 - protein, 27 aa, Homo sapiens
  MAP TO AC011207.3; EXPRESSED IN LUNG, SIGNAL = 1.2; EXPRESSED IN ADULT LIVER, SIGNAL = 1.3; EXPRESSED IN BRAIN, SIGNAL = 1.6; EXPRESSED IN BONE MARROW, SIGNAL = 1.3; EXPRESSED IN PLACENTA, SIGNAL = 1.7; EXPRESSED IN FETAL LIVER, SIGNAL = 2.1; EST_HUMAN HIT: BF369902.1, EVALUE 5.00e-08
ANTVYLMYQEMLSSGYKLPSSIPLPSS

SEQ ID NO: 44661 - protein, 36 aa, Homo sapiens
  MAP TO AL161445.2; EXPRESSED IN FETAL LIVER, SIGNAL = 0.65; EXPRESSED IN BRAIN, SIGNAL = 0.72; EXPRESSED IN BONE MARROW, SIGNAL = 0.74; SWISSPROT HIT: Q99933, EVALUE 2.90e-02; EST_HUMAN HIT: BF381347.1, EVALUE 9.90e-02
PQEEVELKKLKHLEKSVEKIADQLEELNKELTGIQQ

SEQ ID NO: 44662 - protein, 26 aa, Homo sapiens
  MAP TO AL161724.2; EXPRESSED IN ADULT LIVER, SIGNAL = 1.1; EXPRESSED IN LUNG, SIGNAL = 1.1; EXPRESSED IN BRAIN, SIGNAL = 0.95; EXPRESSED IN BONE MARROW, SIGNAL = 0.89; EXPRESSED IN PLACENTA, SIGNAL =   1; EXPRESSED IN FETAL LIVER, SIGNAL =   1
VIIIIIINIIIIIVIIINKKAGESFG

SEQ ID NO: 44663 - protein, 48 aa, Homo sapiens
  MAP TO AC008572.6; EXPRESSED IN PLACENTA, SIGNAL = 0.47; EXPRESSED IN FETAL LIVER, SIGNAL = 0.53; EXPRESSED IN BONE MARROW, SIGNAL = 0.51; EXPRESSED IN ADULT LIVER, SIGNAL = 0.67; EXPRESSED IN BRAIN, SIGNAL = 0.46; SWISSPROT HIT: O14053, EVALUE 1.20e-02; EST_HUMAN HIT: BE537764.1, EVALUE 1.00e-08
EARESDWDGIIACHQGKLSCSTWNYQKSTIGAYFLKPKELKKDDITAT

SEQ ID NO: 44664 - protein, 24 aa, Homo sapiens
  MAP TO AC008572.6; EXPRESSED IN PLACENTA, SIGNAL = 0.47; EXPRESSED IN FETAL LIVER, SIGNAL = 0.53; EXPRESSED IN BONE MARROW, SIGNAL = 0.51; EXPRESSED IN ADULT LIVER, SIGNAL = 0.67; EXPRESSED IN BRAIN, SIGNAL = 0.46; EST_HUMAN HIT: AA332484.1, EVALUE 4.70e+00
TGMVSLLAIKVSYLAQPGIIRNLQ

SEQ ID NO: 44665 - protein, 64 aa, Homo sapiens
  MAP TO AC026213.2; EXPRESSED IN LUNG, SIGNAL = 0.84; EXPRESSED IN ADULT LIVER, SIGNAL =   1; EXPRESSED IN FETAL LIVER, SIGNAL = 0.91; EXPRESSED IN BRAIN, SIGNAL = 0.87; EXPRESSED IN PLACENTA, SIGNAL = 0.82; EXPRESSED IN BONE MARROW, SIGNAL = 0.83; EST_HUMAN HIT: BE063832.1, EVALUE 7.60e+00; SWISSPROT HIT: Q59293, EVALUE 3.40e+00
IRSIQENSAYGIPQKVLYHGLDGIEGLGTFIKALSQVAWLNDTSVNLLLPLRTVRDFFKQRPKR

SEQ ID NO: 44666 - protein, 21 aa, Homo sapiens
  MAP TO AC026213.2; EXPRESSED IN LUNG, SIGNAL = 0.84; EXPRESSED IN ADULT LIVER, SIGNAL =   1; EXPRESSED IN FETAL LIVER, SIGNAL = 0.91; EXPRESSED IN BRAIN, SIGNAL = 0.87; EXPRESSED IN PLACENTA, SIGNAL = 0.82; EXPRESSED IN BONE MARROW, SIGNAL = 0.83
SSGASRRTLPMVFLRRFSTMA

SEQ ID NO: 44667 - protein, 17 aa, Homo sapiens
  MAP TO AC016282.3; EXPRESSED IN ADULT LIVER, SIGNAL = 0.61; EXPRESSED IN BONE MARROW, SIGNAL = 0.46; EXPRESSED IN PLACENTA, SIGNAL = 0.48; EXPRESSED IN FETAL LIVER, SIGNAL = 0.57; EXPRESSED IN BRAIN, SIGNAL = 0.46
WTKTTNQGCCCCCCCFF

SEQ ID NO: 44668 - protein, 47 aa, Homo sapiens
  MAP TO AC018389.3; EXPRESSED IN BONE MARROW, SIGNAL = 1.9; EXPRESSED IN LUNG, SIGNAL = 1.1; EXPRESSED IN PLACENTA, SIGNAL = 1.1; EXPRESSED IN ADULT LIVER, SIGNAL = 0.95; EXPRESSED IN FETAL LIVER, SIGNAL = 1.1; EXPRESSED IN BRAIN, SIGNAL = 0.92; EST_HUMAN HIT: AI003891.1, EVALUE 6.00e-11; SWISSPROT HIT: P31792, EVALUE 2.00e-08
WKLHSVWRPQSSGQMERMNLTLKTIIAKLCWETQLKGIQVLGIALLR

SEQ ID NO: 44669 - protein, 84 aa, Homo sapiens
  MAP TO AL162171.1; EXPRESSED IN ADULT LIVER, SIGNAL = 1.1; EXPRESSED IN BRAIN, SIGNAL = 0.84; EXPRESSED IN LUNG, SIGNAL = 1.2; EXPRESSED IN PLACENTA, SIGNAL = 1.3; EXPRESSED IN FETAL LIVER, SIGNAL = 1.1; EXPRESSED IN BONE MARROW, SIGNAL = 1.1; EST_HUMAN HIT: Z20330.1, EVALUE 8.00e-17; SWISSPROT HIT: P57458, EVALUE 1.40e+00
KISADINEIKGMKAAILTVEANLFDLNVRVSKNEAKISSLEVKMNEYSTTYECNRQFEDQEEDTESQSRTTDVKIIGFLRNVEK

SEQ ID NO: 44670 - protein, 48 aa, Homo sapiens
  MAP TO AC021383.3; EXPRESSED IN ADULT LIVER, SIGNAL = 0.66; EXPRESSED IN FETAL LIVER, SIGNAL = 0.72; EXPRESSED IN BRAIN, SIGNAL = 0.67; EXPRESSED IN BONE MARROW, SIGNAL = 0.76; EXPRESSED IN PLACENTA, SIGNAL = 0.64; EST_HUMAN HIT: BE256045.1, EVALUE 3.00e+00
ERRIFWHKSCNGNACLGSPGPHRSDDSQRSGVKGATGEKLPQVQMLKD

SEQ ID NO: 44671 - protein, 54 aa, Homo sapiens
  MAP TO AC009334.3; EXPRESSED IN PLACENTA, SIGNAL = 0.58; EXPRESSED IN ADULT LIVER, SIGNAL = 0.65; EXPRESSED IN FETAL LIVER, SIGNAL = 0.6; EXPRESSED IN BRAIN, SIGNAL = 0.69; EXPRESSED IN BONE MARROW, SIGNAL = 0.77; EST_HUMAN HIT: BF575699.1, EVALUE 6.00e-03; SWISSPROT HIT: Q99698, EVALUE 1.00e-24
NLSVESILFEMRDHLSQSKVIETQLAKPLFDALLRVALGNYSADFEHNDAMTEK

SEQ ID NO: 44672 - protein, 119 aa, Homo sapiens
  MAP TO AL118505.13; EXPRESSED IN ADULT LIVER, SIGNAL = 0.77; EXPRESSED IN FETAL LIVER, SIGNAL = 0.77; EXPRESSED IN BRAIN, SIGNAL = 0.74; EXPRESSED IN PLACENTA, SIGNAL = 0.56; EXPRESSED IN BONE MARROW, SIGNAL = 0.74; SWISSPROT HIT: P46060, EVALUE 3.00e-03; EST_HUMAN HIT: AW674581.1, EVALUE 7.00e-54
FGSIIQLYPGGGPVRAATACFGFPKSFLSGLYEFPLNKVDSLLHGTFSAKMLSSEPKDSALVEESNGTLEEKQASEQENEDSMAEAPESNHPEDQETMETISQDPEHKGPKERGSKKDY

SEQ ID NO: 44673 - protein, 119 aa, Homo sapiens
  MAP TO AL118505.13; EXPRESSED IN ADULT LIVER, SIGNAL = 0.77; EXPRESSED IN FETAL LIVER, SIGNAL = 0.77; EXPRESSED IN BRAIN, SIGNAL = 0.74; EXPRESSED IN PLACENTA, SIGNAL = 0.56; EXPRESSED IN BONE MARROW, SIGNAL = 0.74; SWISSPROT HIT: Q94918, EVALUE 1.40e+00; EST_HUMAN HIT: AW674581.1, EVALUE 1.00e-57
VLAPLFSYTLEEDLFGQQQHVLDFPNLFSVVFMNSLSTKWTVFYMEHFLPRCYLQSQKTVLWLKKVMAHWRKNRLLNKRMKTAWQRPQRATTQKTRKQWKQFLKIQNIRGLKREEAKKI

SEQ ID NO: 44674 - protein, 57 aa, Homo sapiens
  MAP TO AC022843.3; EXPRESSED IN ADULT LIVER, SIGNAL = 1.1; EXPRESSED IN BONE MARROW, SIGNAL = 0.8; EXPRESSED IN PLACENTA, SIGNAL = 0.73; EXPRESSED IN FETAL LIVER, SIGNAL = 0.99; EXPRESSED IN BRAIN, SIGNAL =   1; SWISSPROT HIT: P35931, EVALUE 4.10e-01; EST_HUMAN HIT: BE894856.1, EVALUE 1.90e-01
IRSALFLFSWLSLPRLHICHGEKAKQSWCWFIHQSHQCCCYQLKYSQPFPTQNHLLV

SEQ ID NO: 44675 - protein, 136 aa, Homo sapiens
  MAP TO AL122007.7; EXPRESSED IN PLACENTA, SIGNAL = 0.58; EXPRESSED IN FETAL LIVER, SIGNAL = 0.54; EXPRESSED IN BRAIN, SIGNAL = 0.48; EXPRESSED IN BONE MARROW, SIGNAL = 0.54; EXPRESSED IN ADULT LIVER, SIGNAL = 0.7; EST_HUMAN HIT: T94149.1, EVALUE 7.00e-16; SWISSPROT HIT: P26809, EVALUE 2.00e-10
LKVAVPLLWQHLAACGWAINKSKVQWPGLSAKFLGVIWLSKTKAIPEAIIEKIQAYPRPTTMKQLQTFVGLLEYWRPFVPHLAQMIKPLYGLSKKGATWDWDNEAGTDLLAAKWAIQQTQALQVIDQGCPFELDVH

SEQ ID NO: 44676 - protein, 40 aa, Homo sapiens
  MAP TO AL122007.7; EXPRESSED IN PLACENTA, SIGNAL = 0.58; EXPRESSED IN FETAL LIVER, SIGNAL = 0.54; EXPRESSED IN BRAIN, SIGNAL = 0.48; EXPRESSED IN BONE MARROW, SIGNAL = 0.54; EXPRESSED IN ADULT LIVER, SIGNAL = 0.7; EST_HUMAN HIT: AA435819.1, EVALUE 4.00e-04
FKSGSAPLVATFGSMWLGHQQIQGPMAWIICEILRSYLVE

SEQ ID NO: 44677 - protein, 84 aa, Homo sapiens
  MAP TO AC022470.3; EXPRESSED IN PLACENTA, SIGNAL = 0.85; EXPRESSED IN ADULT LIVER, SIGNAL = 0.83; EXPRESSED IN BONE MARROW, SIGNAL = 0.92; EXPRESSED IN BRAIN, SIGNAL = 1.4; EXPRESSED IN FETAL LIVER, SIGNAL = 0.83; EST_HUMAN HIT: AW387131.1, EVALUE 3.00e-44; SWISSPROT HIT: P03255, EVALUE 1.70e-01
EPADSTEMDDKAAVGVSKPLPSVPPSIGKSNVDRRQAEIGEGSVRRRIYDNPYFEPQYGFPPEEDEDEQGESYTPRFSQHVSGN

SEQ ID NO: 44678 - protein, 42 aa, Homo sapiens
  MAP TO AL160281.2; EXPRESSED IN BRAIN, SIGNAL = 0.82; EXPRESSED IN BONE MARROW, SIGNAL = 0.89; EXPRESSED IN PLACENTA, SIGNAL = 0.8; EXPRESSED IN FETAL LIVER, SIGNAL = 0.68; EST_HUMAN HIT: AI791522.1, EVALUE 4.00e-17; SWISSPROT HIT: Q06730, EVALUE 1.00e-11
VSVSFEDVTVDFSREEWQQLDSTQRRLYQDVMLENYSHLLSV

SEQ ID NO: 44679 - protein, 17 aa, Homo sapiens
  MAP TO AC024575.1; EXPRESSED IN LUNG, SIGNAL = 1.1; EXPRESSED IN BONE MARROW, SIGNAL = 1.1; EXPRESSED IN PLACENTA, SIGNAL = 0.86; EXPRESSED IN ADULT LIVER, SIGNAL =   1; EXPRESSED IN FETAL LIVER, SIGNAL = 0.97; EXPRESSED IN BRAIN, SIGNAL = 1.6; EST_HUMAN HIT: BE274853.1, EVALUE 2.90e-02
VYSFGLFTTTIFANAGQ

SEQ ID NO: 44680 - protein, 19 aa, Homo sapiens
  MAP TO AC024575.1; EXPRESSED IN LUNG, SIGNAL = 1.1; EXPRESSED IN BONE MARROW, SIGNAL = 1.1; EXPRESSED IN PLACENTA, SIGNAL = 0.86; EXPRESSED IN ADULT LIVER, SIGNAL =   1; EXPRESSED IN FETAL LIVER, SIGNAL = 0.97; EXPRESSED IN BRAIN, SIGNAL = 1.6
GSTPSASSPRPSSPTRGRW

SEQ ID NO: 44681 - protein, 30 aa, Homo sapiens
  MAP TO AL139423.2; EXPRESSED IN PLACENTA, SIGNAL = 0.7; EXPRESSED IN ADULT LIVER, SIGNAL = 0.75; EXPRESSED IN FETAL LIVER, SIGNAL = 0.71; EXPRESSED IN BONE MARROW, SIGNAL = 0.57; EXPRESSED IN BRAIN, SIGNAL = 0.77; SWISSPROT HIT: O75381, EVALUE 1.00e-10; EST_HUMAN HIT: N42490.1, EVALUE 2.00e-09
LTDEEIDMAFQQSGTAADEPSSLGPATQVV

SEQ ID NO: 44682 - protein, 30 aa, Homo sapiens
  MAP TO AL139423.2; EXPRESSED IN PLACENTA, SIGNAL = 0.7; EXPRESSED IN ADULT LIVER, SIGNAL = 0.75; EXPRESSED IN FETAL LIVER, SIGNAL = 0.71; EXPRESSED IN BONE MARROW, SIGNAL = 0.57; EXPRESSED IN BRAIN, SIGNAL = 0.77; EST_HUMAN HIT: N42490.1, EVALUE 2.00e-10
TTCVAGPKDEGSSAAVPDCWKAISISSSVS

SEQ ID NO: 44683 - protein, 51 aa, Homo sapiens
  MAP TO AC013657.3; EXPRESSED IN PLACENTA, SIGNAL = 1.1; EXPRESSED IN ADULT LIVER, SIGNAL = 1.3; EXPRESSED IN BRAIN, SIGNAL = 1.1; EXPRESSED IN BONE MARROW, SIGNAL = 1.2; EXPRESSED IN LUNG, SIGNAL = 1.1; EXPRESSED IN FETAL LIVER, SIGNAL = 1.3
IPTACPFVPCRHVVPAGVAVPPFLALPCPPCAVSTWASLQSKRSPCPSLLR

SEQ ID NO: 44684 - protein, 27 aa, Homo sapiens
  MAP TO AL161724.2; EXPRESSED IN PLACENTA, SIGNAL = 0.62; EXPRESSED IN FETAL LIVER, SIGNAL = 0.55; EXPRESSED IN BRAIN, SIGNAL = 0.52; EXPRESSED IN BONE MARROW, SIGNAL = 0.47; EST_HUMAN HIT: BF060723.1, EVALUE 4.70e-02
NVSILAHCLRASKVSDDKSADNFIENP

SEQ ID NO: 44685 - protein, 24 aa, Homo sapiens
  MAP TO AC024259.5; EXPRESSED IN PLACENTA, SIGNAL = 0.66; EXPRESSED IN FETAL LIVER, SIGNAL = 0.66; EXPRESSED IN BONE MARROW, SIGNAL = 0.65; EXPRESSED IN ADULT LIVER, SIGNAL = 0.65; EXPRESSED IN BRAIN, SIGNAL = 0.62
CLASLNVVGNHTIFLRHTPNLTIN

SEQ ID NO: 44686 - protein, 33 aa, Homo sapiens
  MAP TO AC018993.3; EXPRESSED IN ADULT LIVER, SIGNAL = 0.78; EXPRESSED IN BONE MARROW, SIGNAL = 0.51; EXPRESSED IN PLACENTA, SIGNAL = 0.56; EXPRESSED IN FETAL LIVER, SIGNAL = 0.54; EXPRESSED IN BRAIN, SIGNAL = 0.55
HSSSNERTTKLIIPSDYHGKRALLYERFCDYCK

SEQ ID NO: 44687 - protein, 95 aa, Homo sapiens
  MAP TO AC007957.34; EXPRESSED IN LUNG, SIGNAL = 1.1; EXPRESSED IN PLACENTA, SIGNAL = 0.84; EXPRESSED IN ADULT LIVER, SIGNAL = 0.9; EXPRESSED IN FETAL LIVER, SIGNAL = 0.87; EXPRESSED IN BONE MARROW, SIGNAL = 0.92; EXPRESSED IN BRAIN, SIGNAL = 1.1; EST_HUMAN HIT: AA379007.1, EVALUE 5.00e-33; SWISSPROT HIT: Q57971, EVALUE 3.00e+00
LRAKDGLCPSFIYRSLGQGHSPTWVHPHCPAEKGRSACLHPTQVQKPWPAALCGGQGRTLSLSRVRMGSPCLGSTGDRVQQIESCLGDVQDVAGE

SEQ ID NO: 44688 - protein, 28 aa, Homo sapiens
  MAP TO AC007957.34; EXPRESSED IN LUNG, SIGNAL = 1.1; EXPRESSED IN PLACENTA, SIGNAL = 0.84; EXPRESSED IN ADULT LIVER, SIGNAL = 0.9; EXPRESSED IN FETAL LIVER, SIGNAL = 0.87; EXPRESSED IN BONE MARROW, SIGNAL = 0.92; EXPRESSED IN BRAIN, SIGNAL = 1.1; EST_HUMAN HIT: AA379007.1, EVALUE 3.00e-09
CPECVWAALAWAVRVTECSRSKVASGMC

SEQ ID NO: 44689 - protein, 65 aa, Homo sapiens
  MAP TO AC009943.4; EXPRESSED IN ADULT LIVER, SIGNAL = 0.75; EXPRESSED IN BRAIN, SIGNAL = 0.71; EXPRESSED IN BONE MARROW, SIGNAL = 0.76; EXPRESSED IN PLACENTA, SIGNAL = 0.63; EXPRESSED IN FETAL LIVER, SIGNAL = 0.77; EST_HUMAN HIT: AW361587.1, EVALUE 7.00e-03; SWISSPROT HIT: Q02817, EVALUE 6.00e-04
DQNIVLQDGKVTAVKSTESKKCELNANAYSIHTVGLYLILKFQNGIIVIWDKNTRLSVILDPNWN

SEQ ID NO: 44690 - protein, 58 aa, Homo sapiens
  MAP TO AC022813.3; EXPRESSED IN LUNG, SIGNAL = 0.93; EXPRESSED IN ADULT LIVER, SIGNAL =   1; EXPRESSED IN BRAIN, SIGNAL = 1.1; EXPRESSED IN PLACENTA, SIGNAL = 1.2; EXPRESSED IN FETAL LIVER, SIGNAL = 0.99; EXPRESSED IN BONE MARROW, SIGNAL = 0.77; SWISSPROT HIT: Q40294, EVALUE 6.00e+00; EST_HUMAN HIT: AI138257.1, EVALUE 3.60e+00
FHVVAVCITILQMKDFSHRKVKHFPGASQLEDKELGFKLMFRQLLAFANFYQPTLLSV

SEQ ID NO: 44691 - protein, 25 aa, Homo sapiens
  MAP TO AC007956.5; EXPRESSED IN PLACENTA, SIGNAL = 0.76; EXPRESSED IN FETAL LIVER, SIGNAL = 1.2; EXPRESSED IN LUNG, SIGNAL = 1.1; EXPRESSED IN BONE MARROW, SIGNAL = 1.2; EXPRESSED IN ADULT LIVER, SIGNAL = 1.3; EXPRESSED IN BRAIN, SIGNAL = 1.3; EST_HUMAN HIT: BE830103.1, EVALUE 1.00e-07
QTDWEKITDESGHLAEKALNRTKYI

SEQ ID NO: 44692 - protein, 25 aa, Homo sapiens
  MAP TO AC007956.5; EXPRESSED IN PLACENTA, SIGNAL = 0.76; EXPRESSED IN FETAL LIVER, SIGNAL = 1.2; EXPRESSED IN LUNG, SIGNAL = 1.1; EXPRESSED IN BONE MARROW, SIGNAL = 1.2; EXPRESSED IN ADULT LIVER, SIGNAL = 1.3; EXPRESSED IN BRAIN, SIGNAL = 1.3; EST_HUMAN HIT: BE830103.1, EVALUE 3.00e-07
RLIGRRSQMKVVTWLKKPSIEPNIY

SEQ ID NO: 44693 - protein, 70 aa, Homo sapiens
  MAP TO AC009079.4; EXPRESSED IN BONE MARROW, SIGNAL = 1.2; EXPRESSED IN PLACENTA, SIGNAL = 0.99; EXPRESSED IN ADULT LIVER, SIGNAL = 1.1; EXPRESSED IN BRAIN, SIGNAL = 0.96; EXPRESSED IN LUNG, SIGNAL = 1.2; EXPRESSED IN FETAL LIVER, SIGNAL = 1.1; SWISSPROT HIT: P21303, EVALUE 1.30e-01
MDLCQKNETDLENAENNEIQFTEETEPTYTCPDGKSEKNHVYCLLDVSDITLEQDEKAKEFIIGTGWEEA

SEQ ID NO: 44694 - protein, 26 aa, Homo sapiens
  MAP TO AL139248.2; EXPRESSED IN PLACENTA, SIGNAL = 0.6; EXPRESSED IN FETAL LIVER, SIGNAL = 0.56; EXPRESSED IN BRAIN, SIGNAL = 0.79; EXPRESSED IN BONE MARROW, SIGNAL = 0.63; EXPRESSED IN ADULT LIVER, SIGNAL = 0.81
SIDMDPVKLQQKLGNTVSLGAREEKE

SEQ ID NO: 44695 - protein, 25 aa, Homo sapiens
  MAP TO AL139248.2; EXPRESSED IN PLACENTA, SIGNAL = 0.6; EXPRESSED IN FETAL LIVER, SIGNAL = 0.56; EXPRESSED IN BRAIN, SIGNAL = 0.79; EXPRESSED IN BONE MARROW, SIGNAL = 0.63; EXPRESSED IN ADULT LIVER, SIGNAL = 0.81; EST_HUMAN HIT: BE300179.1, EVALUE 4.70e+00
PLIWTPSNCSKNWEIQSLWVPGRKR

SEQ ID NO: 44696 - protein, 42 aa, Homo sapiens
  MAP TO AC018425.3; EXPRESSED IN ADULT LIVER, SIGNAL = 0.64; EXPRESSED IN FETAL LIVER, SIGNAL = 0.57; EXPRESSED IN BRAIN, SIGNAL = 0.59; EXPRESSED IN PLACENTA, SIGNAL = 0.61; EXPRESSED IN BONE MARROW, SIGNAL = 0.54
YMVMACRVVNKRRHMGLQQLSSFAETGRTFLGPLKSSKFIID

SEQ ID NO: 44697 - protein, 68 aa, Homo sapiens
  MAP TO AC013611.3; EXPRESSED IN LUNG, SIGNAL = 2.2; EXPRESSED IN PLACENTA, SIGNAL = 0.95; EXPRESSED IN BRAIN, SIGNAL = 0.95; EXPRESSED IN FETAL LIVER, SIGNAL = 2.4; EXPRESSED IN BONE MARROW, SIGNAL = 1.7; SWISSPROT HIT: P02746, EVALUE 3.00e-37; EST_HUMAN HIT: AV703148.1, EVALUE 2.00e-36
TIRFDHVITNMNNNYEPRSGKFTCKVPGLYYFTYHASSRGNLCVNLMRGRERAQKVVTFCDYAYNTFQ

SEQ ID NO: 44698 - protein, 82 aa, Homo sapiens
  MAP TO AC013611.3; EXPRESSED IN LUNG, SIGNAL = 2.2; EXPRESSED IN PLACENTA, SIGNAL = 0.95; EXPRESSED IN BRAIN, SIGNAL = 0.95; EXPRESSED IN FETAL LIVER, SIGNAL = 2.4; EXPRESSED IN BONE MARROW, SIGNAL = 1.7; SWISSPROT HIT: P89479, EVALUE 1.40e-02; EST_HUMAN HIT: BF525534.1, EVALUE 5.00e-43
GFQGWLETMVSSERRETQGFLGIQEKSAPRAPWALKVAQGPLEPQAPKVNRETTRPPRKSPSLPQEPSTSPCAGTRPSASTT

SEQ ID NO: 44699 - protein, 49 aa, Homo sapiens
  MAP TO AC013291.4; EXPRESSED IN PLACENTA, SIGNAL = 0.56; EXPRESSED IN BONE MARROW, SIGNAL = 0.66; EXPRESSED IN ADULT LIVER, SIGNAL = 0.59; EXPRESSED IN FETAL LIVER, SIGNAL = 0.76; EXPRESSED IN BRAIN, SIGNAL = 0.62; EST_HUMAN HIT: N40667.1, EVALUE 1.00e-03; SWISSPROT HIT: O93655, EVALUE 4.70e+00
FLNFFLEKYKRPVCDTDQWEFINGWYVLVIISDLMTIIGSILKMEIKAK

SEQ ID NO: 44700 - protein, 20 aa, Homo sapiens
  MAP TO AL139340.3; EXPRESSED IN PLACENTA, SIGNAL = 0.82; EXPRESSED IN ADULT LIVER, SIGNAL = 0.69; EXPRESSED IN FETAL LIVER, SIGNAL = 0.65; EXPRESSED IN BRAIN, SIGNAL = 0.71; EXPRESSED IN BONE MARROW, SIGNAL = 0.67
GTNSLLALMWLSSLLFKASF

SEQ ID NO: 44701 - protein, 35 aa, Homo sapiens
  MAP TO AC022333.11; EXPRESSED IN PLACENTA, SIGNAL = 0.5; EXPRESSED IN ADULT LIVER, SIGNAL = 0.78; EXPRESSED IN FETAL LIVER, SIGNAL = 0.66; EXPRESSED IN BONE MARROW, SIGNAL = 0.51; EXPRESSED IN BRAIN, SIGNAL = 0.6
MQQDCCDCEALSGNAGACHELKALAMALVEAVEEA

SEQ ID NO: 44702 - protein, 19 aa, Homo sapiens
  MAP TO AC022333.11; EXPRESSED IN PLACENTA, SIGNAL = 0.5; EXPRESSED IN ADULT LIVER, SIGNAL = 0.78; EXPRESSED IN FETAL LIVER, SIGNAL = 0.66; EXPRESSED IN BONE MARROW, SIGNAL = 0.51; EXPRESSED IN BRAIN, SIGNAL = 0.6
FLSTVAHGESQPCDSGGTL

SEQ ID NO: 44703 - protein, 45 aa, Homo sapiens
  MAP TO AL158135.1; EXPRESSED IN PLACENTA, SIGNAL = 0.64; EXPRESSED IN ADULT LIVER, SIGNAL = 0.65; EXPRESSED IN BRAIN, SIGNAL = 0.55; EXPRESSED IN BONE MARROW, SIGNAL = 0.92; EXPRESSED IN FETAL LIVER, SIGNAL = 0.92; EST_HUMAN HIT: AI038372.1, EVALUE 7.00e-06
SGSSISLSSTSTSCPPGRSPGTRTCMGLSSPMITVPSSEMSPEGP

SEQ ID NO: 44704 - protein, 18 aa, Homo sapiens
  MAP TO AL158135.1; EXPRESSED IN PLACENTA, SIGNAL = 0.64; EXPRESSED IN ADULT LIVER, SIGNAL = 0.65; EXPRESSED IN BRAIN, SIGNAL = 0.55; EXPRESSED IN BONE MARROW, SIGNAL = 0.92; EXPRESSED IN FETAL LIVER, SIGNAL = 0.92; EST_HUMAN HIT: N76646.1, EVALUE 1.30e-02
GDKRWMWKTVILMILTLC

SEQ ID NO: 44705 - protein, 36 aa, Homo sapiens
  MAP TO AC015999.3; EXPRESSED IN PLACENTA, SIGNAL = 0.93; EXPRESSED IN ADULT LIVER, SIGNAL = 1.2; EXPRESSED IN BRAIN, SIGNAL = 0.89; EXPRESSED IN BONE MARROW, SIGNAL = 1.3; EXPRESSED IN LUNG, SIGNAL = 1.2; EXPRESSED IN FETAL LIVER, SIGNAL = 0.97; EST_HUMAN HIT: AV715070.1, EVALUE 3.00e-09
QLLYLGMLSVDTEEDTQLASLFPGEKHSSVSLQFKE

SEQ ID NO: 44706 - protein, 29 aa, Homo sapiens
  MAP TO AC015999.3; EXPRESSED IN PLACENTA, SIGNAL = 0.93; EXPRESSED IN ADULT LIVER, SIGNAL = 1.2; EXPRESSED IN BRAIN, SIGNAL = 0.89; EXPRESSED IN BONE MARROW, SIGNAL = 1.3; EXPRESSED IN LUNG, SIGNAL = 1.2; EXPRESSED IN FETAL LIVER, SIGNAL = 0.97; EST_HUMAN HIT: AL036161.3, EVALUE 2.00e-09
NCFTLECCRWILRRIPNWQVCFRVRSIHL

SEQ ID NO: 44707 - protein, 31 aa, Homo sapiens
  MAP TO AC018578.3; EXPRESSED IN PLACENTA, SIGNAL = 0.81; EXPRESSED IN ADULT LIVER, SIGNAL = 0.98; EXPRESSED IN FETAL LIVER, SIGNAL = 0.72; EXPRESSED IN BRAIN, SIGNAL = 0.83; EXPRESSED IN BONE MARROW, SIGNAL = 0.76
VPTVRVCALMRRAAIKLLMGSTMSRLLPLPP

SEQ ID NO: 44708 - protein, 81 aa, Homo sapiens
  MAP TO AC016847.3; EXPRESSED IN BONE MARROW, SIGNAL = 0.71; EXPRESSED IN PLACENTA, SIGNAL =   1; EXPRESSED IN ADULT LIVER, SIGNAL = 1.1; EXPRESSED IN FETAL LIVER, SIGNAL = 0.97; EXPRESSED IN LUNG, SIGNAL =   1; EXPRESSED IN BRAIN, SIGNAL = 0.76; SWISSPROT HIT: Q11067, EVALUE 5.10e+00; EST_HUMAN HIT: AW340174.1, EVALUE 4.00e-06
CLMVWKSRGGNGSGSSQLTIYDSTSKICASDSQDIGLCWSRALSSQWYNANSSVHGNSSIKLEVETATRPLRLLMPVNQEA

SEQ ID NO: 44709 - protein, 76 aa, Homo sapiens
  MAP TO AC016847.3; EXPRESSED IN BONE MARROW, SIGNAL = 0.71; EXPRESSED IN PLACENTA, SIGNAL =   1; EXPRESSED IN ADULT LIVER, SIGNAL = 1.1; EXPRESSED IN FETAL LIVER, SIGNAL = 0.97; EXPRESSED IN LUNG, SIGNAL =   1; EXPRESSED IN BRAIN, SIGNAL = 0.76; EST_HUMAN HIT: AA971603.1, EVALUE 3.00e-07; SWISSPROT HIT: Q46839, EVALUE 2.80e+00
VSWSGNQGVEMEVVPLNSLSMIQLAKSVLLTPKTLGYVGPELLVPNGTMLTLVSMAIVLLNWKLKQLPGHFDSSCQ

SEQ ID NO: 44710 - protein, 56 aa, Homo sapiens
  MAP TO AC020991.3; EXPRESSED IN ADULT LIVER, SIGNAL = 0.78; EXPRESSED IN PLACENTA, SIGNAL = 0.66; EXPRESSED IN FETAL LIVER, SIGNAL = 0.66; EXPRESSED IN BRAIN, SIGNAL = 0.64; EXPRESSED IN BONE MARROW, SIGNAL = 0.59; SWISSPROT HIT: O13710, EVALUE 4.60e+00
MSLTCCQWNKHMGEKVVISDWCVLEKRHRRDTIFIDIVEKEAAQMGRKITINEDIE

SEQ ID NO: 44711 - protein, 23 aa, Homo sapiens
  MAP TO AC020991.3; EXPRESSED IN ADULT LIVER, SIGNAL = 0.78; EXPRESSED IN PLACENTA, SIGNAL = 0.66; EXPRESSED IN FETAL LIVER, SIGNAL = 0.66; EXPRESSED IN BRAIN, SIGNAL = 0.64; EXPRESSED IN BONE MARROW, SIGNAL = 0.59
CLLHAVSGISTWGKKWLYLTGVF

SEQ ID NO: 44712 - protein, 46 aa, Homo sapiens
  MAP TO AC026273.2; EXPRESSED IN ADULT LIVER, SIGNAL = 0.56; EXPRESSED IN BRAIN, SIGNAL = 0.48; EXPRESSED IN BONE MARROW, SIGNAL = 0.43; EXPRESSED IN PLACENTA, SIGNAL = 0.51; SWISSPROT HIT: P36498, EVALUE 2.80e+00
MTAKIMHKEKAHLNPEMYLSESGYMDPGSLFSSHFPEIQSSGKAAA

SEQ ID NO: 44713 - protein, 34 aa, Homo sapiens
  MAP TO AF241726.1; EXPRESSED IN PLACENTA, SIGNAL = 2.7; EXPRESSED IN FETAL LIVER, SIGNAL = 0.84; EXPRESSED IN ADULT LIVER, SIGNAL = 0.75; EXPRESSED IN BRAIN, SIGNAL =   1; EXPRESSED IN BONE MARROW, SIGNAL =   1; EXPRESSED IN LUNG, SIGNAL = 0.97; SWISSPROT HIT: Q10663, EVALUE 8.50e+00
YHLESKQGEGMNNITCKEHLLCSFRKHQVLKAER

SEQ ID NO: 44714 - protein, 42 aa, Homo sapiens
  MAP TO AL121723.35; EXPRESSED IN PLACENTA, SIGNAL = 0.76; EXPRESSED IN FETAL LIVER, SIGNAL = 0.75; EXPRESSED IN BONE MARROW, SIGNAL = 0.63; EXPRESSED IN ADULT LIVER, SIGNAL = 0.78; EXPRESSED IN BRAIN, SIGNAL = 0.57; EST_HUMAN HIT: T12238.1, EVALUE 8.20e-01
KLWLHESLLTLNLSCGLLVVLVALVFDEWHPWSGHVAEACST

SEQ ID NO: 44715 - protein, 113 aa, Homo sapiens
  MAP TO AC015599.3; EXPRESSED IN PLACENTA, SIGNAL = 0.8; EXPRESSED IN ADULT LIVER, SIGNAL = 0.9; EXPRESSED IN BRAIN, SIGNAL = 0.73; EXPRESSED IN BONE MARROW, SIGNAL = 0.82; EXPRESSED IN LUNG, SIGNAL = 0.89; EXPRESSED IN FETAL LIVER, SIGNAL = 0.77; EST_HUMAN HIT: AA278868.1, EVALUE 2.00e-38; SWISSPROT HIT: Q01611, EVALUE 1.70e-01
LLMGPPQVELAVPLPPWGVPLHSHLLKTEHAALCLCTSSLFPSEILILTWQGTPLCTWLHAWHFIHSGSCWPGDAHLVLRFFPGKQFKCTVCDYTAAQKPQLLRHMEQHVSFK

SEQ ID NO: 44716 - protein, 29 aa, Homo sapiens
  MAP TO AC015599.3; EXPRESSED IN PLACENTA, SIGNAL = 0.8; EXPRESSED IN ADULT LIVER, SIGNAL = 0.9; EXPRESSED IN BRAIN, SIGNAL = 0.73; EXPRESSED IN BONE MARROW, SIGNAL = 0.82; EXPRESSED IN LUNG, SIGNAL = 0.89; EXPRESSED IN FETAL LIVER, SIGNAL = 0.77; EST_HUMAN HIT: BE747464.1, EVALUE 4.00e-11
GSSLSARCVTTQRPRSHSCCGTWNSMSPS

SEQ ID NO: 44717 - protein, 67 aa, Homo sapiens
  MAP TO AL139115.2; EXPRESSED IN ADULT LIVER, SIGNAL = 0.88; EXPRESSED IN BRAIN, SIGNAL =   1; EXPRESSED IN PLACENTA, SIGNAL = 0.81; EXPRESSED IN FETAL LIVER, SIGNAL = 0.89; EXPRESSED IN BONE MARROW, SIGNAL = 0.82
ELKQNECKDRKGEGEGEGEGEGEGEGEGKERKGKERKGKERNGKERKGKETKGKGREEGKEEARKEQ

SEQ ID NO: 44718 - protein, 25 aa, Homo sapiens
  MAP TO AC025863.2; EXPRESSED IN LUNG, SIGNAL = 1.1; EXPRESSED IN PLACENTA, SIGNAL = 1.1; EXPRESSED IN FETAL LIVER, SIGNAL = 0.99; EXPRESSED IN BRAIN, SIGNAL = 0.91; EXPRESSED IN ADULT LIVER, SIGNAL = 1.2; EXPRESSED IN BONE MARROW, SIGNAL = 0.86
MSNILLVEVVCMGLGIHPDVSPVLQ

SEQ ID NO: 44719 - protein, 50 aa, Homo sapiens
  MAP TO AL136172.12; EXPRESSED IN LUNG, SIGNAL = 1.2; EXPRESSED IN FETAL LIVER, SIGNAL = 1.2; EXPRESSED IN BRAIN, SIGNAL = 1.1; EXPRESSED IN PLACENTA, SIGNAL = 1.1; EXPRESSED IN ADULT LIVER, SIGNAL = 1.1; EXPRESSED IN BONE MARROW, SIGNAL = 1.1; SWISSPROT HIT: P28749, EVALUE 4.00e-15; EST_HUMAN HIT: BE882582.1, EVALUE 5.00e-04
MFEDKPHAEGAAVVAAAGEALQALCQELNLDEGSAAEALDDFTAIRGNYS

SEQ ID NO: 44720 - protein, 46 aa, Homo sapiens
  MAP TO AL121772.12; EXPRESSED IN BRAIN, SIGNAL = 0.55; EXPRESSED IN BONE MARROW, SIGNAL = 0.57; EXPRESSED IN PLACENTA, SIGNAL = 0.56; EXPRESSED IN ADULT LIVER, SIGNAL = 0.86; EXPRESSED IN FETAL LIVER, SIGNAL = 0.53; EST_HUMAN HIT: AI810505.1, EVALUE 3.00e-11
FLLHAAQSQALQLQVGLSLPPCHHFRESIKCLHDQPPPLAKHKALH

SEQ ID NO: 44721 - protein, 53 aa, Homo sapiens
  MAP TO AL133465.28; EXPRESSED IN PLACENTA, SIGNAL = 0.65; EXPRESSED IN ADULT LIVER, SIGNAL = 0.71; EXPRESSED IN FETAL LIVER, SIGNAL = 0.65; EXPRESSED IN BRAIN, SIGNAL = 0.58; EXPRESSED IN BONE MARROW, SIGNAL = 0.69; SWISSPROT HIT: P13538, EVALUE 3.60e+00
NWQNQKDALPPRMLDEDDFCRTSGFSGDEDHSSGSLHVHYSHYQFKKKEEEEK

SEQ ID NO: 44722 - protein, 41 aa, Homo sapiens
  MAP TO AL133465.28; EXPRESSED IN PLACENTA, SIGNAL = 0.65; EXPRESSED IN ADULT LIVER, SIGNAL = 0.71; EXPRESSED IN FETAL LIVER, SIGNAL = 0.65; EXPRESSED IN BRAIN, SIGNAL = 0.58; EXPRESSED IN BONE MARROW, SIGNAL = 0.69
CSMRTTFAGLLVFREMRITVVEVYTFTTLIISLKKKKKKKN

SEQ ID NO: 44723 - protein, 43 aa, Homo sapiens
  MAP TO AC015861.5; EXPRESSED IN LUNG, SIGNAL = 0.91; EXPRESSED IN BONE MARROW, SIGNAL = 0.79; EXPRESSED IN BRAIN, SIGNAL = 0.7; EXPRESSED IN PLACENTA, SIGNAL = 0.79; EXPRESSED IN ADULT LIVER, SIGNAL =   1; EXPRESSED IN FETAL LIVER, SIGNAL = 0.79; EST_HUMAN HIT: AA969123.1, EVALUE 3.20e-02
FLATSTTPEVTSSTEILDLSKSYTRVGISFFQTPVYVDMASRM

SEQ ID NO: 44724 - protein, 31 aa, Homo sapiens
  MAP TO AC013317.4; EXPRESSED IN FETAL LIVER, SIGNAL = 0.53; EXPRESSED IN BRAIN, SIGNAL = 0.45; EXPRESSED IN BONE MARROW, SIGNAL = 0.42; EST_HUMAN HIT: AV703223.1, EVALUE 4.00e-03; SWISSPROT HIT: Q90607, EVALUE 8.50e+00
KEVMKRERKDGRKEEVDNEVNKNGWVKFGHM

SEQ ID NO: 44725 - protein, 32 aa, Homo sapiens
  MAP TO AL136365.3; EXPRESSED IN BONE MARROW, SIGNAL = 0.85; EXPRESSED IN ADULT LIVER, SIGNAL = 0.92; EXPRESSED IN LUNG, SIGNAL = 1.1; EXPRESSED IN PLACENTA, SIGNAL =   1; EXPRESSED IN FETAL LIVER, SIGNAL = 0.84; EXPRESSED IN BRAIN, SIGNAL = 0.91; EST_HUMAN HIT: AA377985.1, EVALUE 3.00e-10
TVRLSQAPAGLADEQGVDPAIADLMITRKGGH

SEQ ID NO: 44726 - protein, 61 aa, Homo sapiens
  MAP TO AC006319.3; EXPRESSED IN PLACENTA, SIGNAL = 0.63; EXPRESSED IN ADULT LIVER, SIGNAL = 0.83; EXPRESSED IN BONE MARROW, SIGNAL = 0.75; EXPRESSED IN FETAL LIVER, SIGNAL = 0.68; EXPRESSED IN BRAIN, SIGNAL = 0.76; EST_HUMAN HIT: BE673102.1, EVALUE 6.00e-06
ILRVSLRQPETSVASVASASVFLIPAGLIPPTLPDRLRSACATNLGPTPRVSHMQSGKDCV

SEQ ID NO: 44727 - protein, 50 aa, Homo sapiens
  MAP TO AC006319.3; EXPRESSED IN PLACENTA, SIGNAL = 0.63; EXPRESSED IN ADULT LIVER, SIGNAL = 0.83; EXPRESSED IN BONE MARROW, SIGNAL = 0.75; EXPRESSED IN FETAL LIVER, SIGNAL = 0.68; EXPRESSED IN BRAIN, SIGNAL = 0.76; EST_HUMAN HIT: AW450527.1, EVALUE 6.00e-03
SLGCHFVSQKPLWPALPLLQFFSFLLGSFHPLCPTGCAQLVLPTSVLRQG

SEQ ID NO: 44728 - protein, 68 aa, Homo sapiens
  MAP TO AC015873.2; EXPRESSED IN PLACENTA, SIGNAL = 0.8; EXPRESSED IN FETAL LIVER, SIGNAL = 0.56; EXPRESSED IN BRAIN, SIGNAL = 0.63; EXPRESSED IN BONE MARROW, SIGNAL = 0.56; EST_HUMAN HIT: BF360942.1, EVALUE 1.00e-16
MLAVHYDSPGIVNILLKQNINVFTQDVWTRCRRLHYFSLFDKVSVYVKRPVNIELKFKIIATIPSYTL

SEQ ID NO: 44729 - protein, 42 aa, Homo sapiens [sequence omitted]

SEQ ID NO: 44730 - protein, 65 aa, Homo sapiens
  MAP TO AL137141.7; EXPRESSED IN ADULT LIVER, SIGNAL = 0.66; EXPRESSED IN BRAIN, SIGNAL = 0.48; EXPRESSED IN BONE MARROW, SIGNAL = 5.4; EXPRESSED IN LUNG, SIGNAL = 1.8; EXPRESSED IN PLACENTA, SIGNAL = 0.61; EXPRESSED IN FETAL LIVER, SIGNAL = 1.5; EST_HUMAN HIT: BE513988.1, EVALUE 8.00e-33; SWISSPROT HIT: P13796, EVALUE 8.00e-34
EKDDIQRAECMLQQAERLGCRQFVTATDVVRGNPKLNLAFIANLFNRYPALHKPENQDIDWGALE

SEQ ID NO: 44731 - protein, 94 aa, Homo sapiens
  MAP TO AL137141.7; EXPRESSED IN ADULT LIVER, SIGNAL = 0.66; EXPRESSED IN BRAIN, SIGNAL = 0.48; EXPRESSED IN BONE MARROW, SIGNAL = 5.4; EXPRESSED IN LUNG, SIGNAL = 1.8; EXPRESSED IN PLACENTA, SIGNAL = 0.61; EXPRESSED IN FETAL LIVER, SIGNAL = 1.5; EST_HUMAN HIT: AW408694.1, EVALUE 4.00e-33; SWISSPROT HIT: Q09472, EVALUE 8.20e+00
ANRLQLPSRAPQSMSWFSGLCRAGYLLKRLAIKAKFNLGFPRTTSVAVTNCRQPSLSACCSMHSALWMSSFSCNAKGCLRAGSRLSMHKADCIM

SEQ ID NO: 44732 - protein, 47 aa, Homo sapiens
  MAP TO AC015578.4; EXPRESSED IN PLACENTA, SIGNAL = 0.98; EXPRESSED IN FETAL LIVER, SIGNAL = 0.81; EXPRESSED IN BONE MARROW, SIGNAL = 0.9; EXPRESSED IN LUNG, SIGNAL = 0.92; EXPRESSED IN ADULT LIVER, SIGNAL = 0.95; EXPRESSED IN BRAIN, SIGNAL = 0.93; EST_HUMAN HIT: AA506813.1, EVALUE 5.30e-02; SWISSPROT HIT: O10315, EVALUE 8.10e+00
NFSTVLHKSGKSRYLPCIRVQRQSFRLFLMDYDVSYKRFMNGLYCIE

SEQ ID NO: 44733 - protein, 28 aa, Homo sapiens [sequence omitted]

SEQ ID NO: 44734 - protein, 27 aa, Homo sapiens
  MAP TO AL121890.13; EXPRESSED IN LUNG, SIGNAL = 0.95; EXPRESSED IN ADULT LIVER, SIGNAL = 0.97; EXPRESSED IN BRAIN, SIGNAL = 0.81; EXPRESSED IN BONE MARROW, SIGNAL = 0.9; EXPRESSED IN PLACENTA, SIGNAL = 0.97; EXPRESSED IN FETAL LIVER, SIGNAL = 0.97; EST_HUMAN HIT: AA309457.1, EVALUE 2.70e-02
EWQWSSCPRVLNTQESADHVLRCTRND

SEQ ID NO: 44735 - protein, 25 aa, Homo sapiens
  MAP TO AC016487.4; EXPRESSED IN PLACENTA, SIGNAL = 0.77; EXPRESSED IN ADULT LIVER, SIGNAL = 0.75; EXPRESSED IN BRAIN, SIGNAL = 0.87; EXPRESSED IN BONE MARROW, SIGNAL = 0.66; EXPRESSED IN FETAL LIVER, SIGNAL = 0.76
LNQSDKLKKTFLTDKGYFDKAKLRT

SEQ ID NO: 44736 - protein, 34 aa, Homo sapiens
  MAP TO AL160281.2; EXPRESSED IN LUNG, SIGNAL = 0.85; EXPRESSED IN ADULT LIVER, SIGNAL = 0.74; EXPRESSED IN BRAIN, SIGNAL = 0.63; EXPRESSED IN BONE MARROW, SIGNAL = 0.69; EXPRESSED IN PLACENTA, SIGNAL = 0.87; EXPRESSED IN FETAL LIVER, SIGNAL = 0.77
MVTVTDGSAFLFSQKRIQAKRLGKENYMGDVSLS

SEQ ID NO: 44737 - protein, 33 aa, Homo sapiens
  MAP TO AL160281.2; EXPRESSED IN LUNG, SIGNAL = 0.85; EXPRESSED IN ADULT LIVER, SIGNAL = 0.74; EXPRESSED IN BRAIN, SIGNAL = 0.63; EXPRESSED IN BONE MARROW, SIGNAL = 0.69; EXPRESSED IN PLACENTA, SIGNAL = 0.87; EXPRESSED IN FETAL LIVER, SIGNAL = 0.77; SWISSPROT HIT: P57447, EVALUE 1.70e+00
WLQLQMVLHFCFLKNGFRPNDLEKKTTWVMCPS

SEQ ID NO: 44738 - protein, 38 aa, Homo sapiens
  MAP TO AL138702.3; EXPRESSED IN PLACENTA, SIGNAL = 0.74; EXPRESSED IN ADULT LIVER, SIGNAL = 0.76; EXPRESSED IN FETAL LIVER, SIGNAL = 0.78; EXPRESSED IN BRAIN, SIGNAL = 0.76; EXPRESSED IN BONE MARROW, SIGNAL = 0.72
LLPLSNLTARNRDDRVDSNCRLQPPGQDGDEGQKVPVK

SEQ ID NO: 44739 - protein, 39 aa, Homo sapiens
  MAP TO AC016282.3; EXPRESSED IN LUNG, SIGNAL = 0.96; EXPRESSED IN ADULT LIVER, SIGNAL =   1; EXPRESSED IN FETAL LIVER, SIGNAL = 0.85; EXPRESSED IN BRAIN, SIGNAL = 0.89; EXPRESSED IN PLACENTA, SIGNAL = 0.9; EXPRESSED IN BONE MARROW, SIGNAL = 0.91
CYCLGLMIAMFPIHSLAKEFLQHLMQCFSSVLIMRSAQC

SEQ ID NO: 44740 - protein, 61 aa, Homo sapiens
  MAP TO AC016057.3; EXPRESSED IN ADULT LIVER, SIGNAL = 0.72; EXPRESSED IN PLACENTA, SIGNAL = 0.59; EXPRESSED IN BRAIN, SIGNAL = 0.53; EXPRESSED IN BONE MARROW, SIGNAL = 0.52; SWISSPROT HIT: Q13563, EVALUE 2.00e+00; EST_HUMAN HIT: BF570694.1, EVALUE 4.00e-16
DPFSSPLLSIIQTFSMMLGDINYRESFLEPYLRNELAHPVLSFAQLVSFTIFVPIVLMNLL

SEQ ID NO: 44741 - protein, 33 aa, Homo sapiens
  MAP TO AL121931.9; EXPRESSED IN BRAIN, SIGNAL = 0.64; EXPRESSED IN BONE MARROW, SIGNAL = 0.56; EXPRESSED IN PLACENTA, SIGNAL = 0.54; EXPRESSED IN FETAL LIVER, SIGNAL = 0.85; EST_HUMAN HIT: AW836842.1, EVALUE 1.10e+00
MCHVSSHDNFTASTIRIPENQCTKQHWGMLGEG

SEQ ID NO: 44742 - protein, 33 aa, Homo sapiens
  MAP TO AL121931.9; EXPRESSED IN BRAIN, SIGNAL = 0.64; EXPRESSED IN BONE MARROW, SIGNAL = 0.56; EXPRESSED IN PLACENTA, SIGNAL = 0.54; EXPRESSED IN FETAL LIVER, SIGNAL = 0.85; EST_HUMAN HIT: AW836842.1, EVALUE 2.60e+00
CVMSLHMTTSLLAQSGFQKTSALNNIGGCWEKV

SEQ ID NO: 44743 - protein, 23 aa, Homo sapiens
  MAP TO AC015474.3; EXPRESSED IN PLACENTA, SIGNAL = 0.88; EXPRESSED IN ADULT LIVER, SIGNAL = 0.88; EXPRESSED IN BRAIN, SIGNAL = 0.69; EXPRESSED IN FETAL LIVER, SIGNAL = 0.81; EXPRESSED IN BONE MARROW, SIGNAL = 0.77
WTMSWKKMRLEASLTKTSMTKPK

SEQ ID NO: 44744 - protein, 36 aa, Homo sapiens
  MAP TO AC009699.6; EXPRESSED IN PLACENTA, SIGNAL = 0.76; EXPRESSED IN ADULT LIVER, SIGNAL = 0.85; EXPRESSED IN FETAL LIVER, SIGNAL = 0.69; EXPRESSED IN BRAIN, SIGNAL = 0.72; EXPRESSED IN BONE MARROW, SIGNAL = 0.7; EST_HUMAN HIT: AA442459.1, EVALUE 9.70e+00
NIIQLLEGFIHHGAWQMAWRAWHFKFILMESIEGLR

SEQ ID NO: 44745 - protein, 27 aa, Homo sapiens
  MAP TO AC009699.6; EXPRESSED IN PLACENTA, SIGNAL = 0.76; EXPRESSED IN ADULT LIVER, SIGNAL = 0.85; EXPRESSED IN FETAL LIVER, SIGNAL = 0.69; EXPRESSED IN BRAIN, SIGNAL = 0.72; EXPRESSED IN BONE MARROW, SIGNAL = 0.7
TSSSSWRGSSIMEPGRWLGVLGISNLY

SEQ ID NO: 44746 - protein, 61 aa, Homo sapiens
  MAP TO AC007923.2; EXPRESSED IN LUNG, SIGNAL = 1.1; EXPRESSED IN PLACENTA, SIGNAL = 0.7; EXPRESSED IN BRAIN, SIGNAL = 0.73; EXPRESSED IN FETAL LIVER, SIGNAL = 0.96; EXPRESSED IN ADULT LIVER, SIGNAL = 1.5; EXPRESSED IN BONE MARROW, SIGNAL = 1.5; EST_HUMAN HIT: BE168410.1, EVALUE 3.00e-14; SWISSPROT HIT: P03355, EVALUE 7.00e-09
MAQDLDHFSSPGTLVLQYVDDLLLATSLEASCQQATLDLLNFLANQGYKASRSKAQLYLQQ

SEQ ID NO: 44747 - protein, 60 aa, Homo sapiens
  MAP TO AC022216.3; EXPRESSED IN PLACENTA, SIGNAL = 1.1; EXPRESSED IN FETAL LIVER, SIGNAL = 0.84; EXPRESSED IN BRAIN, SIGNAL = 0.57; EXPRESSED IN ADULT LIVER, SIGNAL = 0.83; EXPRESSED IN BONE MARROW, SIGNAL = 0.68; EST_HUMAN HIT: AL041786.1, EVALUE 7.00e-05; SWISSPROT HIT: P24043, EVALUE 3.00e-29
IHISLINGRPSADDPSPELLEFTSARYIRLRFQRIRTLNADLMMFAHKDPREIDPIVTRR

SEQ ID NO: 44748 - protein, 39 aa, Homo sapiens
  MAP TO AC005481.3; EXPRESSED IN ADULT LIVER, SIGNAL = 0.63; EXPRESSED IN BRAIN, SIGNAL = 0.64; EXPRESSED IN FETAL LIVER, SIGNAL = 0.67; EXPRESSED IN BONE MARROW, SIGNAL = 0.62
VPDHDVIASTSSFNLGIPLCRTQELPTIDAINPHRAGWR

SEQ ID NO: 44749 - protein, 31 aa, Homo sapiens
  MAP TO AC005481.3; EXPRESSED IN ADULT LIVER, SIGNAL = 0.63; EXPRESSED IN BRAIN, SIGNAL = 0.64; EXPRESSED IN FETAL LIVER, SIGNAL = 0.67; EXPRESSED IN BONE MARROW, SIGNAL = 0.62; SWISSPROT HIT: Q10441, EVALUE 8.50e+00; EST_HUMAN HIT: H65278.1, EVALUE 2.60e+00
TSLTTTSLLPRHPSTWGSLCAEHRSCPPSMP

SEQ ID NO: 44750 - protein, 92 aa, Homo sapiens
  MAP TO AC010162.6; EXPRESSED IN LUNG, SIGNAL = 1.2; EXPRESSED IN ADULT LIVER, SIGNAL = 0.87; EXPRESSED IN BRAIN, SIGNAL =   1; EXPRESSED IN BONE MARROW, SIGNAL =   1; EXPRESSED IN PLACENTA, SIGNAL = 1.9; EXPRESSED IN FETAL LIVER, SIGNAL = 1.3; SWISSPROT HIT: P56117, EVALUE 3.50e-01; EST_HUMAN HIT: R99160.1, EVALUE 1.00e-04
NVSFQMQEVWREALILLYPAQLSTAQLLQSTKQTLGQLAEWDPYLTPYAELYSKQIKTSMSELKLTFLEDNIRIYLHDPRLSNGFLDVTPTA

SEQ ID NO: 44751 - protein, 44 aa, Homo sapiens
  MAP TO AL161426.2; EXPRESSED IN PLACENTA, SIGNAL = 0.82; EXPRESSED IN BONE MARROW, SIGNAL = 0.76; EXPRESSED IN ADULT LIVER, SIGNAL = 0.76; EXPRESSED IN FETAL LIVER, SIGNAL = 0.87; EXPRESSED IN BRAIN, SIGNAL = 0.69; SWISSPROT HIT: P36389, EVALUE 9.50e-01; EST_HUMAN HIT: N87558.1, EVALUE 1.00e-15
QPNPRVYPCPHEDAVLPILSGASHCEALQQLLSQRHEGLLGKSG

SEQ ID NO: 44752 - protein, 35 aa, Homo sapiens
  MAP TO AC018730.3; EXPRESSED IN PLACENTA, SIGNAL = 0.5; EXPRESSED IN BONE MARROW, SIGNAL = 0.52; EXPRESSED IN ADULT LIVER, SIGNAL = 0.54; EXPRESSED IN BRAIN, SIGNAL = 0.47; EST_HUMAN HIT: BE439524.1, EVALUE 1.10e-02; SWISSPROT HIT: Q10025, EVALUE 6.40e+00
GTICGSFPAYLLDSHPDSQGILWTPLGPWTWFSPS

SEQ ID NO: 44753 - protein, 52 aa, Homo sapiens
  MAP TO AL133377.4; EXPRESSED IN BONE MARROW, SIGNAL =   1; EXPRESSED IN PLACENTA, SIGNAL = 1.1; EXPRESSED IN ADULT LIVER, SIGNAL = 1.2; EXPRESSED IN FETAL LIVER, SIGNAL =   1; EXPRESSED IN LUNG, SIGNAL = 1.2; EXPRESSED IN BRAIN, SIGNAL = 0.92; EST_HUMAN HIT: BE158936.1, EVALUE 5.70e-01
VGAESAMFSTLLVLNNKMKMKKKKMKEEEEKEKKEEEEEEEEEERRKEEDDF

SEQ ID NO: 44754 - protein, 43 aa, Homo sapiens
  MAP TO AC019194.2; EXPRESSED IN ADULT LIVER, SIGNAL = 0.55; EXPRESSED IN BRAIN, SIGNAL = 0.48; EXPRESSED IN BONE MARROW, SIGNAL = 0.49; EXPRESSED IN PLACENTA, SIGNAL = 0.64; EST_HUMAN HIT: BF514666.1, EVALUE 3.10e+00; SWISSPROT HIT: Q9WXU1, EVALUE 1.60e+00
FPEILLQAASKMARTLPTKEFLWAVFQSVRNSSDKIPSYDPMP

SEQ ID NO: 44755 - protein, 43 aa, Homo sapiens
  MAP TO AC019194.2; EXPRESSED IN ADULT LIVER, SIGNAL = 0.55; EXPRESSED IN BRAIN, SIGNAL = 0.48; EXPRESSED IN BONE MARROW, SIGNAL = 0.49; EXPRESSED IN PLACENTA, SIGNAL = 0.64; EST_HUMAN HIT: AA283201.1, EVALUE 7.00e+00; SWISSPROT HIT: O27719, EVALUE 1.20e+00
FLRSFCKQLPRWPGPCPLKNSSGLSFSLFGTAVIRSPAMTLCL

SEQ ID NO: 44756 - protein, 32 aa, Homo sapiens
  MAP TO AC016109.3; EXPRESSED IN PLACENTA, SIGNAL = 0.6; EXPRESSED IN FETAL LIVER, SIGNAL = 0.65; EXPRESSED IN BRAIN, SIGNAL = 0.47; EXPRESSED IN BONE MARROW, SIGNAL = 0.53
MKQKSQMCQTLGISQGETMPSSPLLLHLCTKI

SEQ ID NO: 44757 - protein, 75 aa, Homo sapiens
  MAP TO AL139824.7; EXPRESSED IN LUNG, SIGNAL = 0.84; EXPRESSED IN PLACENTA, SIGNAL = 0.81; EXPRESSED IN ADULT LIVER, SIGNAL = 0.73; EXPRESSED IN BRAIN, SIGNAL = 0.57; EXPRESSED IN BONE MARROW, SIGNAL = 0.73; EXPRESSED IN FETAL LIVER, SIGNAL = 0.7; SWISSPROT HIT: P48128, EVALUE 6.20e+00; EST_HUMAN HIT: AI254396.1, EVALUE 3.00e-09
GGHGPTAYDREATEGLPHQLLATIWQEPPGTNSMSPYILLRHLFSPKLQFEALERKTRSEGSRGRRQQKSRCTAQ

SEQ ID NO: 44758 - protein, 33 aa, Homo sapiens
  MAP TO AL139824.7; EXPRESSED IN LUNG, SIGNAL = 0.84; EXPRESSED IN PLACENTA, SIGNAL = 0.81; EXPRESSED IN ADULT LIVER, SIGNAL = 0.73; EXPRESSED IN BRAIN, SIGNAL = 0.57; EXPRESSED IN BONE MARROW, SIGNAL = 0.73; EXPRESSED IN FETAL LIVER, SIGNAL = 0.7; EST_HUMAN HIT: AI344244.1, EVALUE 2.00e-03
EDMVPQLMIGKQQRGCPTSCWLQFGKSHLGLIQ

SEQ ID NO: 44759 - protein, 71 aa, Homo sapiens
  MAP TO AL121713.24; EXPRESSED IN ADULT LIVER, SIGNAL = 0.99; EXPRESSED IN BONE MARROW, SIGNAL = 1.6; EXPRESSED IN BRAIN, SIGNAL = 1.6; EXPRESSED IN LUNG, SIGNAL = 1.2; EXPRESSED IN PLACENTA, SIGNAL = 0.78; EXPRESSED IN FETAL LIVER, SIGNAL = 1.6; EST_HUMAN HIT: AA179308.1, EVALUE 2.00e-15
HDDRDDGVDYWAKRGRGRGTFQRGRGRFNFKKSGSSPKWTHDKYQGDGIVEDEEETMENNEEKKDRRKEEK

SEQ ID NO: 44760 - protein, 40 aa, Homo sapiens
  MAP TO AC009487.3; EXPRESSED IN PLACENTA, SIGNAL = 1.1; EXPRESSED IN ADULT LIVER, SIGNAL = 1.1; EXPRESSED IN FETAL LIVER, SIGNAL = 0.95; EXPRESSED IN BONE MARROW, SIGNAL = 0.93; EXPRESSED IN LUNG, SIGNAL = 1.1; EXPRESSED IN BRAIN, SIGNAL = 1.1; SWISSPROT HIT: P43588, EVALUE 2.00e-04; EST_HUMAN HIT: BE312675.1, EVALUE 1.00e-17
LNLHKKSWMEGLTLQDYSEHCKHNESVVKEMLELAKNYNK

SEQ ID NO: 44761 - protein, 25 aa, Homo sapiens
  MAP TO AC009466.2; EXPRESSED IN PLACENTA, SIGNAL = 0.68; EXPRESSED IN BRAIN, SIGNAL = 0.61; EXPRESSED IN BONE MARROW, SIGNAL = 0.48; EXPRESSED IN FETAL LIVER, SIGNAL = 0.73
AFLASVEKDAKERAKRRRENKVLAD

SEQ ID NO: 44762 - protein, 26 aa, Homo sapiens
  MAP TO AC009466.2; EXPRESSED IN PLACENTA, SIGNAL = 0.68; EXPRESSED IN BRAIN, SIGNAL = 0.61; EXPRESSED IN BONE MARROW, SIGNAL = 0.48; EXPRESSED IN FETAL LIVER, SIGNAL = 0.73; EST_HUMAN HIT: AU141688.1, EVALUE 4.00e-10
RPSWHLWRRMQRNEPREEGKTKSWRM

SEQ ID NO: 44763 - protein, 104 aa, Homo sapiens
  MAP TO AL136528.9; EXPRESSED IN PLACENTA, SIGNAL = 0.68; EXPRESSED IN FETAL LIVER, SIGNAL = 0.65; EXPRESSED IN BONE MARROW, SIGNAL = 0.67; EXPRESSED IN ADULT LIVER, SIGNAL = 0.83; EXPRESSED IN BRAIN, SIGNAL = 0.68; EST_HUMAN HIT: AW072395.1, EVALUE 9.00e-56; SWISSPROT HIT: P29230, EVALUE 3.00e-04
KCLFKALWDNTPTQFLYRGASWGSFRLGNNGAQDTSPQSMTVGDQNTPPLNMTIGDQNTSPQNMTVGDQNTPPQNMTVGDQNTPPQNMTVGDQNTPPLNMTVGD

SEQ ID NO: 44764 - protein, 75 aa, Homo sapiens
  MAP TO AC009311.2; EXPRESSED IN BONE MARROW, SIGNAL =   1; EXPRESSED IN LUNG, SIGNAL = 1.1; EXPRESSED IN ADULT LIVER, SIGNAL = 0.69; EXPRESSED IN BRAIN, SIGNAL = 0.99; EXPRESSED IN PLACENTA, SIGNAL = 0.8; EXPRESSED IN FETAL LIVER, SIGNAL = 0.85; EST_HUMAN HIT: AA448801.1, EVALUE 3.00e-42; SWISSPROT HIT: P98066, EVALUE 7.00e-43
KECGGVFTDPKQIFKSPGFPNEYEDNQICYWHIRLKYGQRIHLSFLDFDLEDDPGCLADYVEIYDSYDDVHGFVG

SEQ ID NO: 44765 - protein, 26 aa, Homo sapiens
  MAP TO AC025539.2; EXPRESSED IN PLACENTA, SIGNAL = 0.69; EXPRESSED IN FETAL LIVER, SIGNAL = 0.48; EXPRESSED IN BRAIN, SIGNAL = 0.51; EXPRESSED IN BONE MARROW, SIGNAL = 0.52; EXPRESSED IN ADULT LIVER, SIGNAL = 0.64
QSSSSSSSTIKQQCKVSLVIFSQPIL

SEQ ID NO: 44766 - protein, 38 aa, Homo sapiens
  MAP TO AL136111.8; EXPRESSED IN ADULT LIVER, SIGNAL = 0.69; EXPRESSED IN BONE MARROW, SIGNAL = 0.69; EXPRESSED IN BRAIN, SIGNAL = 0.8; EXPRESSED IN PLACENTA, SIGNAL = 0.6; EXPRESSED IN FETAL LIVER, SIGNAL = 0.69; EST_HUMAN HIT: BE936943.1, EVALUE 9.60e+00
SSQNCASAVLQVYVGECLWGSEDVEMLVLLGLKANYNQ

SEQ ID NO: 44767 - protein, 32 aa, Homo sapiens
  MAP TO AL136111.8; EXPRESSED IN ADULT LIVER, SIGNAL = 0.69; EXPRESSED IN BONE MARROW, SIGNAL = 0.69; EXPRESSED IN BRAIN, SIGNAL = 0.8; EXPRESSED IN PLACENTA, SIGNAL = 0.6; EXPRESSED IN FETAL LIVER, SIGNAL = 0.69; EST_HUMAN HIT: BF697158.1, EVALUE 2.60e+00
GPARIVPLQSSRCMWGNVCGALKMWRCWFCWA

SEQ ID NO: 44768 - protein, 67 aa, Homo sapiens
  MAP TO AC024060.2; EXPRESSED IN PLACENTA, SIGNAL = 0.63; EXPRESSED IN FETAL LIVER, SIGNAL = 0.89; EXPRESSED IN BONE MARROW, SIGNAL = 0.55; EXPRESSED IN BRAIN, SIGNAL = 0.62; SWISSPROT HIT: P36774, EVALUE 1.40e-02; EST_HUMAN HIT: AW960705.1, EVALUE 3.00e-33
YLGADMEEFHGRTLHDDDSCQVIPVLPQVMMILIPGQTLPLQLFHPQEVSMVRNLIQKDRTFAVLAY

SEQ ID NO: 44769 - protein, 28 aa, Homo sapiens
  MAP TO AC011660.4; EXPRESSED IN FETAL LIVER, SIGNAL = 0.53; EXPRESSED IN BONE MARROW, SIGNAL = 0.48; EXPRESSED IN ADULT LIVER, SIGNAL = 0.58; EXPRESSED IN BRAIN, SIGNAL = 0.56
VKNDKHYCVKSKLIELNTIRATSGQVIT

SEQ ID NO: 44770 - protein, 116 aa, Homo sapiens
  MAP TO AL121586.28; EXPRESSED IN PLACENTA, SIGNAL = 1.1; EXPRESSED IN FETAL LIVER, SIGNAL = 1.1; EXPRESSED IN LUNG, SIGNAL = 1.3; EXPRESSED IN BONE MARROW, SIGNAL = 1.1; EXPRESSED IN ADULT LIVER, SIGNAL = 1.1; EXPRESSED IN BRAIN, SIGNAL = 1.1; EST_HUMAN HIT: T85323.1, EVALUE 7.30e+00
MELLRQEVKEKEADFLAQEAQLLEELEASHITEQQLRASLWAQEAKAAQLQLRLRSTESQLEALAAEQQPGNQAQAQAQLASLYSALQQALGSVCESRPELSGGGDSAPSVWGLEP

SEQ ID NO: 44771 - protein, 26 aa, Homo sapiens
  MAP TO AL161627.2; EXPRESSED IN ADULT LIVER, SIGNAL = 0.64; EXPRESSED IN PLACENTA, SIGNAL = 0.57; EXPRESSED IN FETAL LIVER, SIGNAL = 0.75; EXPRESSED IN BRAIN, SIGNAL = 1.1; EXPRESSED IN BONE MARROW, SIGNAL = 0.83; EST_HUMAN HIT: W01616.1, EVALUE 2.40e-01
CLEDITVKDGLSSLKDLEKLYQLGIQ

SEQ ID NO: 44772 - protein, 56 aa, Homo sapiens
  MAP TO AL121889.3; EXPRESSED IN LUNG, SIGNAL = 1.2; EXPRESSED IN PLACENTA, SIGNAL = 1.3; EXPRESSED IN ADULT LIVER, SIGNAL = 1.5; EXPRESSED IN FETAL LIVER, SIGNAL = 1.5; EXPRESSED IN BRAIN, SIGNAL = 1.2; EXPRESSED IN BONE MARROW, SIGNAL = 1.6; SWISSPROT HIT: Q08234, EVALUE 2.70e+00; EST_HUMAN HIT: BF037791.1, EVALUE 2.00e-25
VIAVVMDVFTDIDIFRDLQEICRKQGVAVYILLDQALLSQFLDMCMDLKVHPEQEK

SEQ ID NO: 44773 - protein, 59 aa, Homo sapiens
  MAP TO AC018780.3; EXPRESSED IN BONE MARROW, SIGNAL = 1.4; EXPRESSED IN LUNG, SIGNAL = 1.2; EXPRESSED IN PLACENTA, SIGNAL = 0.9; EXPRESSED IN ADULT LIVER, SIGNAL =   1; EXPRESSED IN BRAIN, SIGNAL = 1.2; EXPRESSED IN FETAL LIVER, SIGNAL = 0.9; EST_HUMAN HIT: AA354915.1, EVALUE 1.00e-27; SWISSPROT HIT: Q06245, EVALUE 2.70e+00
KGLSGKRTKTENSGEALAKVEDSNPQKTSATKNCLKNLSSHWLMKSEPESRLEKGVDVK

SEQ ID NO: 44774 - protein, 17 aa, Homo sapiens
  MAP TO AC018780.3; EXPRESSED IN BONE MARROW, SIGNAL = 1.4; EXPRESSED IN LUNG, SIGNAL = 1.2; EXPRESSED IN PLACENTA, SIGNAL = 0.9; EXPRESSED IN ADULT LIVER, SIGNAL =   1; EXPRESSED IN BRAIN, SIGNAL = 1.2; EXPRESSED IN FETAL LIVER, SIGNAL = 0.9; EST_HUMAN HIT: BE884092.1, EVALUE 1.00e-02
TRDYQENAPKLRTQVRH

SEQ ID NO: 44775 - protein, 26 aa, Homo sapiens
  MAP TO AL139352.8; EXPRESSED IN ADULT LIVER, SIGNAL = 0.89; EXPRESSED IN PLACENTA, SIGNAL = 1.1; EXPRESSED IN FETAL LIVER, SIGNAL = 0.84; EXPRESSED IN BRAIN, SIGNAL = 1.2; EXPRESSED IN LUNG, SIGNAL = 0.96; EXPRESSED IN BONE MARROW, SIGNAL = 0.7; EST_HUMAN HIT: BE546032.1, EVALUE 3.00e-09
MLSPGPEIFLSSRTICSPLWCVWGAV

SEQ ID NO: 44776 - protein, 33 aa, Homo sapiens
  MAP TO AC018584.3; EXPRESSED IN BRAIN, SIGNAL = 0.48; EXPRESSED IN PLACENTA, SIGNAL = 0.81; EXPRESSED IN FETAL LIVER, SIGNAL =   1
NISSSSWDDEASSLGKEEHQNQRGQLGGYCNIS

SEQ ID NO: 44777 - protein, 25 aa, Homo sapiens
  MAP TO AC018584.3; EXPRESSED IN BRAIN, SIGNAL = 0.48; EXPRESSED IN PLACENTA, SIGNAL = 0.81; EXPRESSED IN FETAL LIVER, SIGNAL =   1
TSPAAAGMMKHLLLAKKNTKIREAS

SEQ ID NO: 44778 - protein, 29 aa, Homo sapiens
  MAP TO AC018367.3; EXPRESSED IN ADULT LIVER, SIGNAL = 0.86; EXPRESSED IN BRAIN, SIGNAL = 0.64; EXPRESSED IN BONE MARROW, SIGNAL = 0.73; EXPRESSED IN PLACENTA, SIGNAL = 0.91; EXPRESSED IN FETAL LIVER, SIGNAL = 0.75
TNITHVSKAILDHLIPVKLLDGCQYMKNP

SEQ ID NO: 44779 - protein, 44 aa, Homo sapiens
  MAP TO AC025221.2; EXPRESSED IN PLACENTA, SIGNAL = 0.66; EXPRESSED IN ADULT LIVER, SIGNAL = 0.61; EXPRESSED IN FETAL LIVER, SIGNAL = 0.75; EXPRESSED IN BONE MARROW, SIGNAL = 0.45; EXPRESSED IN BRAIN, SIGNAL = 0.5; EST_HUMAN HIT: BE093554.1, EVALUE 1.00e-18; SWISSPROT HIT: P35573, EVALUE 1.00e-19
VSLDPHAQVAVGILRNHLTQFSPHFKSGSLAVDNADPILKIPFA

SEQ ID NO: 44780 - protein, 39 aa, Homo sapiens
  MAP TO AC011294.3; EXPRESSED IN ADULT LIVER, SIGNAL = 0.74; EXPRESSED IN PLACENTA, SIGNAL = 0.75; EXPRESSED IN FETAL LIVER, SIGNAL = 0.68; EXPRESSED IN BRAIN, SIGNAL = 0.58; EXPRESSED IN BONE MARROW, SIGNAL = 0.64; SWISSPROT HIT: P17636, EVALUE 9.60e-01
SLALLRVHGTSAEKPVDITGYHVAFAFADEKSDAILNAI

SEQ ID NO: 44781 - protein, 17 aa, Homo sapiens
  MAP TO AL136962.6; EXPRESSED IN ADULT LIVER, SIGNAL = 1.2; EXPRESSED IN LUNG, SIGNAL = 1.5; EXPRESSED IN PLACENTA, SIGNAL = 1.2; EXPRESSED IN FETAL LIVER, SIGNAL = 1.1; EXPRESSED IN BONE MARROW, SIGNAL = 1.3; EXPRESSED IN BRAIN, SIGNAL = 1.1
QRPSSLLSSSQISSAML

SEQ ID NO: 44782 - protein, 23 aa, Homo sapiens
  MAP TO AL138914.5; EXPRESSED IN BRAIN, SIGNAL = 1.3; EXPRESSED IN BONE MARROW, SIGNAL = 1.1; EXPRESSED IN LUNG, SIGNAL = 1.2; EXPRESSED IN PLACENTA, SIGNAL = 1.3; EXPRESSED IN ADULT LIVER, SIGNAL = 1.3; EXPRESSED IN FETAL LIVER, SIGNAL = 1.4; EST_HUMAN HIT: AA502723.1, EVALUE 2.10e+00
SKTRMPTLTTFIQNGIGRPTKIK

SEQ ID NO: 44783 - protein, 26 aa, Homo sapiens
  MAP TO AL121905.10; EXPRESSED IN PLACENTA, SIGNAL = 0.67; EXPRESSED IN ADULT LIVER, SIGNAL = 0.99; EXPRESSED IN BRAIN, SIGNAL = 2.8; EXPRESSED IN BONE MARROW, SIGNAL = 1.2; EXPRESSED IN LUNG, SIGNAL =   1; EXPRESSED IN FETAL LIVER, SIGNAL = 1.2; EST_HUMAN HIT: AW861560.1, EVALUE 3.00e-07
RIRAGRSGSSTSMAGLKWASPVTERA

SEQ ID NO: 44784 - protein, 49 aa, Homo sapiens
  MAP TO AL137225.7; EXPRESSED IN FETAL LIVER, SIGNAL = 0.51; EXPRESSED IN PLACENTA, SIGNAL = 0.68; EXPRESSED IN BONE MARROW, SIGNAL = 0.55; EXPRESSED IN ADULT LIVER, SIGNAL = 0.77; EXPRESSED IN BRAIN, SIGNAL = 0.6
FMGGNMEIIVALNITATNRLLRDEETGLPVFKSEGCEVILVNVKTNLPS

SEQ ID NO: 44785 - protein, 38 aa, Homo sapiens
  MAP TO AL161743.2; EXPRESSED IN LUNG, SIGNAL = 1.2; EXPRESSED IN ADULT LIVER, SIGNAL = 1.5; EXPRESSED IN FETAL LIVER, SIGNAL = 1.1; EXPRESSED IN BRAIN, SIGNAL =   1; EXPRESSED IN PLACENTA, SIGNAL = 1.1; EXPRESSED IN BONE MARROW, SIGNAL = 1.1; EST_HUMAN HIT: AL120347.1, EVALUE 3.20e+00
MRPTDQETAAIEKSLLLTVPKGWDMPCYARPHGDAPAL

SEQ ID NO: 44786 - protein, 58 aa, Homo sapiens
  MAP TO AC016648.3; EXPRESSED IN PLACENTA, SIGNAL = 0.9; EXPRESSED IN FETAL LIVER, SIGNAL = 0.74; EXPRESSED IN ADULT LIVER, SIGNAL = 0.92; EXPRESSED IN BRAIN, SIGNAL = 0.78; EXPRESSED IN BONE MARROW, SIGNAL = 0.73; EST_HUMAN HIT: BE394211.1, EVALUE 4.00e-19
EVPLPPQQVHLQVKNFFRFSVLGTKYFLLVVFLLHQMNFCLAYLRLRLSQFQSPLMQT

SEQ ID NO: 44787 - protein, 42 aa, Homo sapiens
  MAP TO AL158150.2; EXPRESSED IN FETAL LIVER, SIGNAL = 0.58; EXPRESSED IN PLACENTA, SIGNAL = 0.69; EXPRESSED IN BONE MARROW, SIGNAL = 0.56; EXPRESSED IN ADULT LIVER, SIGNAL = 0.85; EXPRESSED IN BRAIN, SIGNAL = 0.61; SWISSPROT HIT: P22239, EVALUE 3.70e+00; EST_HUMAN HIT: AI750970.1, EVALUE 7.00e-17
KATSENVTNDSDQHGEACSHSRYRKHHQNSAGSECDNQLPGC

SEQ ID NO: 44788 - protein, 77 aa, Homo sapiens
  MAP TO AC024972.2; EXPRESSED IN PLACENTA, SIGNAL = 0.82; EXPRESSED IN FETAL LIVER, SIGNAL =   1; EXPRESSED IN BONE MARROW, SIGNAL = 0.77; EXPRESSED IN ADULT LIVER, SIGNAL = 0.65; EXPRESSED IN BRAIN, SIGNAL = 1.3; EST_HUMAN HIT: BE439625.1, EVALUE 2.00e-35; SWISSPROT HIT: Q88435, EVALUE 9.20e-01
HTGFSPLPPPRHVQLNHVEFEDQDDEARVQYDGFRPGMYIRVEIENVPCEFVQNFDPHYPIILGGLGNSEGNVGHVQ

SEQ ID NO: 44789 - protein, 26 aa, Homo sapiens
  MAP TO AL137022.6; EXPRESSED IN PLACENTA, SIGNAL = 0.56; EXPRESSED IN BRAIN, SIGNAL = 0.62; EXPRESSED IN BONE MARROW, SIGNAL = 0.6; EXPRESSED IN ADULT LIVER, SIGNAL = 0.67; EXPRESSED IN FETAL LIVER, SIGNAL = 0.52
LEEKTKVVTTTTTVTAVSVSALCRHY

SEQ ID NO: 44790 - protein, 31 aa, Homo sapiens
  MAP TO AC016575.4; EXPRESSED IN PLACENTA, SIGNAL = 0.82; EXPRESSED IN ADULT LIVER, SIGNAL = 1.1; EXPRESSED IN FETAL LIVER, SIGNAL = 0.82; EXPRESSED IN BRAIN, SIGNAL = 0.84; EXPRESSED IN BONE MARROW, SIGNAL = 0.77; EXPRESSED IN LUNG, SIGNAL =   1
IPEFTERISLLTDSTTVNSSAKKVGQGWMKP

SEQ ID NO: 44791 - protein, 28 aa, Homo sapiens
  MAP TO AC016575.4; EXPRESSED IN PLACENTA, SIGNAL = 0.82; EXPRESSED IN ADULT LIVER, SIGNAL = 1.1; EXPRESSED IN FETAL LIVER, SIGNAL = 0.82; EXPRESSED IN BRAIN, SIGNAL = 0.84; EXPRESSED IN BONE MARROW, SIGNAL = 0.77; EXPRESSED IN LUNG, SIGNAL =   1
FQSSQKGSACSQTQQQSTQVPRKWGKAG

SEQ ID NO: 44792 - protein, 160 aa, Homo sapiens
  MAP TO AL121713.24; EXPRESSED IN BONE MARROW, SIGNAL = 1.1; EXPRESSED IN PLACENTA, SIGNAL = 0.53; EXPRESSED IN ADULT LIVER, SIGNAL = 0.56; EXPRESSED IN FETAL LIVER, SIGNAL = 1.5; EXPRESSED IN BRAIN, SIGNAL = 0.95; EST_HUMAN HIT: AI367350.1, EVALUE 3.00e-64; SWISSPROT HIT: P41695, EVALUE 4.80e-01
FTDEESRVFLLDRGNTRDKEASKEKGSEKGRAEGEWEDQEALDYFSDKESGKQKFNDSEGDDTEETEDYRQFRKSVLADQGKSFATASHRNTEEEGLKYKSKVSLKGNRESDGFREEKNYKLKETGYVVERPSTTKDKHKEEDKNSERITVKKETQSPEQ

SEQ ID NO: 44793 - protein, 64 aa, Homo sapiens
  MAP TO AC026412.1; EXPRESSED IN PLACENTA, SIGNAL = 1.2; EXPRESSED IN FETAL LIVER, SIGNAL = 1.1; EXPRESSED IN BONE MARROW, SIGNAL = 1.1; EXPRESSED IN LUNG, SIGNAL = 1.2; EXPRESSED IN ADULT LIVER, SIGNAL = 1.2; EXPRESSED IN BRAIN, SIGNAL = 1.1; EST_HUMAN HIT: H13314.1, EVALUE 4.00e-31; SWISSPROT HIT: P28166, EVALUE 3.30e-01
VTVHPERRWLWGSHACCGAAPGDGHPVSPGAGAACVLRNCGGCSLLFASYKPLPDYIFLFNLAG

SEQ ID NO: 44794 - protein, 130 aa, Homo sapiens
  MAP TO AC019083.5; EXPRESSED IN PLACENTA, SIGNAL = 0.64; EXPRESSED IN ADULT LIVER, SIGNAL = 0.54; EXPRESSED IN FETAL LIVER, SIGNAL = 0.52; EXPRESSED IN BRAIN, SIGNAL = 0.54; EXPRESSED IN BONE MARROW, SIGNAL = 0.57; EST_HUMAN HIT: BF679133.1, EVALUE 4.50e+00; SWISSPROT HIT: Q92350, EVALUE 1.00e-03
NYLIKALTCVDMTSPMVVSRIWMGTSFRLFHHLRRNARYSSRGHPVSAASTRESLPSHAIISETNEISSFSRNHESYLLVRLSRLEECLEVPASPDVLASPILPLILSATSDPLPTVTRSPAAKNHLGLQ

SEQ ID NO: 44795 - protein, 30 aa, Homo sapiens
  MAP TO AL118520.12; EXPRESSED IN BONE MARROW, SIGNAL = 1.2; EXPRESSED IN ADULT LIVER, SIGNAL =   1; EXPRESSED IN BRAIN, SIGNAL = 0.98; EXPRESSED IN LUNG, SIGNAL =   1; EXPRESSED IN PLACENTA, SIGNAL = 0.91; EXPRESSED IN FETAL LIVER, SIGNAL = 1.3; EST_HUMAN HIT: BE254164.1, EVALUE 2.00e-08
ALPFIVVKMKKAMRVLLMAQVDLATQDKIV

SEQ ID NO: 44796 - protein, 25 aa, Homo sapiens
  MAP TO AL118520.12; EXPRESSED IN BONE MARROW, SIGNAL = 1.2; EXPRESSED IN ADULT LIVER, SIGNAL =   1; EXPRESSED IN BRAIN, SIGNAL = 0.98; EXPRESSED IN LUNG, SIGNAL =   1; EXPRESSED IN PLACENTA, SIGNAL = 0.91; EXPRESSED IN FETAL LIVER, SIGNAL = 1.3
ILTRFCLVLPSLPVPSTTPSLLSSF

SEQ ID NO: 44797 - protein, 47 aa, Homo sapiens
  MAP TO AC026405.1; EXPRESSED IN PLACENTA, SIGNAL = 0.67; EXPRESSED IN ADULT LIVER, SIGNAL = 0.56; EXPRESSED IN FETAL LIVER, SIGNAL = 0.51; EXPRESSED IN BRAIN, SIGNAL = 0.45; EXPRESSED IN BONE MARROW, SIGNAL = 0.45
GLTYKREEAERNVVRKGGRVKKRGGAVLHRLPWQETSQSREICRKFS

SEQ ID NO: 44798 - protein, 39 aa, Homo sapiens
  MAP TO AC010905.3; EXPRESSED IN PLACENTA, SIGNAL = 1.1; EXPRESSED IN ADULT LIVER, SIGNAL = 1.4; EXPRESSED IN FETAL LIVER, SIGNAL = 1.1; EXPRESSED IN LUNG, SIGNAL = 1.3; EXPRESSED IN BRAIN, SIGNAL = 5.2; EXPRESSED IN BONE MARROW, SIGNAL = 1.2
DNVLAALTLGTSSASASTLAALEEPFSLLLHLVEAFEAG

SEQ ID NO: 44799 - protein, 57 aa, Homo sapiens
  MAP TO AL158088.6; EXPRESSED IN PLACENTA, SIGNAL = 0.86; EXPRESSED IN ADULT LIVER, SIGNAL = 0.82; EXPRESSED IN FETAL LIVER, SIGNAL = 0.76; EXPRESSED IN BRAIN, SIGNAL = 0.76; EXPRESSED IN BONE MARROW, SIGNAL = 0.64
REREKEKKKEEEEDEEEEERDCIIQLQQTLLVFCVIPTFTSLLTMKSQFYLGWKCTQ

SEQ ID NO: 44800 - protein, 55 aa, Homo sapiens
  MAP TO AL157396.2; EXPRESSED IN PLACENTA, SIGNAL = 0.58; EXPRESSED IN ADULT LIVER, SIGNAL = 0.61; EXPRESSED IN BRAIN, SIGNAL = 0.5; EXPRESSED IN BONE MARROW, SIGNAL = 0.48; SWISSPROT HIT: P13709, EVALUE 1.20e+00; EST_HUMAN HIT: AV731801.1, EVALUE 3.00e-07
LMVTTMQKPVIDSLKIKSNKLKHTTRENLLTTKEDSKKRSKELQNNQKISNEMTI

SEQ ID NO: 44801 - protein, 46 aa, Homo sapiens
  MAP TO AL133372.2; EXPRESSED IN LUNG, SIGNAL = 0.83; EXPRESSED IN PLACENTA, SIGNAL = 0.66; EXPRESSED IN ADULT LIVER, SIGNAL = 0.7; EXPRESSED IN BRAIN, SIGNAL = 0.64; EXPRESSED IN BONE MARROW, SIGNAL = 0.6
NVVMYKQDKFLRAIVLNDGCGIQSPMTCPLILMAVINEKIPTKVLH

SEQ ID NO: 44802 - protein, 69 aa, Homo sapiens
  MAP TO AC025516.2; EXPRESSED IN PLACENTA, SIGNAL =   1; EXPRESSED IN ADULT LIVER, SIGNAL = 1.1; EXPRESSED IN FETAL LIVER, SIGNAL = 0.82; EXPRESSED IN BRAIN, SIGNAL = 0.74; EXPRESSED IN LUNG, SIGNAL = 0.94; EXPRESSED IN BONE MARROW, SIGNAL = 0.87; SWISSPROT HIT: Q9WUQ1, EVALUE 4.00e-07; EST_HUMAN HIT: AW501874.1, EVALUE 4.20e+00
MNEDLNVMKERVLGHTSKNVPLKDERRHSRKKRLISYPRYIEIMVTADAKVVSAHGSNLQNYILTLMSI

SEQ ID NO: 44803 - protein, 30 aa, Homo sapiens
  MAP TO AL133386.3; EXPRESSED IN PLACENTA, SIGNAL = 1.1; EXPRESSED IN ADULT LIVER, SIGNAL = 0.82; EXPRESSED IN BRAIN, SIGNAL = 0.73; EXPRESSED IN BONE MARROW, SIGNAL = 0.66; EXPRESSED IN LUNG, SIGNAL = 0.84; EXPRESSED IN FETAL LIVER, SIGNAL = 0.51
RSVRAANKRKNQNRNKSSSHQDSSRMSSVG

SEQ ID NO: 44804 - protein, 41 aa, Homo sapiens
  MAP TO AC018761.2; EXPRESSED IN BONE MARROW, SIGNAL = 2.2; EXPRESSED IN PLACENTA, SIGNAL = 0.66; EXPRESSED IN ADULT LIVER, SIGNAL = 0.67; EXPRESSED IN FETAL LIVER, SIGNAL = 0.56; EXPRESSED IN BRAIN, SIGNAL = 0.56; EST_HUMAN HIT: AW969592.1, EVALUE 3.00e-17; SWISSPROT HIT: P78706, EVALUE 1.60e+00
SIDSSIRCWDCRSRRPEPVQTLDEARDGVSSVKVSDHEILA

SEQ ID NO: 44805 - protein, 32 aa, Homo sapiens
  MAP TO AC018761.2; EXPRESSED IN BONE MARROW, SIGNAL = 2.2; EXPRESSED IN PLACENTA, SIGNAL = 0.66; EXPRESSED IN ADULT LIVER, SIGNAL = 0.67; EXPRESSED IN FETAL LIVER, SIGNAL = 0.56; EXPRESSED IN BRAIN, SIGNAL = 0.56; EST_HUMAN HIT: BE299066.1, EVALUE 4.00e-12
ALLIPVSAVGIAAHGGLSQCRRWMRPEMACPV

SEQ ID NO: 44806 - protein, 28 aa, Homo sapiens
  MAP TO AC007957.34; EXPRESSED IN ADULT LIVER, SIGNAL = 0.74; EXPRESSED IN FETAL LIVER, SIGNAL = 0.61; EXPRESSED IN BRAIN, SIGNAL = 0.7; EXPRESSED IN BONE MARROW, SIGNAL = 0.56; EXPRESSED IN PLACENTA, SIGNAL = 0.78; EST_HUMAN HIT: AU125898.1, EVALUE 1.20e-02
PREERAPLGCPVTLARHRARVRQTRQGT

SEQ ID NO: 44807 - protein, 43 aa, Homo sapiens
  MAP TO AL138934.2; EXPRESSED IN BONE MARROW, SIGNAL = 1.2; EXPRESSED IN LUNG, SIGNAL = 1.1; EXPRESSED IN ADULT LIVER, SIGNAL = 1.3; EXPRESSED IN FETAL LIVER, SIGNAL = 0.94; EXPRESSED IN BRAIN, SIGNAL = 1.2; EXPRESSED IN PLACENTA, SIGNAL = 1.1; EST_HUMAN HIT: BE796798.1, EVALUE 4.10e+00; SWISSPROT HIT: P19137, EVALUE 2.00e-03
IKASFRTKVPEGLIVFAASPGNQEEYFALQLKKGRLYFLFDPQ

SEQ ID NO: 44808 - protein, 39 aa, Homo sapiens
  MAP TO AC015592.4; EXPRESSED IN PLACENTA, SIGNAL = 0.83; EXPRESSED IN FETAL LIVER, SIGNAL = 0.94; EXPRESSED IN BONE MARROW, SIGNAL = 0.74; EXPRESSED IN ADULT LIVER, SIGNAL = 0.86; EXPRESSED IN BRAIN, SIGNAL = 0.8; SWISSPROT HIT: P13983, EVALUE 4.90e+00; EST_HUMAN HIT: BF213478.1, EVALUE 6.40e-01
VKIRKARPRLTAPAGHTHSTPHQHLSPQHIISPILHITT

SEQ ID NO: 44809 - protein, 142 aa, Homo sapiens; identical to SEQ ID NO: 33327
  MAP TO AP001429.1; EXPRESSED IN LUNG, SIGNAL = 0.95; EXPRESSED IN FETAL LIVER, SIGNAL = 1.7; EXPRESSED IN BONE MARROW, SIGNAL = 1.4; EXPRESSED IN PLACENTA, SIGNAL = 0.84; EXPRESSED IN ADULT LIVER, SIGNAL = 1.6; EXPRESSED IN BRAIN, SIGNAL = 3.2; EST_HUMAN HIT: AA403192.1, EVALUE 2.00e-76; SWISSPROT HIT: P53804, EVALUE 9.00e-80

SEQ ID NO: 44810 - protein, 34 aa, Homo sapiens
  MAP TO AP001429.1; EXPRESSED IN LUNG, SIGNAL = 0.95; EXPRESSED IN FETAL LIVER, SIGNAL = 1.7; EXPRESSED IN BONE MARROW, SIGNAL = 1.4; EXPRESSED IN PLACENTA, SIGNAL = 0.84; EXPRESSED IN ADULT LIVER, SIGNAL = 1.6; EXPRESSED IN BRAIN, SIGNAL = 3.2; EST_HUMAN HIT: AA403192.1, EVALUE 4.00e-16; SWISSPROT HIT: P53792, EVALUE 3.80e+00
CYQVCPSTPAYIHPWPAFLLNISYQDQYQWCRLL

SEQ ID NO: 44811 - protein, 47 aa, Homo sapiens
  MAP TO AC026707.2; EXPRESSED IN ADULT LIVER, SIGNAL = 0.73; EXPRESSED IN BRAIN, SIGNAL = 0.67; EXPRESSED IN BONE MARROW, SIGNAL = 0.64; EXPRESSED IN PLACENTA, SIGNAL = 0.69; EXPRESSED IN FETAL LIVER, SIGNAL = 0.81; EST_HUMAN HIT: AI954540.1, EVALUE 3.00e-14
SQGNDIKVTAESTGEHASSLPLPLHQPPHWMDGLPVQHAVLHRFHGP

SEQ ID NO: 44812 - protein, 55 aa, Homo sapiens
  MAP TO AC021970.2; EXPRESSED IN PLACENTA, SIGNAL = 0.54; EXPRESSED IN FETAL LIVER, SIGNAL = 0.49; EXPRESSED IN BONE MARROW, SIGNAL = 0.45; EXPRESSED IN BRAIN, SIGNAL = 0.86; EST_HUMAN HIT: BF338204.1, EVALUE 6.30e+00; SWISSPROT HIT: Q9ZMW2, EVALUE 9.20e-01
VQLWLTHCCLKLLQSMLMGDVLEGNLMQCVEKEAKTLNPDLVILSRSSQLQFVDA

SEQ ID NO: 44813 - protein, 43 aa, Homo sapiens
  MAP TO AC009549.3; EXPRESSED IN ADULT LIVER, SIGNAL = 0.83; EXPRESSED IN BRAIN, SIGNAL = 0.96; EXPRESSED IN LUNG, SIGNAL =   1; EXPRESSED IN PLACENTA, SIGNAL = 0.95; EXPRESSED IN FETAL LIVER, SIGNAL = 0.91; EXPRESSED IN BONE MARROW, SIGNAL = 0.92
TSIWQILSIQYTLTITITITITTTTISLPLPSSVAVPGLPTVS

SEQ ID NO: 44814 - protein, 48 aa, Homo sapiens
  MAP TO AC013317.4; EXPRESSED IN ADULT LIVER, SIGNAL = 0.74; EXPRESSED IN BRAIN, SIGNAL = 0.73; EXPRESSED IN BONE MARROW, SIGNAL = 0.61; EXPRESSED IN PLACENTA, SIGNAL = 0.66; EXPRESSED IN FETAL LIVER, SIGNAL = 0.9
VADLGFKSGSLTPKLIILTTILYCFSVRILSVVTAIPPASLQALTNSQ

SEQ ID NO: 44815 - protein, 46 aa, Homo sapiens
  MAP TO AC015638.4; EXPRESSED IN PLACENTA, SIGNAL = 0.63; EXPRESSED IN ADULT LIVER, SIGNAL = 0.65; EXPRESSED IN FETAL LIVER, SIGNAL = 0.55; EXPRESSED IN BRAIN, SIGNAL = 0.67; EXPRESSED IN BONE MARROW, SIGNAL = 0.56; SWISSPROT HIT: O55017, EVALUE 1.30e-02; EST_HUMAN HIT: AA493341.1, EVALUE 2.70e-01
AFMSMFQILTQEGWVDVMDQTLNAVGHMWAPVVAIYFILYHLFATL

SEQ ID NO: 44816 - protein, 95 aa, Homo sapiens
  MAP TO AL118502.29; EXPRESSED IN ADULT LIVER, SIGNAL =   1; EXPRESSED IN BRAIN, SIGNAL =   1; EXPRESSED IN BONE MARROW, SIGNAL = 1.1; EXPRESSED IN LUNG, SIGNAL = 1.4; EXPRESSED IN PLACENTA, SIGNAL =   1; EXPRESSED IN FETAL LIVER, SIGNAL = 1.2; EST_HUMAN HIT: AI908256.1, EVALUE 8.00e-12; SWISSPROT HIT: P29127, EVALUE 8.90e-01
DHGHFTDNYPKTSTDSVTATVNPRPENSVPSSAGSSQKEHPAFHPFYNYKVWIDRAGALPSWTSTAILKFPLIKNHLNPKGISLMAKVSMTINHK

SEQ ID NO: 44817 - protein, 67 aa, Homo sapiens
  MAP TO AL118502.29; EXPRESSED IN ADULT LIVER, SIGNAL =   1; EXPRESSED IN BRAIN, SIGNAL =   1; EXPRESSED IN BONE MARROW, SIGNAL = 1.1; EXPRESSED IN LUNG, SIGNAL = 1.4; EXPRESSED IN PLACENTA, SIGNAL =   1; EXPRESSED IN FETAL LIVER, SIGNAL = 1.2; EST_HUMAN HIT: AI908256.1, EVALUE 4.00e-13; SWISSPROT HIT: P34352, EVALUE 3.40e+00
IMAISQTTTQKHPQTALLLQLIQDQKTLSPHQQEVARKNTLPFILFITIRSGLTEQEHCHLGQALPF

SEQ ID NO: 44818 - protein, 62 aa, Homo sapiens
  MAP TO AL158138.1; EXPRESSED IN ADULT LIVER, SIGNAL = 0.6; EXPRESSED IN BRAIN, SIGNAL = 0.67; EXPRESSED IN LUNG, SIGNAL = 1.1; EXPRESSED IN BONE MARROW, SIGNAL = 0.83; EXPRESSED IN PLACENTA, SIGNAL = 0.71; EXPRESSED IN FETAL LIVER, SIGNAL = 0.66; SWISSPROT HIT: P15260, EVALUE 4.00e-31; EST_HUMAN HIT: AA236938.1, EVALUE 4.00e-30
IQYKILTQKEDDCDEIQCQLAIPVSSLNSQYCVSAEGVLHVWGVTTEKSKEVCITIFNSSIK

SEQ ID NO: 44819 - protein, 19 aa, Homo sapiens
  MAP TO AL158138.1; EXPRESSED IN ADULT LIVER, SIGNAL = 0.6; EXPRESSED IN BRAIN, SIGNAL = 0.67; EXPRESSED IN LUNG, SIGNAL = 1.1; EXPRESSED IN BONE MARROW, SIGNAL = 0.83; EXPRESSED IN PLACENTA, SIGNAL = 0.71; EXPRESSED IN FETAL LIVER, SIGNAL = 0.66; EST_HUMAN HIT: AW630070.1, EVALUE 1.70e-02
SSIKYSRRRKMIVTRFSAS

SEQ ID NO: 44820 - protein, 42 aa, Homo sapiens
  MAP TO AC013451.7; EXPRESSED IN BONE MARROW, SIGNAL = 0.69; EXPRESSED IN FETAL LIVER, SIGNAL = 0.8; EXPRESSED IN LUNG, SIGNAL = 0.93; EXPRESSED IN PLACENTA, SIGNAL = 0.7; EXPRESSED IN ADULT LIVER, SIGNAL = 0.72; EXPRESSED IN BRAIN, SIGNAL = 0.59; SWISSPROT HIT: P35556, EVALUE 7.00e-06; EST_HUMAN HIT: BF368082.1, EVALUE 8.00e-05
DNECLRDPCKGKGRCINRVGSYSCFCYPGYTLATSGATQECQ

SEQ ID NO: 44821 - protein, 57 aa, Homo sapiens
  MAP TO AL161747.1; EXPRESSED IN PLACENTA, SIGNAL = 0.88; EXPRESSED IN LUNG, SIGNAL = 0.96; EXPRESSED IN ADULT LIVER, SIGNAL = 0.91; EXPRESSED IN BRAIN, SIGNAL = 0.81; EXPRESSED IN BONE MARROW, SIGNAL = 0.92; EXPRESSED IN FETAL LIVER, SIGNAL =   1; SWISSPROT HIT: Q39570, EVALUE 7.00e-07; EST_HUMAN HIT: R18214.1, EVALUE 7.00e-06
VEFGARMVNIDGKQIKLQIWDTVRVQNNLVSDQYPSITRKADAKERGDEGGTNGGDK

SEQ ID NO: 44822 - protein, 23 aa, Homo sapiens
  MAP TO AL161747.1; EXPRESSED IN PLACENTA, SIGNAL = 0.88; EXPRESSED IN LUNG, SIGNAL = 0.96; EXPRESSED IN ADULT LIVER, SIGNAL = 0.91; EXPRESSED IN BRAIN, SIGNAL = 0.81; EXPRESSED IN BONE MARROW, SIGNAL = 0.92; EXPRESSED IN FETAL LIVER, SIGNAL =   1; EST_HUMAN HIT: R18214.1, EVALUE 1.00e-06
VWSLELVWSTLMENKSNCKSGIR

SEQ ID NO: 44823 - protein, 26 aa, Homo sapiens
  MAP TO AL139001.3; EXPRESSED IN PLACENTA, SIGNAL = 0.75; EXPRESSED IN ADULT LIVER, SIGNAL = 0.79; EXPRESSED IN FETAL LIVER, SIGNAL = 0.78; EXPRESSED IN BRAIN, SIGNAL = 0.66; EXPRESSED IN BONE MARROW, SIGNAL = 0.7
SGSSISLSFTSTSCLTGSCSRAITHM

SEQ ID NO: 44824 - protein, 168 aa, Homo sapiens
  MAP TO AL118502.29; EXPRESSED IN BONE MARROW, SIGNAL = 0.53; EXPRESSED IN FETAL LIVER, SIGNAL = 0.62; EXPRESSED IN PLACENTA, SIGNAL = 0.56; EXPRESSED IN ADULT LIVER, SIGNAL = 0.69; EXPRESSED IN BRAIN, SIGNAL = 0.61; EST_HUMAN HIT: AW961017.1, EVALUE 2.00e-10; SWISSPROT HIT: P51436, EVALUE 1.70e+00
GVPRALVSALPGMEAPLSHLESRYLPAHFSPLVFFLLLSIMMACCLVAFFVLQRQPRCWEASVEDLLNDQVTLHSIRPREENDLGPAGTVDSSQGQGYLEEKAAPCCPAHLAFIYTLVAFVNALTNGMLPSVQTYSCLSYGPVAYHLAATLSIVANPLASLVSMFLPN

SEQ ID NO: 44825 - protein, 40 aa, Homo sapiens
  MAP TO AL118502.29; EXPRESSED IN BONE MARROW, SIGNAL = 0.53; EXPRESSED IN FETAL LIVER, SIGNAL = 0.62; EXPRESSED IN PLACENTA, SIGNAL = 0.56; EXPRESSED IN ADULT LIVER, SIGNAL = 0.69; EXPRESSED IN BRAIN, SIGNAL = 0.61; SWISSPROT HIT: P46504, EVALUE 8.30e+00; EST_HUMAN HIT: BE970172.1, EVALUE 5.50e+00
EFPELWCPPSPEWKHPCPTWRAATFPPTSHPWSSSSSYPS

SEQ ID NO: 44826 - protein, 30 aa, Homo sapiens
  MAP TO AL121908.7; EXPRESSED IN BONE MARROW, SIGNAL = 0.77; EXPRESSED IN LUNG, SIGNAL = 0.85; EXPRESSED IN FETAL LIVER, SIGNAL = 0.82; EXPRESSED IN PLACENTA, SIGNAL =   1; EXPRESSED IN ADULT LIVER, SIGNAL = 0.83; EXPRESSED IN BRAIN, SIGNAL = 0.81
QKGQTTGQQGKGICQRHRSSRAGQESCGEP

SEQ ID NO: 44827 - protein, 18 aa, Homo sapiens
  MAP TO AL121908.7; EXPRESSED IN BONE MARROW, SIGNAL = 0.77; EXPRESSED IN LUNG, SIGNAL = 0.85; EXPRESSED IN FETAL LIVER, SIGNAL = 0.82; EXPRESSED IN PLACENTA, SIGNAL =   1; EXPRESSED IN ADULT LIVER, SIGNAL = 0.83; EXPRESSED IN BRAIN, SIGNAL = 0.81
ERPDHRATGKRHLPETSL

SEQ ID NO: 44828 - protein, 109 aa, Homo sapiens
  MAP TO AL137853.3; EXPRESSED IN BONE MARROW, SIGNAL = 0.53; EXPRESSED IN LUNG, SIGNAL = 1.8; EXPRESSED IN PLACENTA, SIGNAL = 0.5; EXPRESSED IN FETAL LIVER, SIGNAL = 0.5; EXPRESSED IN ADULT LIVER, SIGNAL = 0.85; EXPRESSED IN BRAIN, SIGNAL = 0.55; SWISSPROT HIT: P46939, EVALUE 2.30e-02; EST_HUMAN HIT: BE837593.1, EVALUE 3.00e-56
ALEEDIENHATDVHQAVKIGQSLSSLTSPAEQGVLSEKIDSLQARYSEIQDRCCRKAALLDQALSNARLFGEDEVEVLNWLAEVEDKLSSVFVKDFKQDVLHRQHADHL

SEQ ID NO: 44829 - protein, 48 aa, Homo sapiens
  MAP TO AC024570.2; EXPRESSED IN PLACENTA, SIGNAL = 0.52; EXPRESSED IN FETAL LIVER, SIGNAL = 0.56; EXPRESSED IN ADULT LIVER, SIGNAL = 0.53; EXPRESSED IN BRAIN, SIGNAL = 0.49; EXPRESSED IN BONE MARROW, SIGNAL = 0.5; SWISSPROT HIT: P26639, EVALUE 8.00e-21; EST_HUMAN HIT: AA047555.1, EVALUE 5.00e-20
VGEKEKISGTVNIRTRDNKVHGERTISETIERLQQLKEFRSKQAEEEF

SEQ ID NO: 44830 - protein, 49 aa, Homo sapiens
  MAP TO AC024570.2; EXPRESSED IN PLACENTA, SIGNAL = 0.52; EXPRESSED IN FETAL LIVER, SIGNAL = 0.56; EXPRESSED IN ADULT LIVER, SIGNAL = 0.53; EXPRESSED IN BRAIN, SIGNAL = 0.49; EXPRESSED IN BONE MARROW, SIGNAL = 0.5; EST_HUMAN HIT: AW873033.1, EVALUE 2.00e-13
LLVKKRKSVALLISAQETIRSTGNAPFLKLSSGYSSSKSSAANRQKKNF

SEQ ID NO: 44831 - protein, 27 aa, Homo sapiens
  MAP TO AL121888.20; EXPRESSED IN BONE MARROW, SIGNAL = 0.57; EXPRESSED IN LUNG, SIGNAL = 0.89; EXPRESSED IN PLACENTA, SIGNAL = 0.78; EXPRESSED IN ADULT LIVER, SIGNAL = 0.77; EXPRESSED IN FETAL LIVER, SIGNAL = 0.6; EXPRESSED IN BRAIN, SIGNAL = 0.72; EST_HUMAN HIT: BF697362.1, EVALUE 3.60e-02
METEKSKVKVLCLVRAFLLVGTLCIVL

SEQ ID NO: 44832 - protein, 38 aa, Homo sapiens
  MAP TO AL158046.1; EXPRESSED IN PLACENTA, SIGNAL = 0.68; EXPRESSED IN ADULT LIVER, SIGNAL = 0.75; EXPRESSED IN FETAL LIVER, SIGNAL = 0.74; EXPRESSED IN BRAIN, SIGNAL = 0.7; EXPRESSED IN BONE MARROW, SIGNAL = 0.76
MWDWRTLNPMTSGCFTWITDFDQLVGVKRINTEWTHLQ

SEQ ID NO: 44833 - protein, 139 aa, Homo sapiens
  MAP TO AL137225.7; EXPRESSED IN BONE MARROW, SIGNAL = 0.77; EXPRESSED IN LUNG, SIGNAL = 1.2; EXPRESSED IN PLACENTA, SIGNAL = 1.1; EXPRESSED IN FETAL LIVER, SIGNAL =   1; EXPRESSED IN ADULT LIVER, SIGNAL = 1.2; EXPRESSED IN BRAIN, SIGNAL = 0.97; EST_HUMAN HIT: AW163374.1, EVALUE 9.30e+00
YGHIETNDNTAQLGGKYRYGEILESEGSIRDLRNSGYRSAENAYGGHRGLGRYRAAPVGRLHRRELQPGEIPPGVATGAVGPGGLLGTGGMLAADGILAGQGGLLGGGGLLGDGGLLGGWGVLGVLGEGGILSTVQGIT

SEQ ID NO: 44834 - protein, 49 aa, Homo sapiens [sequence omitted]

SEQ ID NO: 44835 - protein, 37 aa, Homo sapiens
  MAP TO AL139824.7; EXPRESSED IN BONE MARROW, SIGNAL = 0.69; EXPRESSED IN PLACENTA, SIGNAL = 0.68; EXPRESSED IN FETAL LIVER, SIGNAL = 0.76; EXPRESSED IN LUNG, SIGNAL = 0.86; EXPRESSED IN ADULT LIVER, SIGNAL = 0.79; EXPRESSED IN BRAIN, SIGNAL = 0.65
ILDVTKIAIFSYPVIQVYTYKIQDTKTTDFKSEFIEK

SEQ ID NO: 44836 - protein, 48 aa, Homo sapiens
  MAP TO AC022542.3; EXPRESSED IN BONE MARROW, SIGNAL = 0.81; EXPRESSED IN PLACENTA, SIGNAL =   1; EXPRESSED IN FETAL LIVER, SIGNAL = 0.8; EXPRESSED IN LUNG, SIGNAL =   1; EXPRESSED IN ADULT LIVER, SIGNAL =   1; EXPRESSED IN BRAIN, SIGNAL = 0.86
KNGGPGPTTVVPAPSRVCCPCALSSSALCLCQSNLKAMFLGRTLRHRE

SEQ ID NO: 44837 - protein, 133 aa, Homo sapiens
  MAP TO AC008812.4; EXPRESSED IN LUNG, SIGNAL = 0.88; EXPRESSED IN FETAL LIVER, SIGNAL = 0.87; EXPRESSED IN BONE MARROW, SIGNAL = 1.1; EXPRESSED IN PLACENTA, SIGNAL = 1.3; EXPRESSED IN ADULT LIVER, SIGNAL = 0.8; EXPRESSED IN BRAIN, SIGNAL = 0.88; EST_HUMAN HIT: AW138646.1, EVALUE 5.00e-29; SWISSPROT HIT: P10263, EVALUE 1.80e-01
AGTLDVENWNRAGEGLKHAHQKGLKVDSSAFCTCSLIRTVLMPLSPYYSAGQQAESKNLKESVVPPTASIENKKQEREDKNWPILPPPVAETSVPPPSVAGIETPIQRILRSAAIAGEPSGPCAFPISVRPDS

SEQ ID NO: 44838 - protein, 56 aa, Homo sapiens
  MAP TO AC013642.3; EXPRESSED IN PLACENTA, SIGNAL = 0.5; EXPRESSED IN FETAL LIVER, SIGNAL = 0.52; EXPRESSED IN BONE MARROW, SIGNAL = 0.48; EXPRESSED IN BRAIN, SIGNAL = 0.51; EST_HUMAN HIT: AV693135.1, EVALUE 6.00e-11; SWISSPROT HIT: O35453, EVALUE 3.00e-12
CGKRVVPLNVNRIASGVIAPKAAWPWQASLQYDNIHQCGATLISNTWLVTAAHCFQ

SEQ ID NO: 44839 - protein, 59 aa, Homo sapiens
  MAP TO AL161744.1; EXPRESSED IN BRAIN, SIGNAL = 0.55; SWISSPROT HIT: Q10022, EVALUE 7.00e-03; EST_HUMAN HIT: AW157233.1, EVALUE 1.00e-27
MYITNTIKAKGTRLAKPVLCLGLMCLAFLTGLNRVAEYRNHWSDVIAGFLVGISIAVFL

SEQ ID NO: 44840 - protein, 22 aa, Homo sapiens
  MAP TO AL161744.1; EXPRESSED IN BRAIN, SIGNAL = 0.55; EST_HUMAN HIT: Z43649.1, EVALUE 2.00e-06
CTSPTQSKPREPDLLSQFYAWA

SEQ ID NO: 44841 - protein, 64 aa, Homo sapiens
  MAP TO AL139008.3; EXPRESSED IN ADULT LIVER, SIGNAL = 0.56; EXPRESSED IN BRAIN, SIGNAL = 0.49; EXPRESSED IN PLACENTA, SIGNAL = 0.58; EXPRESSED IN BONE MARROW, SIGNAL = 0.56; SWISSPROT HIT: P08964, EVALUE 1.50e+00; EST_HUMAN HIT: AF109301.1, EVALUE 1.00e-09
FDDLMAEKEAVSSKCVNLAKDNEVLHQELLSMGKVQEKCEKLEKDKKMLEEKVLNLKTHMEKDM

SEQ ID NO: 44842 - protein, 53 aa, Homo sapiens
  MAP TO AL139008.3; EXPRESSED IN ADULT LIVER, SIGNAL = 0.56; EXPRESSED IN BRAIN, SIGNAL = 0.49; EXPRESSED IN PLACENTA, SIGNAL = 0.58; EXPRESSED IN BONE MARROW, SIGNAL = 0.56; EST_HUMAN HIT: AF109301.1, EVALUE 5.00e-14; SWISSPROT HIT: Q14690, EVALUE 1.60e+00
LMILWPRRKLYLQNVSIWPKTMKFFIRSYYLWEKYKRNVKNLRRIKRCWKKKY

SEQ ID NO: 44843 - protein, 64 aa, Homo sapiens
  MAP TO AC010458.2; EXPRESSED IN PLACENTA, SIGNAL = 0.93; EXPRESSED IN FETAL LIVER, SIGNAL = 0.76; EXPRESSED IN BONE MARROW, SIGNAL = 0.7; EXPRESSED IN ADULT LIVER, SIGNAL = 1.1; EXPRESSED IN BRAIN, SIGNAL = 1.3; EST_HUMAN HIT: AI650936.1, EVALUE 6.00e-29; SWISSPROT HIT: P49454, EVALUE 5.90e+00
VIQKKASKELKVVKFVLQVPREILELEHECLTIRSIMSNVQMARMNVIVQTNAFHCSFMTALLA

SEQ ID NO: 44844 - protein, 32 aa, Homo sapiens
  MAP TO AC008750.4; EXPRESSED IN ADULT LIVER, SIGNAL = 0.68; EXPRESSED IN BRAIN, SIGNAL = 0.85; EXPRESSED IN LUNG, SIGNAL = 0.85; EXPRESSED IN PLACENTA, SIGNAL = 0.92; EXPRESSED IN FETAL LIVER, SIGNAL = 0.87; EXPRESSED IN BONE MARROW, SIGNAL = 0.87; EST_HUMAN HIT: AA628186.1, EVALUE 5.00e-04
DQHRNLTGKLEETTDLSKETVGSSLHHEPDRK

SEQ ID NO: 44845 - protein, 111 aa, Homo sapiens
  MAP TO AC024972.2; EXPRESSED IN FETAL LIVER, SIGNAL = 0.93; EXPRESSED IN BRAIN, SIGNAL = 1.3; EXPRESSED IN LUNG, SIGNAL = 0.92; EXPRESSED IN PLACENTA, SIGNAL = 0.71; EXPRESSED IN ADULT LIVER, SIGNAL = 0.83; EXPRESSED IN BONE MARROW, SIGNAL = 0.85; EST_HUMAN HIT: AA502294.1, EVALUE 6.00e-52; SWISSPROT HIT: Q59105, EVALUE 4.90e+00
YGYESSFENVKVNYLFSDIVFMRTWYPVSIPAFYNPVTSLLKPVGEKDTWSGMWTTGHLGLAHGVRLKTNKDSLYKVLVVCVLVEMKPVPYRQGVTQTLFYNFLRTLNVQV

SEQ ID NO: 44846 - protein, 73 aa, Homo sapiens
  MAP TO AC008269.3; EXPRESSED IN PLACENTA, SIGNAL = 0.8; EXPRESSED IN FETAL LIVER, SIGNAL = 0.72; EXPRESSED IN BRAIN, SIGNAL = 0.7; EXPRESSED IN BONE MARROW, SIGNAL = 0.67; EST_HUMAN HIT: BF127258.1, EVALUE 1.80e+00; SWISSPROT HIT: P15833, EVALUE 2.10e+00
FNFDQCLYPIGGQVPEGKEKNSLEHMAGKDHLCVPAEKTNDSSSLPSRCVSDPCRSADHRQSCALANLLLFKA

SEQ ID NO: 44847 - protein, 39 aa, Homo sapiens
  MAP TO AL157911.2; EXPRESSED IN PLACENTA, SIGNAL =   1; EXPRESSED IN ADULT LIVER, SIGNAL = 0.67; EXPRESSED IN BRAIN, SIGNAL = 0.96; EXPRESSED IN FETAL LIVER, SIGNAL = 0.82; EXPRESSED IN BONE MARROW, SIGNAL = 0.99; EXPRESSED IN LUNG, SIGNAL = 0.97; EST_HUMAN HIT: AW613558.1, EVALUE 3.00e-04
VWIDRAGASPSSTSTRTIILSFTLIKTHQNPKGISLMVK

SEQ ID NO: 44848 - protein, 24 aa, Homo sapiens
  MAP TO AL157911.2; EXPRESSED IN PLACENTA, SIGNAL =   1; EXPRESSED IN ADULT LIVER, SIGNAL = 0.67; EXPRESSED IN BRAIN, SIGNAL = 0.96; EXPRESSED IN FETAL LIVER, SIGNAL = 0.82; EXPRESSED IN BONE MARROW, SIGNAL = 0.99; EXPRESSED IN LUNG, SIGNAL = 0.97; EST_HUMAN HIT: AW844997.1, EVALUE 4.20e-01
EGYLGAGMSLVREGFRMFLVRDVV

SEQ ID NO: 44849 - protein, 73 aa, Homo sapiens
  MAP TO AC010290.4; EXPRESSED IN ADULT LIVER, SIGNAL =   1; EXPRESSED IN FETAL LIVER, SIGNAL = 0.8; EXPRESSED IN BRAIN, SIGNAL = 0.85; EXPRESSED IN BONE MARROW, SIGNAL = 0.75; EXPRESSED IN PLACENTA, SIGNAL = 0.9; EST_HUMAN HIT: BF306528.1, EVALUE 9.20e-02; SWISSPROT HIT: Q91739, EVALUE 1.70e-01
EQFDEAEPATLNGLDQPEQTTIPIPQLPQETQSSLEHEPETHTLHLQPQHEESVVPTQSTLTADDMRRAKRIR

SEQ ID NO: 44850 - protein, 29 aa, Homo sapiens
  MAP TO AC010290.4; EXPRESSED IN ADULT LIVER, SIGNAL =   1; EXPRESSED IN FETAL LIVER, SIGNAL = 0.8; EXPRESSED IN BRAIN, SIGNAL = 0.85; EXPRESSED IN BONE MARROW, SIGNAL = 0.75; EXPRESSED IN PLACENTA, SIGNAL = 0.9; EST_HUMAN HIT: BF030386.1, EVALUE 2.70e+00
CAWLCACRRLSACSGWAPRSLHAAAAGAG

SEQ ID NO: 44851 - protein, 129 aa, Homo sapiens
  MAP TO AC026412.1; EXPRESSED IN FETAL LIVER, SIGNAL = 1.3; EXPRESSED IN BRAIN, SIGNAL =   1; EXPRESSED IN PLACENTA, SIGNAL = 0.52; EXPRESSED IN ADULT LIVER, SIGNAL = 0.69; EXPRESSED IN BONE MARROW, SIGNAL = 0.99; EST_HUMAN HIT: AI873264.1, EVALUE 1.00e-35; SWISSPROT HIT: P32583, EVALUE 9.60e-01
SFMISREMIPERKNQEKESDASTVNEETSEENNQMEESDVSQAEKDLLHSEGNENEGPESSGSSDCRETEELVGSNSSKTGEILSESSMENDDEATEVTDEPMEQDYLETFRCSILRTVLVLTPYKTFM

SEQ ID NO: 44852 - protein, 79 aa, Homo sapiens
  MAP TO AC007981.43; EXPRESSED IN FETAL LIVER, SIGNAL = 1.3; EXPRESSED IN PLACENTA, SIGNAL = 0.61; EXPRESSED IN ADULT LIVER, SIGNAL = 0.7; EXPRESSED IN BONE MARROW, SIGNAL = 0.63; EXPRESSED IN BRAIN, SIGNAL = 0.56; EST_HUMAN HIT: AI904151.1, EVALUE 2.00e-25; SWISSPROT HIT: P26404, EVALUE 2.30e-01
NEVAVYDIANEDIVYDIANEDALYDIINEDAVYNIANEDAVYGIANEDAVYEFANKDAVYDIANEDTVQDICKKEDAAN

SEQ ID NO: 44853 - protein, 25 aa, Homo sapiens
  MAP TO AC007981.43; EXPRESSED IN FETAL LIVER, SIGNAL = 1.3; EXPRESSED IN PLACENTA, SIGNAL = 0.61; EXPRESSED IN ADULT LIVER, SIGNAL = 0.7; EXPRESSED IN BONE MARROW, SIGNAL = 0.63; EXPRESSED IN BRAIN, SIGNAL = 0.56; EST_HUMAN HIT: AI904151.1, EVALUE 6.00e-04
TRTLYMTSLMRTLYMTSLMRMLYKT

SEQ ID NO: 44854 - protein, 35 aa, Homo sapiens
  MAP TO AC008919.4; EXPRESSED IN PLACENTA, SIGNAL = 0.91; EXPRESSED IN FETAL LIVER, SIGNAL = 0.75; EXPRESSED IN BONE MARROW, SIGNAL = 1.1; EXPRESSED IN LUNG, SIGNAL = 0.89; EXPRESSED IN ADULT LIVER, SIGNAL = 0.9; EXPRESSED IN BRAIN, SIGNAL = 0.78; EST_HUMAN HIT: AW834834.1, EVALUE 3.00e-12
MCRSALESPRKVVIFEPYPSVVDPNDPQMLAFNPR

SEQ ID NO: 44855 - protein, 27 aa, Homo sapiens
  MAP TO AC007687.16; EXPRESSED IN PLACENTA, SIGNAL = 0.9; EXPRESSED IN LUNG, SIGNAL = 0.92; EXPRESSED IN FETAL LIVER, SIGNAL =   1; EXPRESSED IN BONE MARROW, SIGNAL = 0.94; EXPRESSED IN ADULT LIVER, SIGNAL = 0.98; EXPRESSED IN BRAIN, SIGNAL =   1; EST_HUMAN HIT: AI090876.1, EVALUE 1.00e-10
LCSGRGEGIISGSCPPKWRYDRPRPAD

SEQ ID NO: 44856 - protein, 25 aa, Homo sapiens
  MAP TO AC018529.4; EXPRESSED IN ADULT LIVER, SIGNAL = 0.76; EXPRESSED IN BRAIN, SIGNAL = 0.78; EXPRESSED IN LUNG, SIGNAL = 1.2; EXPRESSED IN PLACENTA, SIGNAL = 0.92; EXPRESSED IN BONE MARROW, SIGNAL = 0.93; EXPRESSED IN FETAL LIVER, SIGNAL = 0.84
NNHKRHFIIDRLHHTADEGCSGERD

SEQ ID NO: 44857 - protein, 22 aa, Homo sapiens
  MAP TO AC018529.4; EXPRESSED IN ADULT LIVER, SIGNAL = 0.76; EXPRESSED IN BRAIN, SIGNAL = 0.78; EXPRESSED IN LUNG, SIGNAL = 1.2; EXPRESSED IN PLACENTA, SIGNAL = 0.92; EXPRESSED IN BONE MARROW, SIGNAL = 0.93; EXPRESSED IN FETAL LIVER, SIGNAL = 0.84
SRSPLHPSSAVWWSLSMMKCLL

SEQ ID NO: 44858 - protein, 54 aa, Homo sapiens
  MAP TO AC015823.3; EXPRESSED IN PLACENTA, SIGNAL = 0.7; EXPRESSED IN BRAIN, SIGNAL = 0.69; EXPRESSED IN ADULT LIVER, SIGNAL = 0.63; EXPRESSED IN FETAL LIVER, SIGNAL = 0.63; EXPRESSED IN BONE MARROW, SIGNAL = 0.65; EST_HUMAN HIT: BF512101.1, EVALUE 3.00e-17
ETARPRKVKNLPEHGQWQTQKWNSSLLLVPPTFLMQSFYSSSREEGTEGTLQSK

SEQ ID NO: 44859 - protein, 34 aa, Homo sapiens [sequence omitted]

SEQ ID NO: 44860 - protein, 30 aa, Homo sapiens
  MAP TO AC019275.3; EXPRESSED IN PLACENTA, SIGNAL = 0.7; EXPRESSED IN ADULT LIVER, SIGNAL = 0.82; EXPRESSED IN FETAL LIVER, SIGNAL = 0.85; EXPRESSED IN BRAIN, SIGNAL = 0.67; EXPRESSED IN BONE MARROW, SIGNAL = 0.72; EST_HUMAN HIT: BE886325.1, EVALUE 3.00e-11; SWISSPROT HIT: P22213, EVALUE 1.00e-05
LLHSDRDPIPDVPAVYFVMPTEENIDRMCQ

SEQ ID NO: 44861 - protein, 17 aa, Homo sapiens
  MAP TO AC019275.3; EXPRESSED IN PLACENTA, SIGNAL = 0.7; EXPRESSED IN ADULT LIVER, SIGNAL = 0.82; EXPRESSED IN FETAL LIVER, SIGNAL = 0.85; EXPRESSED IN BRAIN, SIGNAL = 0.67; EXPRESSED IN BONE MARROW, SIGNAL = 0.72; EST_HUMAN HIT: BE886325.1, EVALUE 3.70e-02
FYTLIEILFQMFLQYTL

SEQ ID NO: 44862 - protein, 20 aa, Homo sapiens
  MAP TO AF240628.1; EXPRESSED IN PLACENTA, SIGNAL = 0.62; EXPRESSED IN FETAL LIVER, SIGNAL = 1.2; EXPRESSED IN BRAIN, SIGNAL = 0.73; EXPRESSED IN BONE MARROW, SIGNAL = 0.66; EST_HUMAN HIT: BE747929.1, EVALUE 2.20e-02
IFMPKKSRISFGTSPRSLEC

SEQ ID NO: 44863 - protein, 36 aa, Homo sapiens
  MAP TO AL121935.12; EXPRESSED IN PLACENTA, SIGNAL = 0.75; EXPRESSED IN ADULT LIVER, SIGNAL = 0.89; EXPRESSED IN FETAL LIVER, SIGNAL = 0.81; EXPRESSED IN BONE MARROW, SIGNAL = 0.7; EXPRESSED IN BRAIN, SIGNAL = 0.68
MEISPREFPFAPRCQGSPSRQEASLSTEGEEGGGGS

SEQ ID NO: 44864 - protein, 86 aa, Homo sapiens
  MAP TO AC016549.4; EXPRESSED IN PLACENTA, SIGNAL = 0.61; EXPRESSED IN FETAL LIVER, SIGNAL = 0.61; EXPRESSED IN BONE MARROW, SIGNAL = 0.55; EXPRESSED IN ADULT LIVER, SIGNAL = 0.65; EXPRESSED IN BRAIN, SIGNAL = 0.72; EST_HUMAN HIT: AW245765.1, EVALUE 2.00e-41; SWISSPROT HIT: O75962, EVALUE 4.00e-45
TNMVSLEGLTKVVDPSQLTPEFDGCLEYNHEEWIEIRVAFEDYISNATHMLSRLEELQDILAKKELPQDLEGARNMIEEHSQLKKK

SEQ ID NO: 44865 - protein, 41 aa, Homo sapiens
  MAP TO AC016549.4; EXPRESSED IN PLACENTA, SIGNAL = 0.61; EXPRESSED IN FETAL LIVER, SIGNAL = 0.61; EXPRESSED IN BONE MARROW, SIGNAL = 0.55; EXPRESSED IN ADULT LIVER, SIGNAL = 0.65; EXPRESSED IN BRAIN, SIGNAL = 0.72; EST_HUMAN HIT: BE140577.1, EVALUE 2.00e-17; SWISSPROT HIT: O75962, EVALUE 5.00e-19
VSTMLDRLHSTRQHLHQMWHVRKLKLDQCFQLRLFEQDAEK

SEQ ID NO: 44866 - protein, 27 aa, Homo sapiens
  MAP TO AC016202.4; EXPRESSED IN BONE MARROW, SIGNAL = 0.45; EXPRESSED IN PLACENTA, SIGNAL = 0.73; EXPRESSED IN BRAIN, SIGNAL = 0.47
SVMLSTIKITIGANTSNKLSLTINSNH

SEQ ID NO: 44867 - protein, 22 aa, Homo sapiens
  MAP TO AC008688.4; EXPRESSED IN ADULT LIVER, SIGNAL = 0.66; EXPRESSED IN BONE MARROW, SIGNAL = 0.59; EXPRESSED IN BRAIN, SIGNAL = 1.3; EXPRESSED IN PLACENTA, SIGNAL = 0.59; EXPRESSED IN FETAL LIVER, SIGNAL = 0.54; EST_HUMAN HIT: BF447368.1, EVALUE 5.00e-04
DLLQSSPSGRSLLTAKLTKVTS

SEQ ID NO: 44868 - protein, 137 aa, Homo sapiens
  MAP TO AL121944.10; EXPRESSED IN FETAL LIVER, SIGNAL = 0.6; EXPRESSED IN BONE MARROW, SIGNAL = 0.52; EXPRESSED IN ADULT LIVER, SIGNAL = 0.54; EXPRESSED IN BRAIN, SIGNAL = 0.59; EXPRESSED IN PLACENTA, SIGNAL = 0.61; EST_HUMAN HIT: AU121601.1, EVALUE 2.00e-36; SWISSPROT HIT: P49910, EVALUE 8.00e-77
MATEPKKAAAQNSPEDEGLLIVKIEEEEFIHGQDTCLQRSELLKQELCRQLFRQFCYQDSPGPREALSRLRELCCQWLKPEIHTKEQILELLVLEQFLTILPGDLQAWVHEHYPESGEEAVTILEDLERGTDEAVLQ

SEQ ID NO: 44869 - protein, 19 aa, Homo sapiens
  MAP TO AL121944.10; EXPRESSED IN FETAL LIVER, SIGNAL = 0.6; EXPRESSED IN BONE MARROW, SIGNAL = 0.52; EXPRESSED IN ADULT LIVER, SIGNAL = 0.54; EXPRESSED IN BRAIN, SIGNAL = 0.59; EXPRESSED IN PLACENTA, SIGNAL = 0.61
WLQNQRKLQPRTLQRMKDF

SEQ ID NO: 44870 - protein, 72 aa, Homo sapiens
  MAP TO AC021774.3; EXPRESSED IN BRAIN, SIGNAL = 1.4; EXPRESSED IN LUNG, SIGNAL = 0.99; EXPRESSED IN PLACENTA, SIGNAL = 1.1; EXPRESSED IN ADULT LIVER, SIGNAL = 1.2; EXPRESSED IN FETAL LIVER, SIGNAL = 1.2; EXPRESSED IN BONE MARROW, SIGNAL = 1.1; EST_HUMAN HIT: AA100678.1, EVALUE 4.00e-09
ILGVHVQVCYMGILHDAEVWGMIYLAIQVVNTVPTQWLVFQPLLSSLPPLLVIPSVYCCHLHVREYLVFSSY

SEQ ID NO: 44871 - protein, 22 aa, Homo sapiens
  MAP TO AL096863.10; EXPRESSED IN PLACENTA, SIGNAL = 0.62; EXPRESSED IN BONE MARROW, SIGNAL = 0.68; EXPRESSED IN FETAL LIVER, SIGNAL = 0.65; EXPRESSED IN ADULT LIVER, SIGNAL = 0.56; EXPRESSED IN BRAIN, SIGNAL = 0.62
VLSKFCPLRMPFLEITDGPNLL

SEQ ID NO: 44872 - protein, 77 aa, Homo sapiens
  MAP TO AC012662.5; EXPRESSED IN PLACENTA, SIGNAL = 0.55; EXPRESSED IN ADULT LIVER, SIGNAL = 0.62; EXPRESSED IN BRAIN, SIGNAL = 0.59; EXPRESSED IN BONE MARROW, SIGNAL = 0.58; EST_HUMAN HIT: BE270639.1, EVALUE 9.00e-04
FWTLCGNALTAKRGIFGKTGDLQTILCLACAKEDITYSGALNGDIYVWKGLNLVRTIQGAHSVSITLWKSVGDLPNK

SEQ ID NO: 44873 - protein, 53 aa, Homo sapiens
  MAP TO AC013291.4; EXPRESSED IN ADULT LIVER, SIGNAL = 0.61; EXPRESSED IN BRAIN, SIGNAL =   1; EXPRESSED IN BONE MARROW, SIGNAL = 0.66; EXPRESSED IN FETAL LIVER, SIGNAL = 0.66; EST_HUMAN HIT: AU135853.1, EVALUE 1.00e-08
NAMAHRDSEMKEECLREDLKFYFMSPCEKYRARRQIPWKLGLQILKIVMVTTQ

SEQ ID NO: 44874 - protein, 68 aa, Homo sapiens
  MAP TO AL121673.27; EXPRESSED IN LUNG, SIGNAL = 0.98; EXPRESSED IN PLACENTA, SIGNAL = 1.1; EXPRESSED IN BONE MARROW, SIGNAL = 0.99; EXPRESSED IN ADULT LIVER, SIGNAL = 1.1; EXPRESSED IN FETAL LIVER, SIGNAL = 0.92; EXPRESSED IN BRAIN, SIGNAL = 0.99; EST_HUMAN HIT: BF128145.1, EVALUE 1.90e+00
GHGFQSSPGQLWWGSDPSRHWEPVTPRITSWASSSKSSLSSRVSAPLSLTTPCRSASVSSFSLYPRSG

SEQ ID NO: 44875 - protein, 43 aa, Homo sapiens
  MAP TO AL121673.27; EXPRESSED IN LUNG, SIGNAL = 0.98; EXPRESSED IN PLACENTA, SIGNAL = 1.1; EXPRESSED IN BONE MARROW, SIGNAL = 0.99; EXPRESSED IN ADULT LIVER, SIGNAL = 1.1; EXPRESSED IN FETAL LIVER, SIGNAL = 0.92; EXPRESSED IN BRAIN, SIGNAL = 0.99
LPTWGTARRRRRRQTGTGWSGTAVLTHGCSKMTWNSRPSSLFW

SEQ ID NO: 44876 - protein, 32 aa, Homo sapiens
  MAP TO AL161940.3; EXPRESSED IN ADULT LIVER, SIGNAL = 0.69; EXPRESSED IN BONE MARROW, SIGNAL = 0.49; EXPRESSED IN BRAIN, SIGNAL = 0.53; EXPRESSED IN PLACENTA, SIGNAL = 0.58; EST_HUMAN HIT: BE880414.1, EVALUE 5.80e+00; SWISSPROT HIT: P23917, EVALUE 2.50e-01
MNLRPWLSFARCRQQLPCTCGNQNCLQPFPND

SEQ ID NO: 44877 - protein, 24 aa, Homo sapiens
  MAP TO AL161940.3; EXPRESSED IN ADULT LIVER, SIGNAL = 0.69; EXPRESSED IN BONE MARROW, SIGNAL = 0.49; EXPRESSED IN BRAIN, SIGNAL = 0.53; EXPRESSED IN PLACENTA, SIGNAL = 0.58
VIWKWLETVLIAASAGQLLPASGE

SEQ ID NO: 44878 - protein, 21 aa, Homo sapiens
  MAP TO AC013497.4; EXPRESSED IN BONE MARROW, SIGNAL = 0.79; EXPRESSED IN FETAL LIVER, SIGNAL = 0.91; EXPRESSED IN PLACENTA, SIGNAL = 0.46; EXPRESSED IN ADULT LIVER, SIGNAL = 0.87; EXPRESSED IN BRAIN, SIGNAL = 0.91
VTLLISSIKNFSLTTLCWTLF

SEQ ID NO: 44879 - protein, 64 aa, Homo sapiens
  MAP TO AL161644.1; EXPRESSED IN BONE MARROW, SIGNAL = 0.46; EXPRESSED IN ADULT LIVER, SIGNAL = 0.55; EXPRESSED IN BRAIN, SIGNAL = 0.44; EST_HUMAN HIT: AI923842.1, EVALUE 1.50e+00; SWISSPROT HIT: Q10697, EVALUE 3.30e+00
TTWLEVMTVKLYKGRLPTRYPSATGTALQGQGQLGREQEPPVQPWGWPHSQGPLSQLCTPPGPQ

SEQ ID NO: 44880 - protein, 40 aa, Homo sapiens
  MAP TO AL161644.1; EXPRESSED IN BONE MARROW, SIGNAL = 0.46; EXPRESSED IN ADULT LIVER, SIGNAL = 0.55; EXPRESSED IN BRAIN, SIGNAL = 0.44; EST_HUMAN HIT: AA984622.1, EVALUE 7.20e+00
RCQWQRDTWLVTDPCTASPSSPPATWCCRQAGRSWPKREP

SEQ ID NO: 44881 - protein, 33 aa, Homo sapiens
  MAP TO AL161644.1; EXPRESSED IN BONE MARROW, SIGNAL = 0.46; EXPRESSED IN ADULT LIVER, SIGNAL = 0.55; EXPRESSED IN BRAIN, SIGNAL = 0.44; EST_HUMAN HIT: AV650359.1, EVALUE 3.90e-01
REQQPPPPGCSPRQLLGPFSLWTWRSAKLRQWP

SEQ ID NO: 44882 - protein, 51 aa, Homo sapiens
  MAP TO AL121888.20; EXPRESSED IN LUNG, SIGNAL = 1.1; EXPRESSED IN PLACENTA, SIGNAL = 1.1; EXPRESSED IN ADULT LIVER, SIGNAL = 0.97; EXPRESSED IN BRAIN, SIGNAL = 0.94; EXPRESSED IN BONE MARROW, SIGNAL = 0.87; EXPRESSED IN FETAL LIVER, SIGNAL = 0.74
MRMKPSTERSSNLSKYPNPDIVVMMTPTSGVWSLSSHMEPLGCTAWVGFQK

SEQ ID NO: 44883 - protein, 51 aa, Homo sapiens
  MAP TO AL121888.20; EXPRESSED IN LUNG, SIGNAL = 1.1; EXPRESSED IN PLACENTA, SIGNAL = 1.1; EXPRESSED IN ADULT LIVER, SIGNAL = 0.97; EXPRESSED IN BRAIN, SIGNAL = 0.94; EXPRESSED IN BONE MARROW, SIGNAL = 0.87; EXPRESSED IN FETAL LIVER, SIGNAL = 0.74
ISETPPRQYSLVVPCGSSGSRLLRLESSSLQCLDLDTWTSYLISLCLASSS

SEQ ID NO: 44884 - protein, 39 aa, Homo sapiens
  MAP TO AC010829.5; EXPRESSED IN PLACENTA, SIGNAL = 0.77; EXPRESSED IN ADULT LIVER, SIGNAL = 0.99; EXPRESSED IN FETAL LIVER, SIGNAL = 0.72; EXPRESSED IN BRAIN, SIGNAL = 0.84; EXPRESSED IN BONE MARROW, SIGNAL = 0.67
ACFHVKLGRVEPAKRHALWMLKRNLQKKERINSTRFQNT

SEQ ID NO: 44885 - protein, 33 aa, Homo sapiens
  MAP TO AC011686.3; EXPRESSED IN ADULT LIVER, SIGNAL = 0.56; EXPRESSED IN BRAIN, SIGNAL = 0.45; EXPRESSED IN BONE MARROW, SIGNAL = 0.69; EXPRESSED IN LUNG, SIGNAL = 0.92; EXPRESSED IN FETAL LIVER, SIGNAL = 0.81; EST_HUMAN HIT: AA019103.1, EVALUE 1.50e-02; SWISSPROT HIT: Q9Z1D8, EVALUE 8.50e+00
KLNSKVERSQSCSDTAQERAKSRVRAVPGNKAK

SEQ ID NO: 44886 - protein, 113 aa, Homo sapiens
  MAP TO AC008103.27; EXPRESSED IN PLACENTA, SIGNAL = 1.5; EXPRESSED IN ADULT LIVER, SIGNAL = 0.66; EXPRESSED IN FETAL LIVER, SIGNAL = 1.5; EXPRESSED IN BRAIN, SIGNAL = 0.98; EXPRESSED IN BONE MARROW, SIGNAL =   1; EST_HUMAN HIT: AI904151.1, EVALUE 5.00e-36; SWISSPROT HIT: P18899, EVALUE 6.00e-03
DTVQDIANEDAVYDIANEDVVYDIANEDALQDIANEVAVYDIANEDIVYDIANEDALYDIINEDAVYNIANEDAVYGIANEDAVYEFANKDAVYDIANEDTVQDICKKEDAAN

SEQ ID NO: 44887 - protein, 72 aa, Homo sapiens
  MAP TO AC013657.3; EXPRESSED IN BONE MARROW, SIGNAL = 1.3; EXPRESSED IN LUNG, SIGNAL = 1.6; EXPRESSED IN PLACENTA, SIGNAL = 1.1; EXPRESSED IN ADULT LIVER, SIGNAL = 1.3; EXPRESSED IN FETAL LIVER, SIGNAL =   1; EXPRESSED IN BRAIN, SIGNAL =   1; EST_HUMAN HIT: BE276040.1, EVALUE 2.90e+00; SWISSPROT HIT: P08968, EVALUE 5.70e+00
LFVLLIVPCISRELTLERSLLSMVCVASFTRGACDPGVPCILMHPLWKQELLCRELVSRLEQTLQSLAYCLK

SEQ ID NO: 44888 - protein, 35 aa, Homo sapiens
  MAP TO AC018993.3; EXPRESSED IN BRAIN, SIGNAL = 0.47; EXPRESSED IN PLACENTA, SIGNAL = 0.62; EXPRESSED IN FETAL LIVER, SIGNAL = 0.6; EXPRESSED IN BONE MARROW, SIGNAL = 0.54
WLSSSLSSSRICCQILPFWNIHTHFRALTLVLPNT

SEQ ID NO: 44889 - protein, 17 aa, Homo sapiens
  MAP TO AC012571.3; EXPRESSED IN PLACENTA, SIGNAL = 0.68; EXPRESSED IN ADULT LIVER, SIGNAL = 0.79; EXPRESSED IN FETAL LIVER, SIGNAL = 0.53; EXPRESSED IN BRAIN, SIGNAL = 0.56; EXPRESSED IN BONE MARROW, SIGNAL = 0.56
LLFMRTMLPINTRMISL

SEQ ID NO: 44890 - protein, 33 aa, Homo sapiens [sequence omitted]

SEQ ID NO: 44891 - protein, 24 aa, Homo sapiens
  MAP TO AC015785.3; EXPRESSED IN PLACENTA, SIGNAL = 0.69; EXPRESSED IN ADULT LIVER, SIGNAL = 1.4; EXPRESSED IN BRAIN, SIGNAL = 1.2; EXPRESSED IN LUNG, SIGNAL = 1.1; EXPRESSED IN BONE MARROW, SIGNAL = 1.1; EXPRESSED IN FETAL LIVER, SIGNAL = 1.2
ALMWHLALDKWRRFWLVIQLENLS

SEQ ID NO: 44892 - protein, 33 aa, Homo sapiens
  MAP TO AC012662.5; EXPRESSED IN PLACENTA, SIGNAL = 0.68; EXPRESSED IN ADULT LIVER, SIGNAL = 1.4; EXPRESSED IN FETAL LIVER, SIGNAL = 0.51; EXPRESSED IN BRAIN, SIGNAL = 0.67; EXPRESSED IN BONE MARROW, SIGNAL = 0.57
GHKDKIFVVKCNPHHVDKLVTVGIKHIKFWQQA

SEQ ID NO: 44893 - protein, 41 aa, Homo sapiens
  MAP TO AL139258.2; EXPRESSED IN BONE MARROW, SIGNAL = 0.71; EXPRESSED IN PLACENTA, SIGNAL = 0.73; EXPRESSED IN ADULT LIVER, SIGNAL = 0.87; EXPRESSED IN LUNG, SIGNAL = 0.89; EXPRESSED IN FETAL LIVER, SIGNAL = 0.77; EXPRESSED IN BRAIN, SIGNAL = 0.71; SWISSPROT HIT: O52349, EVALUE 4.80e+00
MRPWKHKKGKTNSWAQENPRSLASPEAFSANNKSRGAAVHK

SEQ ID NO: 44894 - protein, 56 aa, Homo sapiens
  MAP TO AL121917.12; EXPRESSED IN PLACENTA, SIGNAL = 0.7; EXPRESSED IN ADULT LIVER, SIGNAL = 0.73; EXPRESSED IN FETAL LIVER, SIGNAL = 0.7; EXPRESSED IN BONE MARROW, SIGNAL =   1; EXPRESSED IN BRAIN, SIGNAL = 0.66; EST_HUMAN HIT: BF130498.1, EVALUE 7.20e-01; SWISSPROT HIT: Q13202, EVALUE 3.50e+00
PGLAPLKAPGSMSAGPKASRPAWTPLGNPGCSSVGQKPPKLGCSASKGIASSGGGL

SEQ ID NO: 44895 - protein, 53 aa, Homo sapiens
  MAP TO AC019194.2; EXPRESSED IN PLACENTA, SIGNAL = 0.48; EXPRESSED IN ADULT LIVER, SIGNAL =   1; EXPRESSED IN FETAL LIVER, SIGNAL = 0.78; EXPRESSED IN BRAIN, SIGNAL = 0.74; EXPRESSED IN BONE MARROW, SIGNAL = 1.1; EST_HUMAN HIT: AA988971.1, EVALUE 9.00e-25; SWISSPROT HIT: P27680, EVALUE 2.80e-02
NTGFQYDVISCLNLLDRCDQPLTLLKDIRSVLEPTRGRVILALVLPFHPYVEN

SEQ ID NO: 44896 - protein, 54 aa, Homo sapiens
  MAP TO AC021498.4; EXPRESSED IN PLACENTA, SIGNAL = 0.54; EXPRESSED IN FETAL LIVER, SIGNAL = 0.48; EXPRESSED IN BRAIN, SIGNAL = 0.5; EXPRESSED IN BONE MARROW, SIGNAL = 0.44
YADESTSERRYNCFLDLLEGLQSKQLELRVKMEPADYLRVSIIFVTLILSCIEN

SEQ ID NO: 44897 - protein, 18 aa, Homo sapiens
  MAP TO AC021498.4; EXPRESSED IN PLACENTA, SIGNAL = 0.54; EXPRESSED IN FETAL LIVER, SIGNAL = 0.48; EXPRESSED IN BRAIN, SIGNAL = 0.5; EXPRESSED IN BONE MARROW, SIGNAL = 0.44
DMLMSQHQRGDTTVSWIS

SEQ ID NO: 44898 - protein, 42 aa, Homo sapiens [sequence omitted]

SEQ ID NO: 44899 - protein, 28 aa, Homo sapiens
  MAP TO AL121920.7; EXPRESSED IN PLACENTA, SIGNAL = 0.69; EXPRESSED IN FETAL LIVER, SIGNAL = 0.74; EXPRESSED IN ADULT LIVER, SIGNAL = 0.9; EXPRESSED IN BRAIN, SIGNAL = 0.73; EXPRESSED IN BONE MARROW, SIGNAL = 0.9
MEGQKDLGSILKAELTELADELDGLRSR

SEQ ID NO: 44900 - protein, 30 aa, Homo sapiens
  MAP TO AC013634.3; EXPRESSED IN PLACENTA, SIGNAL = 0.6; EXPRESSED IN ADULT LIVER, SIGNAL = 0.63; EXPRESSED IN FETAL LIVER, SIGNAL = 0.47; EXPRESSED IN BRAIN, SIGNAL = 0.51; EXPRESSED IN BONE MARROW, SIGNAL = 0.49; EST_HUMAN HIT: BF242704.1, EVALUE 4.50e+00
KTISKAISSRRRLCQSPPSWCYLHHRTNHL

SEQ ID NO: 44901 - protein, 106 aa, Homo sapiens
  MAP TO AC015493.4; EXPRESSED IN PLACENTA, SIGNAL = 0.66; EXPRESSED IN ADULT LIVER, SIGNAL = 0.71; EXPRESSED IN FETAL LIVER, SIGNAL = 0.64; EXPRESSED IN BRAIN, SIGNAL = 0.9; EXPRESSED IN BONE MARROW, SIGNAL = 0.71; SWISSPROT HIT: Q50289, EVALUE 1.30e+00; EST_HUMAN HIT: N40380.1, EVALUE 4.00e+00
MIARKVTFSTHSLGNQHIYQRSSSMLSFSNTDKKAKVGLEACGRAQSATPAKPTDGLYTYWSAGADSQSVQNSSSFHNWYSFNDGSVKTPGPIVIYQTLVYPRAAK

SEQ ID NO: 44902 - protein, 32 aa, Homo sapiens
  MAP TO AC015493.4; EXPRESSED IN PLACENTA, SIGNAL = 0.66; EXPRESSED IN ADULT LIVER, SIGNAL = 0.71; EXPRESSED IN FETAL LIVER, SIGNAL = 0.64; EXPRESSED IN BRAIN, SIGNAL = 0.9; EXPRESSED IN BONE MARROW, SIGNAL = 0.71
WHSCSQPRSWWTRSRTASRPPTGLTHSSGCTQ

SEQ ID NO: 44903 - protein, 48 aa, Homo sapiens
  MAP TO AC025812.4; EXPRESSED IN LUNG, SIGNAL = 0.87; EXPRESSED IN PLACENTA, SIGNAL = 0.66; EXPRESSED IN FETAL LIVER, SIGNAL = 0.66; EXPRESSED IN ADULT LIVER, SIGNAL = 0.92; EXPRESSED IN BRAIN, SIGNAL = 0.6; EXPRESSED IN BONE MARROW, SIGNAL = 0.66; SWISSPROT HIT: P78586, EVALUE 4.70e+00
WNLSIITVAILSIQMSGSFCQEGKTAVWNGKGVEDTAKHVKSFIRGVR

SEQ ID NO: 44904 - protein, 75 aa, Homo sapiens
  MAP TO AC022015.2; EXPRESSED IN PLACENTA, SIGNAL =   1; EXPRESSED IN FETAL LIVER, SIGNAL = 0.62; EXPRESSED IN BRAIN, SIGNAL = 0.62; EXPRESSED IN BONE MARROW, SIGNAL = 0.66; EST_HUMAN HIT: BF085150.1, EVALUE 4.10e+00
PHQNMSFRRTLDFPNMGFLNMSFRKTLGFRNMGFRRTLGFRNMSFRRTLGFRNMSFLSTLYPQHPTQGLVQTASL

SEQ ID NO: 44905 - protein, 45 aa, Homo sapiens
  MAP TO AC010290.4; EXPRESSED IN PLACENTA, SIGNAL = 0.56; EXPRESSED IN FETAL LIVER, SIGNAL = 0.69; EXPRESSED IN ADULT LIVER, SIGNAL = 0.85; EXPRESSED IN BRAIN, SIGNAL = 0.61; EXPRESSED IN BONE MARROW, SIGNAL = 0.61; EST_HUMAN HIT: AW408359.1, EVALUE 2.00e-08
LSGLGRNIILTTMPAGTKLIAGNKPVSFLTAQQLQQLQQQGQATQ

SEQ ID NO: 44906 - protein, 44 aa, Homo sapiens
  MAP TO AC010290.4; EXPRESSED IN PLACENTA, SIGNAL = 0.56; EXPRESSED IN FETAL LIVER, SIGNAL = 0.69; EXPRESSED IN ADULT LIVER, SIGNAL = 0.85; EXPRESSED IN BRAIN, SIGNAL = 0.61; EXPRESSED IN BONE MARROW, SIGNAL = 0.61
SVGWAATSSSQLCQQALSSLLAISLLVSSLLSSCSSFSSKVRPH

SEQ ID NO: 44907 - protein, 57 aa, Homo sapiens
  MAP TO AL139248.2; EXPRESSED IN PLACENTA, SIGNAL = 0.71; EXPRESSED IN ADULT LIVER, SIGNAL = 0.9; EXPRESSED IN BONE MARROW, SIGNAL = 0.66; EXPRESSED IN FETAL LIVER, SIGNAL = 0.67; EXPRESSED IN BRAIN, SIGNAL = 0.58; SWISSPROT HIT: P40402, EVALUE 2.00e+00; EST_HUMAN HIT: BE273891.1, EVALUE 1.00e-24
ALDPMELKGEGLVLSLEEQLSALTLSELRDSEPSSTVSLNGTFFKMELFEGMRESTK

SEQ ID NO: 44908 - protein, 31 aa, Homo sapiens
  MAP TO AC013597.3; EXPRESSED IN ADULT LIVER, SIGNAL = 1.4; EXPRESSED IN HELA, SIGNAL = 2.2; EXPRESSED IN FETAL LIVER, SIGNAL = 1.2; EXPRESSED IN BRAIN, SIGNAL = 0.98; EXPRESSED IN BONE MARROW, SIGNAL =   1; EXPRESSED IN LUNG, SIGNAL = 1.2; EXPRESSED IN PLACENTA, SIGNAL = 1.2
LLHSLDTKPVPLTRQSKMPYLKTGAPEANIQ

SEQ ID NO: 44909 - protein, 99 aa, Homo sapiens
  MAP TO AL139117.3; EXPRESSED IN ADULT LIVER, SIGNAL = 0.65; EXPRESSED IN BRAIN, SIGNAL = 0.68; EXPRESSED IN BONE MARROW, SIGNAL = 1.8; EXPRESSED IN LUNG, SIGNAL = 0.84; EXPRESSED IN PLACENTA, SIGNAL = 0.76; EXPRESSED IN FETAL LIVER, SIGNAL = 1.1; SWISSPROT HIT: Q14943, EVALUE 8.00e-17; EST_HUMAN HIT: BF338407.1, EVALUE 2.00e-31
AYSKPTLSALPSPLVTSGKSVTLLCQSRSPMDTFLLIKERAAHPLLHLRSEHGAQQHQAEFPMSPVTSVHGGTYRCFSSHGFSHYLLSHPSDPLELIVS

SEQ ID NO: 44910 - protein, 50 aa, Homo sapiens
  MAP TO AL157773.3; EXPRESSED IN PLACENTA, SIGNAL = 0.76; EXPRESSED IN ADULT LIVER, SIGNAL = 0.97; EXPRESSED IN FETAL LIVER, SIGNAL = 0.6; EXPRESSED IN BONE MARROW, SIGNAL = 0.75; EXPRESSED IN LUNG, SIGNAL = 1.1; EXPRESSED IN BRAIN, SIGNAL = 0.81; EST_HUMAN HIT: AI419882.1, EVALUE 9.00e-08; SWISSPROT HIT: P50463, EVALUE 1.20e+00
LEAGKSKIKAPADLVSGEGPILHRYCLPAASSSLFYEGTNVTDEGRAFMA

SEQ ID NO: 44911 - protein, 50 aa, Homo sapiens
  MAP TO AL157773.3; EXPRESSED IN PLACENTA, SIGNAL = 0.76; EXPRESSED IN ADULT LIVER, SIGNAL = 0.97; EXPRESSED IN FETAL LIVER, SIGNAL = 0.6; EXPRESSED IN BONE MARROW, SIGNAL = 0.75; EXPRESSED IN LUNG, SIGNAL = 1.1; EXPRESSED IN BRAIN, SIGNAL = 0.81; EST_HUMAN HIT: AI419882.1, EVALUE 2.00e-08; SWISSPROT HIT: P18901, EVALUE 1.40e-01
WKLGSPRSRRQQIWCLARAPFFIDIAFQLHLQASFMKAQMSLMKAEPSWP

SEQ ID NO: 44912 - protein, 49 aa, Homo sapiens
  MAP TO AL136146.5; EXPRESSED IN ADULT LIVER, SIGNAL = 0.87; EXPRESSED IN BRAIN, SIGNAL = 0.82; EXPRESSED IN PLACENTA, SIGNAL = 0.86; EXPRESSED IN FETAL LIVER, SIGNAL = 0.9; EXPRESSED IN BONE MARROW, SIGNAL = 0.75; EST_HUMAN HIT: AI815852.1, EVALUE 2.00e-21; SWISSPROT HIT: P23949, EVALUE 1.60e+00
RASCSPGTTSPMSATYQATSCAAMDGASRAPGSVTGCLTASTRVMRRSA

SEQ ID NO: 44913 - protein, 27 aa, Homo sapiens
  MAP TO AC011023.3; EXPRESSED IN PLACENTA, SIGNAL = 3.6; EXPRESSED IN FETAL LIVER, SIGNAL = 1.4; EXPRESSED IN ADULT LIVER, SIGNAL =   1; EXPRESSED IN BRAIN, SIGNAL = 1.1; EXPRESSED IN BONE MARROW, SIGNAL = 1.1; EXPRESSED IN LUNG, SIGNAL = 0.98
KGEEEEEEEVGDGDDDDDAADVIAVDR

SEQ ID NO: 44914 - protein, 59 aa, Homo sapiens
  MAP TO AC013764.3; EXPRESSED IN PLACENTA, SIGNAL = 0.75; EXPRESSED IN ADULT LIVER, SIGNAL = 0.56; EXPRESSED IN FETAL LIVER, SIGNAL = 0.61; EXPRESSED IN BRAIN, SIGNAL = 0.5; EXPRESSED IN BONE MARROW, SIGNAL = 0.45; SWISSPROT HIT: O84754, EVALUE 4.60e+00
KLPADVEKPSVTDPLLKETARNQKHDQEDKQLLRSQLLSRVASSSEISLAFIFTEEIGP

SEQ ID NO: 44915 - protein, 51 aa, Homo sapiens
  MAP TO AC011938.3; EXPRESSED IN PLACENTA, SIGNAL = 0.74; EXPRESSED IN FETAL LIVER, SIGNAL = 0.64; EXPRESSED IN BONE MARROW, SIGNAL = 0.64; EXPRESSED IN ADULT LIVER, SIGNAL = 0.72; EXPRESSED IN BRAIN, SIGNAL = 0.55; SWISSPROT HIT: P30957, EVALUE 9.00e-16
MSKFDVCGIHVGILEVLHCILTESPEALNLIAEGHIKSIISLLDKHGRNHK

SEQ ID NO: 44916 - protein, 34 aa, Homo sapiens
  MAP TO AL161422.3; EXPRESSED IN BRAIN, SIGNAL = 0.54; EXPRESSED IN BONE MARROW, SIGNAL = 0.49; EXPRESSED IN PLACENTA, SIGNAL = 0.61; EXPRESSED IN ADULT LIVER, SIGNAL = 0.63
GSPSVLISDTDILAFKIAVPKGEDEEIIHNLGEM

SEQ ID NO: 44917 - protein, 26 aa, Homo sapiens
  MAP TO AC021000.3; EXPRESSED IN FETAL LIVER, SIGNAL = 0.76; EXPRESSED IN BRAIN, SIGNAL = 0.95; EXPRESSED IN PLACENTA, SIGNAL = 0.86; EXPRESSED IN BONE MARROW, SIGNAL = 0.93
MTALRGRPGAKARNSLECLGGRDRLC

SEQ ID NO: 44918 - protein, 25 aa, Homo sapiens
  MAP TO AC021000.3; EXPRESSED IN FETAL LIVER, SIGNAL = 0.76; EXPRESSED IN BRAIN, SIGNAL = 0.95; EXPRESSED IN PLACENTA, SIGNAL = 0.86; EXPRESSED IN BONE MARROW, SIGNAL = 0.93
QRRSLPPRHSRLFLALAPGLPLRAV

SEQ ID NO: 44919 - protein, 68 aa, Homo sapiens
  MAP TO AL139008.3; EXPRESSED IN LUNG, SIGNAL = 0.97; EXPRESSED IN PLACENTA, SIGNAL = 0.95; EXPRESSED IN FETAL LIVER, SIGNAL = 0.82; EXPRESSED IN ADULT LIVER, SIGNAL = 0.94; EXPRESSED IN BRAIN, SIGNAL = 1.1; EXPRESSED IN BONE MARROW, SIGNAL = 0.97; SWISSPROT HIT: P38414, EVALUE 3.10e+00; EST_HUMAN HIT: AA114270.1, EVALUE 7.00e-20
MRKLLSFGRRLGQALLSSMDQEYAGRGYHIRDWELRKIHRAAIKGDAAEVEHCLTRRFRDLDVRDRKD

SEQ ID NO: 44920 - protein, 58 aa, Homo sapiens
  MAP TO AC026206.1; EXPRESSED IN ADULT LIVER, SIGNAL =   1; EXPRESSED IN BONE MARROW, SIGNAL = 0.77; EXPRESSED IN LUNG, SIGNAL =   1; EXPRESSED IN PLACENTA, SIGNAL = 0.89; EXPRESSED IN FETAL LIVER, SIGNAL = 0.82; EXPRESSED IN BRAIN, SIGNAL = 0.88; EST_HUMAN HIT: AI272244.1, EVALUE 2.00e-16; SWISSPROT HIT: P14781, EVALUE 2.00e-10
RTVITVPPSKMDVTVGESIVLPCQVSHDPSIEVVFVWFFNGDVIDLKKGVAHFERIGG

SEQ ID NO: 44921 - protein, 19 aa, Homo sapiens
  MAP TO AC026206.1; EXPRESSED IN ADULT LIVER, SIGNAL =   1; EXPRESSED IN BONE MARROW, SIGNAL = 0.77; EXPRESSED IN LUNG, SIGNAL =   1; EXPRESSED IN PLACENTA, SIGNAL = 0.89; EXPRESSED IN FETAL LIVER, SIGNAL = 0.82; EXPRESSED IN BRAIN, SIGNAL = 0.88
RELSLPSHLPKWMLQLARV

SEQ ID NO: 44922 - protein, 43 aa, Homo sapiens
  MAP TO AC026707.2; EXPRESSED IN BONE MARROW, SIGNAL = 0.83; EXPRESSED IN LUNG, SIGNAL = 1.1; EXPRESSED IN ADULT LIVER, SIGNAL = 1.4; EXPRESSED IN BRAIN, SIGNAL = 0.82; EXPRESSED IN PLACENTA, SIGNAL = 1.1; EXPRESSED IN FETAL LIVER, SIGNAL = 0.96; EST_HUMAN HIT: AA334609.1, EVALUE 1.00e-17; SWISSPROT HIT: P98087, EVALUE 2.50e-01
IAFMASLATHFSNQNSGIIFSSVETNIGNFFDVMTGRFGAPVS

SEQ ID NO: 44923 - protein, 33 aa, Homo sapiens
  MAP TO AC026707.2; EXPRESSED IN BONE MARROW, SIGNAL = 0.83; EXPRESSED IN LUNG, SIGNAL = 1.1; EXPRESSED IN ADULT LIVER, SIGNAL = 1.4; EXPRESSED IN BRAIN, SIGNAL = 0.82; EXPRESSED IN PLACENTA, SIGNAL = 1.1; EXPRESSED IN FETAL LIVER, SIGNAL = 0.96; EST_HUMAN HIT: AA334609.1, EVALUE 1.00e-11
LHSWLLWQPTSAIRTVGLSSAVLRPTLETSLMS

SEQ ID NO: 44924 - protein, 47 aa, Homo sapiens
  MAP TO AL050342.42; EXPRESSED IN PLACENTA, SIGNAL = 0.85; EXPRESSED IN FETAL LIVER, SIGNAL = 0.69; EXPRESSED IN BONE MARROW, SIGNAL = 0.74; EXPRESSED IN LUNG, SIGNAL = 0.83; EXPRESSED IN ADULT LIVER, SIGNAL = 0.8; EXPRESSED IN BRAIN, SIGNAL = 0.83
GKVGDMAGGRGRGVGEGKVGDMAGGRGRGVGEGKVGDMAGGRGRDMG

SEQ ID NO: 44925 - protein, 65 aa, Homo sapiens
  MAP TO AC009943.4; EXPRESSED IN ADULT LIVER, SIGNAL = 0.63; EXPRESSED IN PLACENTA, SIGNAL = 0.6; EXPRESSED IN FETAL LIVER, SIGNAL = 0.68; EXPRESSED IN BRAIN, SIGNAL = 0.55; EXPRESSED IN BONE MARROW, SIGNAL = 0.78; SWISSPROT HIT: P21827, EVALUE 4.50e+00; EST_HUMAN HIT: BE177830.1, EVALUE 1.00e-26
VFDILNSAELVCLTRRILLPKNVIVECMVATHHNSRNASIWLGCGHTDRGQLSFLDLNTEGYTSE

SEQ ID NO: 44926 - protein, 34 aa, Homo sapiens
  MAP TO AC022863.3; EXPRESSED IN LUNG, SIGNAL = 0.99; EXPRESSED IN PLACENTA, SIGNAL =   1; EXPRESSED IN ADULT LIVER, SIGNAL = 0.95; EXPRESSED IN BRAIN, SIGNAL = 0.86; EXPRESSED IN FETAL LIVER, SIGNAL = 0.89; EXPRESSED IN BONE MARROW, SIGNAL = 0.87
PVNCSPDLLEGDEKPDGRPREAIVDKEGHNILKL

SEQ ID NO: 44927 - protein, 47 aa, Homo sapiens
  MAP TO AL122006.5; EXPRESSED IN PLACENTA, SIGNAL = 0.71; EXPRESSED IN FETAL LIVER, SIGNAL = 0.88; EXPRESSED IN BONE MARROW, SIGNAL = 0.64; EXPRESSED IN ADULT LIVER, SIGNAL = 1.3; EXPRESSED IN BRAIN, SIGNAL = 0.72; SWISSPROT HIT: Q07008, EVALUE 8.10e+00; EST_HUMAN HIT: AW009167.1, EVALUE 5.20e+00
LKGDSEAFQNKEACKNCMLDVCENQGSSFKLQNTYKELPQIYLEKED

SEQ ID NO: 44928 - protein, 32 aa, Homo sapiens
  MAP TO AL161668.1; EXPRESSED IN BONE MARROW, SIGNAL = 0.96; EXPRESSED IN ADULT LIVER, SIGNAL = 1.1; EXPRESSED IN LUNG, SIGNAL = 1.1; EXPRESSED IN PLACENTA, SIGNAL =   1; EXPRESSED IN FETAL LIVER, SIGNAL = 0.85; EXPRESSED IN BRAIN, SIGNAL =   1
WHRPEQDSAPFCCFCCWGCGWQRSQSVPSPRA

SEQ ID NO: 44929 - protein, 62 aa, Homo sapiens
  MAP TO AC011778.3; EXPRESSED IN PLACENTA, SIGNAL = 0.58; EXPRESSED IN FETAL LIVER, SIGNAL = 0.64; EXPRESSED IN BONE MARROW, SIGNAL = 0.58; EXPRESSED IN ADULT LIVER, SIGNAL = 0.72; EXPRESSED IN BRAIN, SIGNAL = 0.52; EST_HUMAN HIT: AV749264.1, EVALUE 1.50e+00
WWHISMMSVDFQDFTLVFTSSLQMIHQFYFLMTYLQWHSFLQYMSLSTEFLVAQCSHLMLPK

SEQ ID NO: 44930 - protein, 87 aa, Homo sapiens
  MAP TO AL121586.28; EXPRESSED IN BONE MARROW, SIGNAL = 1.2; EXPRESSED IN PLACENTA, SIGNAL = 0.81; EXPRESSED IN ADULT LIVER, SIGNAL = 0.82; EXPRESSED IN BRAIN, SIGNAL = 0.88; EXPRESSED IN FETAL LIVER, SIGNAL = 0.88; SWISSPROT HIT: P46582, EVALUE 8.30e-01; EST_HUMAN HIT: AL037087.2, EVALUE 1.00e-25
VVLLQAQLTLERKQKQDYITRSAQTSRELAGLHHSLSHSLLAVAQAPEATVLEAETRRLDESLTQSLTSPGPVLLHPSPSTTQAASR

SEQ ID NO: 44931 - protein, 40 aa, Homo sapiens
  MAP TO AL121586.28; EXPRESSED IN BONE MARROW, SIGNAL = 1.2; EXPRESSED IN PLACENTA, SIGNAL = 0.81; EXPRESSED IN ADULT LIVER, SIGNAL = 0.82; EXPRESSED IN BRAIN, SIGNAL = 0.88; EXPRESSED IN FETAL LIVER, SIGNAL = 0.88; EST_HUMAN HIT: T85911.1, EVALUE 2.00e-04
SAALPFFFFSCPPGGPAASSADFGAEAEAGLHHPLSTDQP

SEQ ID NO: 44932 - protein, 120 aa, Homo sapiens
  MAP TO AP001432.1; EXPRESSED IN PLACENTA, SIGNAL = 0.67; EXPRESSED IN FETAL LIVER, SIGNAL = 0.89; EXPRESSED IN LUNG, SIGNAL = 1.5; EXPRESSED IN BRAIN, SIGNAL = 2.3; EXPRESSED IN ADULT LIVER, SIGNAL = 0.93; EXPRESSED IN BONE MARROW, SIGNAL = 0.68; EST_HUMAN HIT: BE675355.1, EVALUE 1.00e-50; SWISSPROT HIT: P53804, EVALUE 8.00e-51
VHPELLPESSGDDGQGLVTSASDVTGNHAALHRDPSVFSAGDSPGEAPSALLPGPPPGQPEATQLTGPKRAGQAALSERSPVADRKQPVPPGRAARSSQSPKKPFNSIIEHLSVVFPCYN

SEQ ID NO: 44933 - protein, 49 aa, Homo sapiens
  MAP TO AC013705.3; EXPRESSED IN PLACENTA, SIGNAL = 0.84; EXPRESSED IN ADULT LIVER, SIGNAL = 0.81; EXPRESSED IN BRAIN, SIGNAL = 0.63; EXPRESSED IN FETAL LIVER, SIGNAL = 0.73; EXPRESSED IN BONE MARROW, SIGNAL = 0.62; EST_HUMAN HIT: BF354807.1, EVALUE 5.90e-01; SWISSPROT HIT: O14978, EVALUE 8.10e+00
LKNKDDGDGSGGIIRTIATNIYGTALCARQCSKCLTCSHSCHAHKKTPV

SEQ ID NO: 44934 - protein, 17 aa, Homo sapiens
  MAP TO AC013705.3; EXPRESSED IN PLACENTA, SIGNAL = 0.84; EXPRESSED IN ADULT LIVER, SIGNAL = 0.81; EXPRESSED IN BRAIN, SIGNAL = 0.63; EXPRESSED IN FETAL LIVER, SIGNAL = 0.73; EXPRESSED IN BONE MARROW, SIGNAL = 0.62
NSRTKTTVMVVVASYEQ

SEQ ID NO: 44935 - protein, 17 aa, Homo sapiens
  MAP TO AC020760.3; EXPRESSED IN PLACENTA, SIGNAL = 0.62; EXPRESSED IN ADULT LIVER, SIGNAL = 0.61; EXPRESSED IN FETAL LIVER, SIGNAL = 0.47; EXPRESSED IN BRAIN, SIGNAL = 0.79; EST_HUMAN HIT: BE844159.1, EVALUE 4.90e-02
WRPQKPLRRNTVTFALI

SEQ ID NO: 44936 - protein, 69 aa, Homo sapiens
  MAP TO AC016201.5; EXPRESSED IN FETAL LIVER, SIGNAL = 6.6; EXPRESSED IN BRAIN, SIGNAL = 1.3; EXPRESSED IN BONE MARROW, SIGNAL = 1.1; EXPRESSED IN PLACENTA, SIGNAL =   1; EST_HUMAN HIT: BE064410.1, EVALUE 6.00e-21; SWISSPROT HIT: Q60050, EVALUE 7.60e+00
CFRMMGNMVKLVKSMGMSLLPRFFSHIVSAFVRGNAVRNTMSADEAFHESMDGSLGKSTGCRIGKPIST

SEQ ID NO: 44937 - protein, 33 aa, Homo sapiens
  MAP TO AL121910.19; EXPRESSED IN LUNG, SIGNAL = 1.2; EXPRESSED IN BONE MARROW, SIGNAL = 0.88; EXPRESSED IN PLACENTA, SIGNAL = 1.1; EXPRESSED IN ADULT LIVER, SIGNAL = 1.4; EXPRESSED IN FETAL LIVER, SIGNAL = 0.81; EXPRESSED IN BRAIN, SIGNAL = 0.93; SWISSPROT HIT: P08547, EVALUE 8.60e-02; EST_HUMAN HIT: AI806178.1, EVALUE 5.00e-04
INSNPIKILASSFVEINKLNLKFMWRSKRPRTA

SEQ ID NO: 44938 - protein, 40 aa, Homo sapiens
  MAP TO AC025752.2; EXPRESSED IN LUNG, SIGNAL = 1.1; EXPRESSED IN PLACENTA, SIGNAL = 1.1; EXPRESSED IN FETAL LIVER, SIGNAL = 1.1; EXPRESSED IN BONE MARROW, SIGNAL = 0.89; EXPRESSED IN ADULT LIVER, SIGNAL = 1.5; EXPRESSED IN BRAIN, SIGNAL = 0.88; SWISSPROT HIT: Q00224, EVALUE 4.80e+00
MGKGFQGLSYLVSDQSLGVAGSGGVAQLIFGGGAFGLMEG

SEQ ID NO: 44939 - protein, 40 aa, Homo sapiens
  MAP TO AC006457.3; EXPRESSED IN PLACENTA, SIGNAL = 0.61; EXPRESSED IN FETAL LIVER, SIGNAL = 0.55; EXPRESSED IN BONE MARROW, SIGNAL = 0.63; EXPRESSED IN ADULT LIVER, SIGNAL = 0.59; EXPRESSED IN BRAIN, SIGNAL = 0.63; EST_HUMAN HIT: BE783912.1, EVALUE 8.00e-14; SWISSPROT HIT: Q03923, EVALUE 6.00e-15
LTFRDIAIEFSLEEWQCLDCAQRNLYRDVMLENYRNLVSL

SEQ ID NO: 44940 - protein, 26 aa, Homo sapiens
  MAP TO AC006457.3; EXPRESSED IN PLACENTA, SIGNAL = 0.61; EXPRESSED IN FETAL LIVER, SIGNAL = 0.55; EXPRESSED IN BONE MARROW, SIGNAL = 0.63; EXPRESSED IN ADULT LIVER, SIGNAL = 0.59; EXPRESSED IN BRAIN, SIGNAL = 0.63; EST_HUMAN HIT: BE560374.1, EVALUE 2.80e-02
VDIQRHSYRILSGGMAMPGLCSAEFI

SEQ ID NO: 44941 - protein, 63 aa, Homo sapiens
  MAP TO AC019042.3; EXPRESSED IN ADULT LIVER, SIGNAL = 0.63; EXPRESSED IN BRAIN, SIGNAL = 0.63; EXPRESSED IN FETAL LIVER, SIGNAL = 0.62; EXPRESSED IN PLACENTA, SIGNAL = 2.9; EXPRESSED IN BONE MARROW, SIGNAL = 0.61; EST_HUMAN HIT: BF369877.1, EVALUE 7.00e-07; SWISSPROT HIT: Q63515, EVALUE 5.00e-05
SVATACRDPGVPMNGTRNGDGREPGDTVVFQCDPGYELQGEERITCIQVENRYFWQPSPPVCI

SEQ ID NO: 44942 - protein, 33 aa, Homo sapiens
  MAP TO AC016057.3; EXPRESSED IN ADULT LIVER, SIGNAL = 0.65; EXPRESSED IN FETAL LIVER, SIGNAL = 0.73; EXPRESSED IN BRAIN, SIGNAL = 0.71; EXPRESSED IN BONE MARROW, SIGNAL = 0.61; EXPRESSED IN PLACENTA, SIGNAL = 0.66
AQVDIKDNFGRNFLHLTVQQPYGLKNLRPEFMQ

SEQ ID NO: 44943 - protein, 128 aa, Homo sapiens
  MAP TO AL139248.2; EXPRESSED IN PLACENTA, SIGNAL = 0.64; EXPRESSED IN FETAL LIVER, SIGNAL = 0.6; EXPRESSED IN BONE MARROW, SIGNAL = 0.81; EXPRESSED IN ADULT LIVER, SIGNAL = 0.62; EXPRESSED IN BRAIN, SIGNAL = 0.65; EST_HUMAN HIT: AW440431.1, EVALUE 8.00e-34; SWISSPROT HIT: Q62786, EVALUE 1.00e-05
KDFQVNITADSLFAEGKPLELVCLVVSSGRDPQLQGIWFFNGTEIAHIDAGGVLGLKNDYKERASQGELQVSKLGPKAFSLKIFSLGPEDEGAYRCVVAEVMKTRTGSWQVLQRKQSPDSHVHLRKPA

SEQ ID NO: 44944 - protein, 47 aa, Homo sapiens
  MAP TO AC022882.3; EXPRESSED IN PLACENTA, SIGNAL = 0.63; EXPRESSED IN FETAL LIVER, SIGNAL = 0.59; EXPRESSED IN BONE MARROW, SIGNAL = 0.5; EXPRESSED IN BRAIN, SIGNAL = 0.48; EST_HUMAN HIT: AI239808.1, EVALUE 6.00e-08; SWISSPROT HIT: Q95155, EVALUE 4.00e-09
NLGLVVPIIGDFWLHSPMYYFLGVLSFLDVCYSTVVTPKMLVNFLAK

SEQ ID NO: 44945 - protein, 57 aa, Homo sapiens
  MAP TO AC015737.4; EXPRESSED IN BONE MARROW, SIGNAL = 1.7; EXPRESSED IN PLACENTA, SIGNAL = 1.3; EXPRESSED IN ADULT LIVER, SIGNAL = 1.2; EXPRESSED IN FETAL LIVER, SIGNAL = 1.2; EXPRESSED IN BRAIN, SIGNAL = 1.3; EXPRESSED IN LUNG, SIGNAL = 0.95; EST_HUMAN HIT: AU138651.1, EVALUE 1.20e-02; SWISSPROT HIT: P38623, EVALUE 7.00e-01
GLSVFKDVLNYIFKTVVLYNSICLEDHHMAFLRESFVSRIDGFLVLLTSRMKPRTLA

SEQ ID NO: 44946 - protein, 28 aa, Homo sapiens
  MAP TO AP000431.3; EXPRESSED IN FETAL LIVER, SIGNAL = 0.52; EXPRESSED IN BONE MARROW, SIGNAL = 0.53; EXPRESSED IN ADULT LIVER, SIGNAL = 0.61; EXPRESSED IN BRAIN, SIGNAL = 0.61
LLYLYALMLAGFILGCMVQTTDYQIEPM

SEQ ID NO: 44947 - protein, 29 aa, Homo sapiens
  MAP TO AP000431.3; EXPRESSED IN FETAL LIVER, SIGNAL = 0.52; EXPRESSED IN BONE MARROW, SIGNAL = 0.53; EXPRESSED IN ADULT LIVER, SIGNAL = 0.61; EXPRESSED IN BRAIN, SIGNAL = 0.61; EST_HUMAN HIT: AA846545.1, EVALUE 1.60e-02
CFYISMHLCWLVLYWAVWFKLQTTRLSRW

SEQ ID NO: 44948 - protein, 31 aa, Homo sapiens
  MAP TO AC010283.5; EXPRESSED IN ADULT LIVER, SIGNAL = 0.77; EXPRESSED IN BONE MARROW, SIGNAL = 0.77; EXPRESSED IN PLACENTA, SIGNAL = 0.82; EXPRESSED IN FETAL LIVER, SIGNAL = 0.66; EXPRESSED IN BRAIN, SIGNAL = 0.84; EXPRESSED IN LUNG, SIGNAL = 0.86
LHYNPKFLKACFDILLTITTECKALSPNYVY

SEQ ID NO: 44949 - protein, 70 aa, Homo sapiens
  MAP TO AC022939.2; EXPRESSED IN LUNG, SIGNAL = 0.93; EXPRESSED IN PLACENTA, SIGNAL = 0.87; EXPRESSED IN ADULT LIVER, SIGNAL =   1; EXPRESSED IN FETAL LIVER, SIGNAL = 0.71; EXPRESSED IN BRAIN, SIGNAL = 0.83; EXPRESSED IN BONE MARROW, SIGNAL = 0.74; EST_HUMAN HIT: BF509244.1, EVALUE 1.00e-34; SWISSPROT HIT: O08791, EVALUE 5.10e-01
STCVPPNNVSVPLLMPLVTLMERQAVTFEGTDMWEKNDQSCEIMLNHLATARFMAEAADSYRMNAERILA

SEQ ID NO: 44950 - protein, 26 aa, Homo sapiens
  MAP TO AC021786.2; EXPRESSED IN PLACENTA, SIGNAL = 1.2; EXPRESSED IN ADULT LIVER, SIGNAL = 1.3; EXPRESSED IN FETAL LIVER, SIGNAL = 0.97; EXPRESSED IN BONE MARROW, SIGNAL = 0.98; EXPRESSED IN LUNG, SIGNAL = 1.3; EXPRESSED IN BRAIN, SIGNAL =   1; SWISSPROT HIT: P45576, EVALUE 6.60e+00
ESTIILKHQIGRKVRSREHQLCRKGT

SEQ ID NO: 44951 - protein, 57 aa, Homo sapiens
  MAP TO AC011207.3; EXPRESSED IN BONE MARROW, SIGNAL = 0.56; EXPRESSED IN PLACENTA, SIGNAL = 0.73; EXPRESSED IN ADULT LIVER, SIGNAL = 0.79; EXPRESSED IN FETAL LIVER, SIGNAL = 0.68; EXPRESSED IN BRAIN, SIGNAL =   1; EST_HUMAN HIT: AW162932.1, EVALUE 9.00e-25; SWISSPROT HIT: Q15700, EVALUE 7.00e-29
MFDYDKSKDSGLPSQGLSFKYGDILHVINASDDEWWQARRVMLEGDSEEMGVIPSKR

SEQ ID NO: 44952 - protein, 57 aa, Homo sapiens
  MAP TO AC011207.3; EXPRESSED IN BONE MARROW, SIGNAL = 0.56; EXPRESSED IN PLACENTA, SIGNAL = 0.73; EXPRESSED IN ADULT LIVER, SIGNAL = 0.79; EXPRESSED IN FETAL LIVER, SIGNAL = 0.68; EXPRESSED IN BRAIN, SIGNAL =   1; SWISSPROT HIT: P27156, EVALUE 4.60e+00; EST_HUMAN HIT: AW162932.1, EVALUE 4.00e-24
CSTTTRARTVGCQVKDLVLNMEIFSTLSMPLMMSGGKPGESCWRETVRRWGSSPAKG

SEQ ID NO: 44953 - protein, 30 aa, Homo sapiens
  MAP TO AP001439.1; EXPRESSED IN BONE MARROW, SIGNAL = 0.85; EXPRESSED IN LUNG, SIGNAL = 0.84; EXPRESSED IN PLACENTA, SIGNAL = 0.9; EXPRESSED IN ADULT LIVER, SIGNAL = 0.95; EXPRESSED IN FETAL LIVER, SIGNAL = 0.88; EXPRESSED IN BRAIN, SIGNAL = 0.96; EST_HUMAN HIT: BE734382.1, EVALUE 3.50e+00
YYKGHTDEQPDGRDARGEVRLKRKRDSMPF

SEQ ID NO: 44954 - protein, 58 aa, Homo sapiens
  MAP TO AC021486.3; EXPRESSED IN PLACENTA, SIGNAL = 0.91; EXPRESSED IN BRAIN, SIGNAL = 0.93; EXPRESSED IN BONE MARROW, SIGNAL = 0.91; EXPRESSED IN ADULT LIVER, SIGNAL = 0.99; EXPRESSED IN FETAL LIVER, SIGNAL = 0.92; SWISSPROT HIT: P44798, EVALUE 3.50e+00
GRHNLLTLQLFPLQGKQLVSLDPPKARGCYAERDWIPIIQEEAVHKLVDRVSKAVMDK

SEQ ID NO: 44955 - protein, 18 aa, Homo sapiens
  MAP TO AC021486.3; EXPRESSED IN PLACENTA, SIGNAL = 0.91; EXPRESSED IN BRAIN, SIGNAL = 0.93; EXPRESSED IN BONE MARROW, SIGNAL = 0.91; EXPRESSED IN ADULT LIVER, SIGNAL = 0.99; EXPRESSED IN FETAL LIVER, SIGNAL = 0.92
EGTICSPSSSSPSRGSSW

SEQ ID NO: 44956 - protein, 61 aa, Homo sapiens
  MAP TO AC022020.3; EXPRESSED IN PLACENTA, SIGNAL = 0.58; EXPRESSED IN BRAIN, SIGNAL = 0.51; EXPRESSED IN BONE MARROW, SIGNAL = 0.49; EST_HUMAN HIT: BF688768.1, EVALUE 5.30e-01; SWISSPROT HIT: Q02343, EVALUE 1.50e+00
MRKLRYETMKPLAQGKSQAPETDGAGSQESAEAGLPTAQPHHTQQLLPKMGVPGREAMQEL

SEQ ID NO: 44957 - protein, 60 aa, Homo sapiens
  MAP TO AC018529.4; EXPRESSED IN PLACENTA, SIGNAL = 0.55; EXPRESSED IN BRAIN, SIGNAL = 0.49; EST_HUMAN HIT: BE891425.1, EVALUE 1.60e+00; SWISSPROT HIT: Q10441, EVALUE 1.50e+00
DNAWDMGRTVTITIYREDTEEHTASKLQRLSPGGPALTRAPECHDIRHLCTSSDKNHFHL

SEQ ID NO: 44958 - protein, 34 aa, Homo sapiens
  MAP TO AC005103.2; EXPRESSED IN PLACENTA, SIGNAL = 0.83; EXPRESSED IN ADULT LIVER, SIGNAL = 0.83; EXPRESSED IN FETAL LIVER, SIGNAL = 0.57; EXPRESSED IN BRAIN, SIGNAL = 0.61; EXPRESSED IN BONE MARROW, SIGNAL = 0.81; EST_HUMAN HIT: AW993777.1, EVALUE 1.00e-11
ISSEDEPYNHQHGIVPLVTFIDEHIFLPVLVIEK

SEQ ID NO: 44959 - protein, 60 aa, Homo sapiens
  MAP TO AC013593.3; EXPRESSED IN PLACENTA, SIGNAL = 0.82; EXPRESSED IN LUNG, SIGNAL = 2.8; EXPRESSED IN FETAL LIVER, SIGNAL = 0.73; EXPRESSED IN BRAIN, SIGNAL = 0.75; EXPRESSED IN BONE MARROW, SIGNAL = 0.78; EXPRESSED IN ADULT LIVER, SIGNAL = 0.85; EST_HUMAN HIT: BF594611.1, EVALUE 5.00e-06; SWISSPROT HIT: P13584, EVALUE 3.00e-18
MVPSFLSLSFSSLGLWASGLILVLGFLKLIHLLLRRQTLAKAMDKFPGPPTHWLFGHALE

SEQ ID NO: 44960 - protein, 55 aa, Homo sapiens
  MAP TO AC013317.4; EXPRESSED IN LUNG, SIGNAL = 0.99; EXPRESSED IN PLACENTA, SIGNAL = 1.1; EXPRESSED IN ADULT LIVER, SIGNAL = 0.82; EXPRESSED IN BONE MARROW, SIGNAL = 0.79; EXPRESSED IN BRAIN, SIGNAL =   1; EXPRESSED IN FETAL LIVER, SIGNAL = 1.1; SWISSPROT HIT: P35932, EVALUE 7.90e+00; EST_HUMAN HIT: AV724985.1, EVALUE 6.30e+00
VKATVFLEKMMILFLTVVYMKALCDIQGQMFVGCGNKVLEDREKSGLKREIQNTG

SEQ ID NO: 44961 - protein, 81 aa, Homo sapiens
  MAP TO AC015638.4; EXPRESSED IN PLACENTA, SIGNAL = 0.65; EXPRESSED IN FETAL LIVER, SIGNAL = 0.52; EXPRESSED IN ADULT LIVER, SIGNAL = 0.63; EXPRESSED IN BRAIN, SIGNAL = 0.48; EXPRESSED IN BONE MARROW, SIGNAL = 0.49; EST_HUMAN HIT: R41411.1, EVALUE 2.60e-01; SWISSPROT HIT: P22316, EVALUE 9.40e-01
VTMKIIAMSPAGFWQSRRNRYDLLVTSLGVVWVVLHFALLVSIEVKLISADYFSLVQFCSVLFPVSFYSTSTCSEVLDGPP

SEQ ID NO: 44962 - protein, 74 aa, Homo sapiens
  MAP TO AC007595.3; EXPRESSED IN FETAL LIVER, SIGNAL = 0.74; EXPRESSED IN BONE MARROW, SIGNAL = 0.76; EXPRESSED IN PLACENTA, SIGNAL = 0.64; EXPRESSED IN BRAIN, SIGNAL = 0.47; EST_HUMAN HIT: BE387950.1, EVALUE 9.00e-26; SWISSPROT HIT: Q09743, EVALUE 4.40e+00
ISVPETWAKFSNDNIKHSQNMRANSIQLREEAEHLFETLSDQMWRQFTDTNLAFNARISEVTDVKNKLQTQLAK

SEQ ID NO: 44963 - protein, 49 aa, Homo sapiens
  MAP TO AC007595.3; EXPRESSED IN FETAL LIVER, SIGNAL = 0.74; EXPRESSED IN BONE MARROW, SIGNAL = 0.76; EXPRESSED IN PLACENTA, SIGNAL = 0.64; EXPRESSED IN BRAIN, SIGNAL = 0.47; EST_HUMAN HIT: BE391867.1, EVALUE 6.00e-20; SWISSPROT HIT: P11869, EVALUE 2.10e+00
TTTSNTLRTCGPTPSSCGRRRSTSLRPCRIRCGGSSQTPTWPSTPASLR

SEQ ID NO: 44964 - protein, 26 aa, Homo sapiens
  MAP TO AL121582.14; EXPRESSED IN BONE MARROW, SIGNAL = 0.85; EXPRESSED IN PLACENTA, SIGNAL = 1.1; EXPRESSED IN ADULT LIVER, SIGNAL = 1.1; EXPRESSED IN FETAL LIVER, SIGNAL = 0.77; EXPRESSED IN BRAIN, SIGNAL = 0.88
TMNKEEIIKHCGHLKATEIILVINYK

SEQ ID NO: 44965 - protein, 69 aa, Homo sapiens
  MAP TO AC016498.4; EXPRESSED IN LUNG, SIGNAL = 1.1; EXPRESSED IN BONE MARROW, SIGNAL = 0.78; EXPRESSED IN PLACENTA, SIGNAL =   1; EXPRESSED IN ADULT LIVER, SIGNAL = 0.9; EXPRESSED IN FETAL LIVER, SIGNAL = 0.93; EXPRESSED IN BRAIN, SIGNAL = 0.83; EST_HUMAN HIT: BE877915.1, EVALUE 1.10e-02
ACRQPRLCPCPRLCRTSGLTLGSQHWQGASLLLWGRCTLLNCSLLCLCRRWSGAGAGLWSGRCGCCGGS

SEQ ID NO: 44966 - protein, 100 aa, Homo sapiens
  MAP TO AC010492.4; EXPRESSED IN PLACENTA, SIGNAL = 0.54; EXPRESSED IN ADULT LIVER, SIGNAL = 0.52; EXPRESSED IN FETAL LIVER, SIGNAL = 0.85; EXPRESSED IN BRAIN, SIGNAL = 0.52; EXPRESSED IN BONE MARROW, SIGNAL = 1.4; EST_HUMAN HIT: AW403428.1, EVALUE 6.00e-22; SWISSPROT HIT: Q64281, EVALUE 7.00e-17
FYNKPTLSALPSPVVASGGNMTLRCGSQKGYHHFVLMKEGEHQLPRTLDSQQLHSGGFQALFPVGPVTPSHRWRFTCYYYYTNTPRVWSHPSDPLEILPS

SEQ ID NO: 44967 - protein, 27 aa, Homo sapiens
  MAP TO AC020693.3; EXPRESSED IN PLACENTA, SIGNAL = 0.48; EXPRESSED IN ADULT LIVER, SIGNAL = 0.54; EXPRESSED IN BRAIN, SIGNAL = 0.48; EXPRESSED IN BONE MARROW, SIGNAL = 0.48
SLFMTNNKSYIRLNLVYRSLNISSLLH

SEQ ID NO: 44968 - protein, 63 aa, Homo sapiens
  MAP TO AC008616.2; EXPRESSED IN PLACENTA, SIGNAL = 0.85; EXPRESSED IN ADULT LIVER, SIGNAL = 0.98; EXPRESSED IN FETAL LIVER, SIGNAL = 0.78; EXPRESSED IN BRAIN, SIGNAL = 1.1; EXPRESSED IN BONE MARROW, SIGNAL = 0.82; EXPRESSED IN LUNG, SIGNAL = 0.92; SWISSPROT HIT: Q92793, EVALUE 5.90e+00; EST_HUMAN HIT: BF529115.1, EVALUE 9.00e-27
NFPAEGCSSMTPLMRNRTQRQQMDPLLGRSLGRAGCPRKMNGQQMSMISPGSGRKTTSPGRLQ

SEQ ID NO: 44969 - protein, 66 aa, Homo sapiens
  MAP TO AC021000.3; EXPRESSED IN ADULT LIVER, SIGNAL = 0.7; EXPRESSED IN FETAL LIVER, SIGNAL = 0.64; EXPRESSED IN PLACENTA, SIGNAL = 0.69; EXPRESSED IN BRAIN, SIGNAL = 0.91; EXPRESSED IN BONE MARROW, SIGNAL = 0.7; SWISSPROT HIT: Q09575, EVALUE 1.60e-01; EST_HUMAN HIT: BE544322.1, EVALUE 1.70e-01
CYWRIFFSKMRRLRVWKTWEPKKGGSRVTERSRSTRMPLCSRPGSSSPDRRKKTEAPTGRHLAKNG

SEQ ID NO: 44970 - protein, 46 aa, Homo sapiens
  MAP TO AL161646.3; EXPRESSED IN ADULT LIVER, SIGNAL = 0.83; EXPRESSED IN BRAIN, SIGNAL = 0.66; EXPRESSED IN BONE MARROW, SIGNAL = 0.74; EXPRESSED IN PLACENTA, SIGNAL = 0.74; EXPRESSED IN FETAL LIVER, SIGNAL = 0.79; SWISSPROT HIT: P70545, EVALUE 2.10e+00; EST_HUMAN HIT: W30979.1, EVALUE 3.50e-01
SKPGRLLQVSARHCCPGLPPGHLCISASAGYHHICRALLLPHTSLP

SEQ ID NO: 44971 - protein, 66 aa, Homo sapiens
  MAP TO AC019159.3; EXPRESSED IN PLACENTA, SIGNAL = 0.79; EXPRESSED IN ADULT LIVER, SIGNAL = 0.76; EXPRESSED IN FETAL LIVER, SIGNAL = 0.56; EXPRESSED IN BRAIN, SIGNAL = 0.68; EXPRESSED IN BONE MARROW, SIGNAL = 0.57; EST_HUMAN HIT: AW242597.1, EVALUE 2.00e-03; SWISSPROT HIT: P50532, EVALUE 3.40e+00
DKIWTSVQHNNTELTRVRGANPEKPYAMALDYGGSMEQLEAVIDGSEHCEQEVAYHCRRSRLLNTP

SEQ ID NO: 44972 - protein, 56 aa, Homo sapiens
  MAP TO AC006038.2; EXPRESSED IN LUNG, SIGNAL =   1; EXPRESSED IN ADULT LIVER, SIGNAL = 1.1; EXPRESSED IN BRAIN, SIGNAL = 0.84; EXPRESSED IN BONE MARROW, SIGNAL = 1.1; EXPRESSED IN PLACENTA, SIGNAL = 1.1; EXPRESSED IN FETAL LIVER, SIGNAL = 1.1; EST_HUMAN HIT: BE259141.1, EVALUE 7.20e-01
TGNRKSNLVNCWAHEMACVVLCHMTNPIMGKVAKNLRFSIGWEEFGERSEINGSPD

SEQ ID NO: 44973 - protein, 59 aa, Homo sapiens
  MAP TO AC008156.3; EXPRESSED IN PLACENTA, SIGNAL = 0.96; EXPRESSED IN BONE MARROW, SIGNAL = 1.2; EXPRESSED IN LUNG, SIGNAL = 0.97; EXPRESSED IN ADULT LIVER, SIGNAL = 0.93; EXPRESSED IN BRAIN, SIGNAL = 0.98; EXPRESSED IN FETAL LIVER, SIGNAL = 0.94; EST_HUMAN HIT: BF508546.1, EVALUE 4.00e-19; SWISSPROT HIT: P35320, EVALUE 1.80e-01
DPLANFFASVPATLHSAGLEVLVPEGGTLPLGDTTMIPLNWKLRLRTGYFGLLLRLSQQ

SEQ ID NO: 44974 - protein, 23 aa, Homo sapiens
  MAP TO AL138956.3; EXPRESSED IN ADULT LIVER, SIGNAL = 0.78; EXPRESSED IN BRAIN, SIGNAL = 0.57; EXPRESSED IN BONE MARROW, SIGNAL = 1.9; EXPRESSED IN PLACENTA, SIGNAL = 0.6; EXPRESSED IN FETAL LIVER, SIGNAL = 0.95
AQQHLENGPKEPYVTPALAELLE

SEQ ID NO: 44975 - protein, 21 aa, Homo sapiens
  MAP TO AL138956.3; EXPRESSED IN ADULT LIVER, SIGNAL = 0.78; EXPRESSED IN BRAIN, SIGNAL = 0.57; EXPRESSED IN BONE MARROW, SIGNAL = 1.9; EXPRESSED IN PLACENTA, SIGNAL = 0.6; EXPRESSED IN FETAL LIVER, SIGNAL = 0.95
PSSTWKMDPRNHMLLQPWQNC

SEQ ID NO: 44976 - protein, 79 aa, Homo sapiens
  MAP TO AC007956.5; EXPRESSED IN PLACENTA, SIGNAL = 0.93; EXPRESSED IN ADULT LIVER, SIGNAL = 1.1; EXPRESSED IN FETAL LIVER, SIGNAL = 0.94; EXPRESSED IN BRAIN, SIGNAL = 1.2; EXPRESSED IN BONE MARROW, SIGNAL = 1.2; EXPRESSED IN LUNG, SIGNAL = 1.1; EST_HUMAN HIT: BE615150.1, EVALUE 6.00e-16
EQQQYWYRQHLLSLQQRTKVHLPGHKKGPVVAKDTPEPVKEEVTVPATSQVPESPSSEEPPLPPPNEEVPPPLPPEEPQ

SEQ ID NO: 44977 - protein, 146 aa, Homo sapiens
  MAP TO AL133320.8; EXPRESSED IN PLACENTA, SIGNAL = 0.82; EXPRESSED IN ADULT LIVER, SIGNAL = 0.86; EXPRESSED IN FETAL LIVER, SIGNAL = 0.69; EXPRESSED IN BRAIN, SIGNAL = 0.68; EXPRESSED IN BONE MARROW, SIGNAL = 0.65; SWISSPROT HIT: P38427, EVALUE 1.00e+00
EQKDTNPIIFHDTEYVRMLLLTKNRFSSHPLENENIYPHKRTNFILERNCEILKSIIGNQSISLFKPQKTMPTVQRKDIQIPMSFKAGHTTVDDKLKKKTNKQTLENRSWNTLYNFSQNFSSLTKQFVGYLDKAVIHEMSAQTGKF

SEQ ID NO: 44978 - protein, 164 aa, Homo sapiens
  MAP TO AL157879.2; EXPRESSED IN BRAIN, SIGNAL = 0.76; EXPRESSED IN BONE MARROW, SIGNAL = 3.2; EXPRESSED IN FETAL LIVER, SIGNAL = 1.8; SWISSPROT HIT: P03200, EVALUE 2.50e-02; EST_HUMAN HIT: BF377897.1, EVALUE 3.00e-47
APTMDAQPDKLKSQDCLGLVAALASATEVSSTAPMSGKKHRPPGPLFSSSDPLPATSSHSQDSAQVTSMIPAPFTAASRDASMRRTRPGTSAPAAAAAAPPPSTLNPTSGSLLNAVDEGPSHFLASATAAARARRSQVRYNQRSQTSRTRSCLKRNASSSSHSS

SEQ ID NO: 44979 - protein, 35 aa, Homo sapiens
  MAP TO AC011055.6; EXPRESSED IN PLACENTA, SIGNAL = 0.61; EXPRESSED IN ADULT LIVER, SIGNAL = 0.54; EXPRESSED IN FETAL LIVER, SIGNAL = 0.76; EXPRESSED IN BRAIN, SIGNAL = 0.67; EXPRESSED IN BONE MARROW, SIGNAL = 0.59
GNSHTTTKKEIHQMSEFYSMLECDAGLEDENQQAR

SEQ ID NO: 44980 - protein, 41 aa, Homo sapiens
  MAP TO AL137141.7; EXPRESSED IN LUNG, SIGNAL = 1.6; EXPRESSED IN PLACENTA, SIGNAL = 1.1; EXPRESSED IN BONE MARROW, SIGNAL = 5.7; EXPRESSED IN ADULT LIVER, SIGNAL = 0.86; EXPRESSED IN FETAL LIVER, SIGNAL =   2; EXPRESSED IN BRAIN, SIGNAL = 0.73; EST_HUMAN HIT: BE542147.1, EVALUE 2.00e-16; SWISSPROT HIT: P13796, EVALUE 1.00e-17
DPKISTSLPVLDLIDAIQPGSINYDLLKTENLNDDEKLNNA

SEQ ID NO: 44981 - protein, 26 aa, Homo sapiens
  MAP TO AL137141.7; EXPRESSED IN LUNG, SIGNAL = 1.6; EXPRESSED IN PLACENTA, SIGNAL = 1.1; EXPRESSED IN BONE MARROW, SIGNAL = 5.7; EXPRESSED IN ADULT LIVER, SIGNAL = 0.86; EXPRESSED IN FETAL LIVER, SIGNAL =   2; EXPRESSED IN BRAIN, SIGNAL = 0.73; EST_HUMAN HIT: BE245098.1, EVALUE 3.00e-08
TRRLVQVCLFWTSSMPSNQVPLTMTF

SEQ ID NO: 44982 - protein, 51 aa, Homo sapiens
  MAP TO AC016948.4; EXPRESSED IN PLACENTA, SIGNAL = 0.58; EXPRESSED IN BONE MARROW, SIGNAL = 0.47; EXPRESSED IN ADULT LIVER, SIGNAL = 0.57; EXPRESSED IN BRAIN, SIGNAL = 0.45; EST_HUMAN HIT: AW880880.1, EVALUE 4.40e-01; SWISSPROT HIT: Q14149, EVALUE 7.00e-03
LGAGVVGIVNIPLEVMEPSHNKQEFLNVQEYNHLLKVMGQYLVQYCKDTGI

SEQ ID NO: 44983 - protein, 34 aa, Homo sapiens
  MAP TO AC016948.4; EXPRESSED IN PLACENTA, SIGNAL = 0.58; EXPRESSED IN BONE MARROW, SIGNAL = 0.47; EXPRESSED IN ADULT LIVER, SIGNAL = 0.57; EXPRESSED IN BRAIN, SIGNAL = 0.45
LAQAWLELLIYPWRSWNHPIINRNFSMSKSIIIY

SEQ ID NO: 44984 - protein, 49 aa, Homo sapiens
  MAP TO AL121918.15; EXPRESSED IN PLACENTA, SIGNAL = 0.66; EXPRESSED IN FETAL LIVER, SIGNAL = 0.64; EXPRESSED IN BONE MARROW, SIGNAL = 0.59; EXPRESSED IN ADULT LIVER, SIGNAL = 0.69; EXPRESSED IN BRAIN, SIGNAL = 0.71
MIMGEEGKHASVERESEGVKKQETAITVGRCPFFMTTKMQNAEPCYFWP

SEQ ID NO: 44985 - protein, 61 aa, Homo sapiens
  MAP TO AC021401.4; EXPRESSED IN BRAIN, SIGNAL = 0.54; EST_HUMAN HIT: BF541304.1, EVALUE 1.60e+00
MAFFNKISILTQLRKEGRVPFLIDTKGSFGQCLRSGPEWRQFHKLFWELMFDGGGRGNDGA

SEQ ID NO: 44986 - protein, 48 aa, Homo sapiens
  MAP TO AC016282.3; EXPRESSED IN BONE MARROW, SIGNAL = 0.63; EXPRESSED IN PLACENTA, SIGNAL = 0.86; EXPRESSED IN ADULT LIVER, SIGNAL = 0.85; EXPRESSED IN FETAL LIVER, SIGNAL = 0.69; EXPRESSED IN BRAIN, SIGNAL = 0.84; EXPRESSED IN LUNG, SIGNAL = 0.87; EST_HUMAN HIT: AI342928.1, EVALUE 3.00e+00; SWISSPROT HIT: P52167, EVALUE 8.10e+00
MCHIVIRMCLWHRRHWLCISCGNNNMFSGCQAKREKRLNEEGVERSVN

SEQ ID NO: 44987 - protein, 37 aa, Homo sapiens
  MAP TO AC016282.3; EXPRESSED IN BONE MARROW, SIGNAL = 0.63; EXPRESSED IN PLACENTA, SIGNAL = 0.86; EXPRESSED IN ADULT LIVER, SIGNAL = 0.85; EXPRESSED IN FETAL LIVER, SIGNAL = 0.69; EXPRESSED IN BRAIN, SIGNAL = 0.84; EXPRESSED IN LUNG, SIGNAL = 0.87; SWISSPROT HIT: P17053, EVALUE 6.40e+00
CVTLSFECVSGTEDTGCVSAVAITTCLVVAKPRGKKD

SEQ ID NO: 44988 - protein, 33 aa, Homo sapiens
  MAP TO AC026273.2; EXPRESSED IN PLACENTA, SIGNAL = 0.7; EXPRESSED IN ADULT LIVER, SIGNAL = 0.65; EXPRESSED IN BRAIN, SIGNAL = 0.65; EXPRESSED IN BONE MARROW, SIGNAL = 0.55; EXPRESSED IN FETAL LIVER, SIGNAL = 0.7; EST_HUMAN HIT: AA487579.1, EVALUE 6.00e-14
FSKCHTSNHHQMAMRMLQILCHHIMLSQPKACQ

SEQ ID NO: 44989 - protein, 96 aa, Homo sapiens
  MAP TO AP001505.1; EXPRESSED IN ADULT LIVER, SIGNAL = 0.55; EXPRESSED IN FETAL LIVER, SIGNAL = 0.55; EXPRESSED IN BRAIN, SIGNAL = 0.59; EXPRESSED IN BONE MARROW, SIGNAL = 0.45; SWISSPROT HIT: Q9Z9E9, EVALUE 7.30e-01; EST_HUMAN HIT: BE894121.1, EVALUE 4.60e-01
AHQAGEQQGRQGGVPLWGTTCQGQGRGREVAGKHVPVPTGCNFSDTAENLQPQGVRDTTPELQGRPLFSQGRIPARRNPLLPQNMKLEQKVTGQFT

SEQ ID NO: 44990 - protein, 47 aa, Homo sapiens
  MAP TO AL132866.21; EXPRESSED IN ADULT LIVER, SIGNAL = 0.89; EXPRESSED IN FETAL LIVER, SIGNAL = 0.82; EXPRESSED IN BRAIN, SIGNAL = 0.79; EXPRESSED IN LUNG, SIGNAL = 0.92; EXPRESSED IN PLACENTA, SIGNAL = 0.96; EXPRESSED IN BONE MARROW, SIGNAL = 0.77; EST_HUMAN HIT: AA258540.1, EVALUE 3.00e-03
SMATWKTSLWDFRSSLGQLMSGSLSRTPSTRCTESRGKLSPPPAMRR

SEQ ID NO: 44991 - protein, 75 aa, Homo sapiens
  MAP TO AL161756.1; EXPRESSED IN LUNG, SIGNAL = 1.2; EXPRESSED IN PLACENTA, SIGNAL = 0.71; EXPRESSED IN FETAL LIVER, SIGNAL = 1.4; EXPRESSED IN BONE MARROW, SIGNAL = 1.3; EXPRESSED IN ADULT LIVER, SIGNAL = 1.1; EXPRESSED IN BRAIN, SIGNAL = 1.3; SWISSPROT HIT: P27766, EVALUE 7.00e-03; EST_HUMAN HIT: AW813711.1, EVALUE 2.00e-03
DKTIEELRQSLANVERMKEKANVETMKEKAVVKTENLKTTLDSAEQKARSDKEKTQQMLDAVTSEPPTAKSAPEE

SEQ ID NO: 44992 - protein, 50 aa, Homo sapiens
  MAP TO AL121901.10; EXPRESSED IN PLACENTA, SIGNAL = 0.75; EXPRESSED IN FETAL LIVER, SIGNAL = 0.69; EXPRESSED IN BONE MARROW, SIGNAL = 0.64; EXPRESSED IN ADULT LIVER, SIGNAL = 0.77; EXPRESSED IN BRAIN, SIGNAL = 0.66; EST_HUMAN HIT: BE265931.1, EVALUE 2.20e+00; SWISSPROT HIT: P07743, EVALUE 3.00e-06
PIIGQIINLKASLDLLTAVTIETDPQTHQPVAVLGECASDPTSISLSLLD

SEQ ID NO: 44993 - protein, 33 aa, Homo sapiens
  MAP TO AC007492.2; EXPRESSED IN ADULT LIVER, SIGNAL = 0.95; EXPRESSED IN BRAIN, SIGNAL = 0.87; EXPRESSED IN FETAL LIVER, SIGNAL = 1.2; EXPRESSED IN BONE MARROW, SIGNAL = 0.75; EST_HUMAN HIT: AI767197.1, EVALUE 5.00e-04
AQHTGKSFCNNLGIILYFIHGGNPTVKYIDIDE

SEQ ID NO: 44994 - protein, 60 aa, Homo sapiens
  MAP TO AL133414.3; EXPRESSED IN PLACENTA, SIGNAL = 0.8; EXPRESSED IN ADULT LIVER, SIGNAL = 0.67; EXPRESSED IN FETAL LIVER, SIGNAL = 0.62; EXPRESSED IN BRAIN, SIGNAL = 0.58; EXPRESSED IN BONE MARROW, SIGNAL = 0.57; EST_HUMAN HIT: BE294264.1, EVALUE 2.00e-04; SWISSPROT HIT: P43630, EVALUE 6.00e-32
GQDKPFLSARPSTVVPRGGHVALQCHYRRGFNNFMLYKEDRSHVPIFHGRIFQESFIMGP

SEQ ID NO: 44995 - protein, 60 aa, Homo sapiens
  MAP TO AL133414.3; EXPRESSED IN PLACENTA, SIGNAL = 0.8; EXPRESSED IN ADULT LIVER, SIGNAL = 0.67; EXPRESSED IN FETAL LIVER, SIGNAL = 0.62; EXPRESSED IN BRAIN, SIGNAL = 0.58; EXPRESSED IN BONE MARROW, SIGNAL = 0.57; EST_HUMAN HIT: BE280719.1, EVALUE 4.70e-02; SWISSPROT HIT: Q95916, EVALUE 6.00e+00
VVRTNPSCLPGPALWCLEEDTWLFSVTIVVGLTISCCTKKTEATFPSSTAEYSRRASSWA

SEQ ID NO: 44996 - protein, 53 aa, Homo sapiens
  MAP TO AC013642.3; EXPRESSED IN ADULT LIVER, SIGNAL = 0.53; EXPRESSED IN BRAIN, SIGNAL = 0.49; EXPRESSED IN PLACENTA, SIGNAL = 0.52; EXPRESSED IN BONE MARROW, SIGNAL = 0.49; SWISSPROT HIT: P98064, EVALUE 7.00e-14; EST_HUMAN HIT: BF354474.1, EVALUE 2.00e-17
GDSGGPLVTRDLKDTWYLIGIVSWGDNCGQKDKPGVYTQVTYYRNWIASKTGI

SEQ ID NO: 44997 - protein, 75 aa, Homo sapiens
  MAP TO AC016623.2; EXPRESSED IN LUNG, SIGNAL = 1.2; EXPRESSED IN FETAL LIVER, SIGNAL = 1.1; EXPRESSED IN BRAIN, SIGNAL = 0.97; EXPRESSED IN PLACENTA, SIGNAL = 1.1; EXPRESSED IN ADULT LIVER, SIGNAL = 1.2; EXPRESSED IN BONE MARROW, SIGNAL = 0.99; SWISSPROT HIT: P28284, EVALUE 1.00e-05; EST_HUMAN HIT: BE890042.1, EVALUE 4.00e-05
TLNNEMSTDEDNEYAEEKDSYICAVCLDVYFNPYMCYPCHHIFCEPCLRTLAKDNPSSTPCPLCRTIISRVFFQT

SEQ ID NO: 44998 - protein, 61 aa, Homo sapiens
  MAP TO AL110292.4; EXPRESSED IN FETAL LIVER, SIGNAL = 0.51; EXPRESSED IN BRAIN, SIGNAL = 0.64; EST_HUMAN HIT: AA301233.1, EVALUE 6.00e-15; SWISSPROT HIT: P38733, EVALUE 7.80e+00
NSSCFSENSSFALLLFMGIRKQLCSISYVLFLFFLTTIINSFLPKNDLINFSLLASFKRSM

SEQ ID NO: 44999 - protein, 18 aa, Homo sapiens
  MAP TO AL110292.4; EXPRESSED IN FETAL LIVER, SIGNAL = 0.51; EXPRESSED IN BRAIN, SIGNAL = 0.64
ILPASPKTHPLLYYSSWE

SEQ ID NO: 45000 - protein, 37 aa, Homo sapiens
  MAP TO AL133227.7; EXPRESSED IN PLACENTA, SIGNAL = 0.75; EXPRESSED IN FETAL LIVER, SIGNAL = 0.83; EXPRESSED IN BONE MARROW, SIGNAL = 0.74; EXPRESSED IN ADULT LIVER, SIGNAL = 0.8; EXPRESSED IN BRAIN, SIGNAL = 0.68; EST_HUMAN HIT: BE732229.1, EVALUE 9.60e+00
ISLFSGAAFWGSPRQNKLFLPLWSQSASYVCTALMIL

SEQ ID NO: 45001 - protein, 24 aa, Homo sapiens
  MAP TO AL133227.7; EXPRESSED IN PLACENTA, SIGNAL = 0.75; EXPRESSED IN FETAL LIVER, SIGNAL = 0.83; EXPRESSED IN BONE MARROW, SIGNAL = 0.74; EXPRESSED IN ADULT LIVER, SIGNAL = 0.8; EXPRESSED IN BRAIN, SIGNAL = 0.68
PVSSGLCIHMRHSGTTEEGTIYSV

SEQ ID NO: 45002 - protein, 63 aa, Homo sapiens
  MAP TO AC016212.3; EXPRESSED IN BONE MARROW, SIGNAL = 0.6; EXPRESSED IN PLACENTA, SIGNAL = 0.5; EXPRESSED IN ADULT LIVER, SIGNAL = 0.54; EXPRESSED IN FETAL LIVER, SIGNAL = 0.58; EXPRESSED IN BRAIN, SIGNAL = 0.47; SWISSPROT HIT: Q07630, EVALUE 1.50e+00; EST_HUMAN HIT: AI802729.1, EVALUE 5.90e+00
ASLLDLKSTWKSLMSQSSRNLIVGAAKEGVMRSSTRRESSGKPCMGNRPSHTRTSGVLGTFAM

SEQ ID NO: 45003 - protein, 87 aa, Homo sapiens
  MAP TO AL161747.1; EXPRESSED IN ADULT LIVER, SIGNAL = 0.51; EXPRESSED IN BRAIN, SIGNAL = 0.53; EXPRESSED IN LUNG, SIGNAL =  10; EXPRESSED IN FETAL LIVER, SIGNAL = 0.63; EXPRESSED IN BONE MARROW, SIGNAL = 0.63; EST_HUMAN HIT: BE873778.1, EVALUE 2.00e-29
DLDHSIGTQYSANPPVTIDVPMTDMTSGLMGHSQLTTIDQSELSSQLGLSLGGGTILPPAQSPEDRLSTTPSPTSSLHEDGVEDFRR

SEQ ID NO: 45004 - protein, 50 aa, Homo sapiens
  MAP TO AL160414.4; EXPRESSED IN PLACENTA, SIGNAL = 0.76; EXPRESSED IN ADULT LIVER, SIGNAL = 0.73; EXPRESSED IN FETAL LIVER, SIGNAL = 0.96; EXPRESSED IN LUNG, SIGNAL = 0.98; EXPRESSED IN BRAIN, SIGNAL = 1.7; EXPRESSED IN BONE MARROW, SIGNAL = 0.92; EST_HUMAN HIT: BE159045.1, EVALUE 4.00e-24; SWISSPROT HIT: P18433, EVALUE 3.00e-25
ENKSRQIRQFHFHGWPEVGIPSDGKGMISIIAAVQKQQQQSGNHPITVHC

SEQ ID NO: 45005 - protein, 26 aa, Homo sapiens
  MAP TO AL160414.4; EXPRESSED IN PLACENTA, SIGNAL = 0.76; EXPRESSED IN ADULT LIVER, SIGNAL = 0.73; EXPRESSED IN FETAL LIVER, SIGNAL = 0.96; EXPRESSED IN LUNG, SIGNAL = 0.98; EXPRESSED IN BRAIN, SIGNAL = 1.7; EXPRESSED IN BONE MARROW, SIGNAL = 0.92; EST_HUMAN HIT: AW861560.1, EVALUE 3.00e-07
RIRAGRSGSSTSMAGLKWASPVTERA

SEQ ID NO: 45006 - protein, 61 aa, Homo sapiens
  MAP TO AC008269.3; EXPRESSED IN BONE MARROW, SIGNAL = 0.51; EXPRESSED IN ADULT LIVER, SIGNAL = 0.65; EXPRESSED IN FETAL LIVER, SIGNAL = 0.49; EXPRESSED IN BRAIN, SIGNAL = 0.59; EXPRESSED IN PLACENTA, SIGNAL = 0.66; SWISSPROT HIT: P53530, EVALUE 3.50e+00; EST_HUMAN HIT: BF371013.1, EVALUE 1.20e+00
LIARFQGQSCGTTQENPHHTSWNRYDLIIDWLSGEEDAQILGLGQKTGEGVALILEYASRK

SEQ ID NO: 45007 - protein, 29 aa, Homo sapiens
  MAP TO AC008269.3; EXPRESSED IN BONE MARROW, SIGNAL = 0.51; EXPRESSED IN ADULT LIVER, SIGNAL = 0.65; EXPRESSED IN FETAL LIVER, SIGNAL = 0.49; EXPRESSED IN BRAIN, SIGNAL = 0.59; EXPRESSED IN PLACENTA, SIGNAL = 0.66; SWISSPROT HIT: Q91318, EVALUE 5.00e+00
LNCQVPRTELWNNTRKSPSYKLEPIRLDN

SEQ ID NO: 45008 - protein, 22 aa, Homo sapiens
  MAP TO AC011815.2; EXPRESSED IN PLACENTA, SIGNAL = 0.57; EXPRESSED IN FETAL LIVER, SIGNAL = 0.49; EXPRESSED IN BONE MARROW, SIGNAL = 0.51; EXPRESSED IN ADULT LIVER, SIGNAL = 0.58; EXPRESSED IN BRAIN, SIGNAL = 0.93
EGHTEEPEAEEQAHEQQPPQQE

SEQ ID NO: 45009 - protein, 24 aa, Homo sapiens
  MAP TO AC011815.2; EXPRESSED IN PLACENTA, SIGNAL = 0.57; EXPRESSED IN FETAL LIVER, SIGNAL = 0.49; EXPRESSED IN BONE MARROW, SIGNAL = 0.51; EXPRESSED IN ADULT LIVER, SIGNAL = 0.58; EXPRESSED IN BRAIN, SIGNAL = 0.93; EST_HUMAN HIT: AA326306.1, EVALUE 6.00e-06
RATQKSRKQRSKPTNSSPRSRKST

SEQ ID NO: 45010 - protein, 66 aa, Homo sapiens
  MAP TO AC007940.2; EXPRESSED IN LUNG, SIGNAL = 0.89; EXPRESSED IN ADULT LIVER, SIGNAL = 0.98; EXPRESSED IN FETAL LIVER, SIGNAL = 0.77; EXPRESSED IN BRAIN, SIGNAL = 0.91; EXPRESSED IN BONE MARROW, SIGNAL = 0.88; EXPRESSED IN PLACENTA, SIGNAL = 0.94; SWISSPROT HIT: P38651, EVALUE 1.20e+00; EST_HUMAN HIT: BF133484.1, EVALUE 5.70e+00
IPRDVKMHGITREERKLRACGQNVFTTADNCLGDSFGLWMNSPWRAIVPPVGAFMIVCVQGTKQAI

SEQ ID NO: 45011 - protein, 56 aa, Homo sapiens
  MAP TO AL132654.12; EXPRESSED IN BRAIN, SIGNAL = 0.86; EXPRESSED IN BONE MARROW, SIGNAL = 0.7; EXPRESSED IN LUNG, SIGNAL = 0.83; EXPRESSED IN PLACENTA, SIGNAL = 0.84; EXPRESSED IN ADULT LIVER, SIGNAL = 0.81; EXPRESSED IN FETAL LIVER, SIGNAL = 2.5; EST_HUMAN HIT: AL449771.1, EVALUE 2.00e-18
RRRSSGSAGGCHGWTEESPNTKHLGHSSHAWQHHGQHAQGTFDLFTCWHRGKASWK

SEQ ID NO: 45012 - protein, 20 aa, Homo sapiens
  MAP TO AC011790.4; EXPRESSED IN BONE MARROW, SIGNAL = 0.85; EXPRESSED IN LUNG, SIGNAL = 1.1; EXPRESSED IN PLACENTA, SIGNAL = 1.1; EXPRESSED IN ADULT LIVER, SIGNAL = 0.95; EXPRESSED IN FETAL LIVER, SIGNAL = 0.78; EXPRESSED IN BRAIN, SIGNAL = 0.93
VIAHDWNAGVYEDSDIGVLL

SEQ ID NO: 45013 - protein, 39 aa, Homo sapiens
  MAP TO AC011790.4; EXPRESSED IN BONE MARROW, SIGNAL = 0.85; EXPRESSED IN LUNG, SIGNAL = 1.1; EXPRESSED IN PLACENTA, SIGNAL = 1.1; EXPRESSED IN ADULT LIVER, SIGNAL = 0.95; EXPRESSED IN FETAL LIVER, SIGNAL = 0.78; EXPRESSED IN BRAIN, SIGNAL = 0.93; EST_HUMAN HIT: BF541703.1, EVALUE 7.20e+00
TPAFQSWAMTSPRQDAQLAEIFSRTGREGQTPSYMVFVG

SEQ ID NO: 45014 - protein, 42 aa, Homo sapiens
  MAP TO AC011930.3; EXPRESSED IN LUNG, SIGNAL = 0.85; EXPRESSED IN PLACENTA, SIGNAL = 0.86; EXPRESSED IN ADULT LIVER, SIGNAL = 1.1; EXPRESSED IN FETAL LIVER, SIGNAL = 0.75; EXPRESSED IN BRAIN, SIGNAL = 0.71; EXPRESSED IN BONE MARROW, SIGNAL = 0.63
DVNHAMSSLPMLHMIRAHSSLSIAILVIRLMNHKTKKDECIV

SEQ ID NO: 45015 - protein, 26 aa, Homo sapiens
  MAP TO AC022918.2; EXPRESSED IN PLACENTA, SIGNAL = 0.67; EXPRESSED IN FETAL LIVER, SIGNAL = 0.56; EXPRESSED IN ADULT LIVER, SIGNAL = 0.52; EXPRESSED IN BRAIN, SIGNAL = 0.49; EXPRESSED IN BONE MARROW, SIGNAL = 0.56; EST_HUMAN HIT: AA928144.1, EVALUE 5.40e-01
LLMVCWQPLVFLGQQLRNSNLYLHLP

SEQ ID NO: 45016 - protein, 51 aa, Homo sapiens
  MAP TO AC018530.4; EXPRESSED IN LUNG, SIGNAL = 1.2; EXPRESSED IN PLACENTA, SIGNAL = 1.2; EXPRESSED IN ADULT LIVER, SIGNAL =   1; EXPRESSED IN FETAL LIVER, SIGNAL = 1.6; EXPRESSED IN BRAIN, SIGNAL = 1.4; EXPRESSED IN BONE MARROW, SIGNAL = 1.6
LNLLVAPRDHGAIIQSGMVERSMAEGQFSLPIVQPKKNGRRKIEHPGGKNA

SEQ ID NO: 45017 - protein, 30 aa, Homo sapiens
  MAP TO AC018389.3; EXPRESSED IN LUNG, SIGNAL = 1.1; EXPRESSED IN PLACENTA, SIGNAL = 0.97; EXPRESSED IN FETAL LIVER, SIGNAL = 0.7; EXPRESSED IN BONE MARROW, SIGNAL = 0.8; EXPRESSED IN ADULT LIVER, SIGNAL = 0.86; EXPRESSED IN BRAIN, SIGNAL = 0.71; SWISSPROT HIT: Q07300, EVALUE 5.00e+00
LMTSLLIELRIRKQTEKYFPTFPLPNLPIY

SEQ ID NO: 45018 - protein, 35 aa, Homo sapiens
  MAP TO AC019222.3; EXPRESSED IN ADULT LIVER, SIGNAL = 1.3; EXPRESSED IN BRAIN, SIGNAL = 0.9; EXPRESSED IN LUNG, SIGNAL = 1.2; EXPRESSED IN PLACENTA, SIGNAL =   1; EXPRESSED IN FETAL LIVER, SIGNAL = 0.85; EXPRESSED IN BONE MARROW, SIGNAL = 0.88; EST_HUMAN HIT: AV750211.1, EVALUE 8.00e-08
DSAIKNKQIKVRRPLINVISIISSTVGDWLIAVTC

SEQ ID NO: 45019 - protein, 40 aa, Homo sapiens
  MAP TO AL121889.3; EXPRESSED IN PLACENTA, SIGNAL = 0.54; EXPRESSED IN FETAL LIVER, SIGNAL = 0.71; EXPRESSED IN BRAIN, SIGNAL = 0.5; EXPRESSED IN BONE MARROW, SIGNAL = 0.66; EST_HUMAN HIT: BF037791.1, EVALUE 6.00e-16; SWISSPROT HIT: P43878, EVALUE 4.80e+00
MTVRTITGNIYYARSGTKIIGKVHEKFTLIDGIRVATGSY

SEQ ID NO: 45020 - protein, 46 aa, Homo sapiens
  MAP TO AC022268.3; EXPRESSED IN PLACENTA, SIGNAL = 0.73; EXPRESSED IN FETAL LIVER, SIGNAL = 0.63; EXPRESSED IN BONE MARROW, SIGNAL = 0.54; EXPRESSED IN ADULT LIVER, SIGNAL = 0.67; EXPRESSED IN BRAIN, SIGNAL = 0.65; EST_HUMAN HIT: AV729428.1, EVALUE 5.00e-20; SWISSPROT HIT: P53832, EVALUE 5.50e-01
LPGPSRVPAAGSSSKVQGASNLNRRSQSFNSIDKNKPPNYANGNEK

SEQ ID NO: 45021 - protein, 21 aa, Homo sapiens
  MAP TO AC022268.3; EXPRESSED IN PLACENTA, SIGNAL = 0.73; EXPRESSED IN FETAL LIVER, SIGNAL = 0.63; EXPRESSED IN BONE MARROW, SIGNAL = 0.54; EXPRESSED IN ADULT LIVER, SIGNAL = 0.67; EXPRESSED IN BRAIN, SIGNAL = 0.65; EST_HUMAN HIT: AV729327.1, EVALUE 1.00e-04
FQGPLGCLLQEAAARSREPLI

SEQ ID NO: 45022 - protein, 50 aa, Homo sapiens
  MAP TO AC013726.3; EXPRESSED IN LUNG, SIGNAL = 0.92; EXPRESSED IN PLACENTA, SIGNAL = 1.4; EXPRESSED IN ADULT LIVER, SIGNAL = 0.76; EXPRESSED IN FETAL LIVER, SIGNAL = 0.83; EXPRESSED IN BRAIN, SIGNAL = 0.59; EXPRESSED IN BONE MARROW, SIGNAL = 0.52; EST_HUMAN HIT: AL047207.1, EVALUE 1.00e+00; SWISSPROT HIT: Q57523, EVALUE 3.60e+00
LGSAIADHGVLILPAKAEPVGFSFPITAHWDQETQSWERMVLSCMKSRPG

SEQ ID NO: 45023 - protein, 34 aa, Homo sapiens
  MAP TO AC020704.3; EXPRESSED IN ADULT LIVER, SIGNAL = 0.54; EXPRESSED IN BRAIN, SIGNAL = 0.48; EXPRESSED IN FETAL LIVER, SIGNAL = 0.49
EGKGCAIILQKKVEKAKDGKKIPLSRGKAGGEEK

SEQ ID NO: 45024 - protein, 34 aa, Homo sapiens
  MAP TO AC020704.3; EXPRESSED IN ADULT LIVER, SIGNAL = 0.54; EXPRESSED IN BRAIN, SIGNAL = 0.48; EXPRESSED IN FETAL LIVER, SIGNAL = 0.49; SWISSPROT HIT: P41641, EVALUE 2.90e+00
RGRAVPSSSKRRWKRQKMERRYHFLVERREEKRR

SEQ ID NO: 45025 - protein, 43 aa, Homo sapiens
  MAP TO AC018731.3; EXPRESSED IN PLACENTA, SIGNAL = 1.1; EXPRESSED IN ADULT LIVER, SIGNAL =   1; EXPRESSED IN FETAL LIVER, SIGNAL =   1; EXPRESSED IN BRAIN, SIGNAL = 0.84; EXPRESSED IN LUNG, SIGNAL = 0.97; EXPRESSED IN BONE MARROW, SIGNAL = 0.74; SWISSPROT HIT: Q12815, EVALUE 5.50e-01; EST_HUMAN HIT: N21453.1, EVALUE 7.00e+00
QPPTPCWSPSQPRPGALLDLCRVLRTQDESARSLPAESSPPCP

SEQ ID NO: 45026 - protein, 84 aa, Homo sapiens
  MAP TO AC010789.7; EXPRESSED IN LUNG, SIGNAL = 1.8; EXPRESSED IN ADULT LIVER, SIGNAL = 1.6; EXPRESSED IN BRAIN, SIGNAL = 1.6; EXPRESSED IN BONE MARROW, SIGNAL = 2.4; EXPRESSED IN PLACENTA, SIGNAL = 1.1; EXPRESSED IN FETAL LIVER, SIGNAL = 1.8; SWISSPROT HIT: P26831, EVALUE 1.90e-01; EST_HUMAN HIT: BE278917.1, EVALUE 1.00e-43
ESIEEVSKIIKRAPVIWDNIHANDYDQKRLFLGPYKGRSTELIPRLKGVLTNPNCEFEANYVAIHTLATWYKSNMNGVRKDVVM

SEQ ID NO: 45027 - protein, 49 aa, Homo sapiens
  MAP TO AC022939.2; EXPRESSED IN BONE MARROW, SIGNAL = 0.46; EXPRESSED IN ADULT LIVER, SIGNAL = 0.74; EXPRESSED IN BRAIN, SIGNAL = 0.58; EXPRESSED IN PLACENTA, SIGNAL = 0.55; EXPRESSED IN FETAL LIVER, SIGNAL = 0.55; EST_HUMAN HIT: AA182952.1, EVALUE 8.00e-18
PEGSYTDDANQEVRGPPQQHGHHNEFDDEFEDDDPLPAIGHCKAIYPFD

SEQ ID NO: 45028 - protein, 50 aa, Homo sapiens
  MAP TO AC022939.2; EXPRESSED IN BONE MARROW, SIGNAL = 0.46; EXPRESSED IN ADULT LIVER, SIGNAL = 0.74; EXPRESSED IN BRAIN, SIGNAL = 0.58; EXPRESSED IN PLACENTA, SIGNAL = 0.55; EXPRESSED IN FETAL LIVER, SIGNAL = 0.55; EST_HUMAN HIT: AA182952.1, EVALUE 2.00e-13
LREVTLMMQTRKSVGHPSSMVTTMSLMMNLRMMIPCLLLDTAKLSTLLMV

SEQ ID NO: 45029 - protein, 35 aa, Homo sapiens
  MAP TO AL136438.8; EXPRESSED IN LUNG, SIGNAL = 1.3; EXPRESSED IN ADULT LIVER, SIGNAL = 1.2; EXPRESSED IN BRAIN, SIGNAL = 1.1; EXPRESSED IN BONE MARROW, SIGNAL = 1.1; EXPRESSED IN PLACENTA, SIGNAL = 1.1; EXPRESSED IN FETAL LIVER, SIGNAL = 1.1; EST_HUMAN HIT: BE409240.1, EVALUE 4.40e+00; SWISSPROT HIT: P22199, EVALUE 2.90e+00
QQVKWMKLINLLKALEQITVVLFQWCCWTSQDTFV

SEQ ID NO: 45030 - protein, 25 aa, Homo sapiens
  MAP TO AL133544.5; EXPRESSED IN ADULT LIVER, SIGNAL = 0.57; EXPRESSED IN BRAIN, SIGNAL = 0.56; EXPRESSED IN PLACENTA, SIGNAL = 0.58; EXPRESSED IN BONE MARROW, SIGNAL = 0.46
RMIRLCRSKGLSSPGKRLMITKALS

SEQ ID NO: 45031 - protein, 56 aa, Homo sapiens
  MAP TO AC013726.3; EXPRESSED IN PLACENTA, SIGNAL = 0.64; EXPRESSED IN ADULT LIVER, SIGNAL = 0.84; EXPRESSED IN BRAIN, SIGNAL = 0.73; EXPRESSED IN FETAL LIVER, SIGNAL = 0.89; EXPRESSED IN BONE MARROW, SIGNAL = 0.83; SWISSPROT HIT: O15736, EVALUE 8.00e-06; EST_HUMAN HIT: AU140230.1, EVALUE 3.00e-25
ANQTLKDEYDALQITFTALEGKLRKTTEENQELVTRWMAEKAQEANRLNAENEKDS

SEQ ID NO: 45032 - protein, 57 aa, Homo sapiens
  MAP TO AC023296.2; EXPRESSED IN LUNG, SIGNAL = 1.1; EXPRESSED IN PLACENTA, SIGNAL = 0.96; EXPRESSED IN FETAL LIVER, SIGNAL = 0.94; EXPRESSED IN BRAIN, SIGNAL =   1; EXPRESSED IN BONE MARROW, SIGNAL = 0.89; EXPRESSED IN ADULT LIVER, SIGNAL =   1; SWISSPROT HIT: P33730, EVALUE 5.00e-10; EST_HUMAN HIT: BF590844.1, EVALUE 1.00e-08
ITCGHPGNPAHGFTNGSEFNLNDVVNFTCNTGYLLQGVSRAQCRSNGQWSSPLPTCR

SEQ ID NO: 45033 - protein, 21 aa, Homo sapiens
  MAP TO AC023296.2; EXPRESSED IN LUNG, SIGNAL = 1.1; EXPRESSED IN PLACENTA, SIGNAL = 0.96; EXPRESSED IN FETAL LIVER, SIGNAL = 0.94; EXPRESSED IN BRAIN, SIGNAL =   1; EXPRESSED IN BONE MARROW, SIGNAL = 0.89; EXPRESSED IN ADULT LIVER, SIGNAL =   1
PSHVVTLETLPTDSLMAVSST

SEQ ID NO: 45034 - protein, 32 aa, Homo sapiens
  MAP TO AC015750.4; EXPRESSED IN PLACENTA, SIGNAL = 0.93; EXPRESSED IN FETAL LIVER, SIGNAL = 1.5; EXPRESSED IN BONE MARROW, SIGNAL = 1.3; EXPRESSED IN BRAIN, SIGNAL = 0.71
HLSNTSLDNVDTTIERPDTLFRENGSEEYPRS

SEQ ID NO: 45035 - protein, 36 aa, Homo sapiens
  MAP TO AC013497.4; EXPRESSED IN ADULT LIVER, SIGNAL =   1; EXPRESSED IN BRAIN, SIGNAL = 0.87; EXPRESSED IN PLACENTA, SIGNAL = 0.86; EXPRESSED IN FETAL LIVER, SIGNAL = 0.96; EXPRESSED IN LUNG, SIGNAL = 0.93; EXPRESSED IN BONE MARROW, SIGNAL = 0.83; SWISSPROT HIT: Q37711, EVALUE 8.40e+00
ILMVSAPLLLVIKPHSSVISTTFLTVTSILQLRSCP

SEQ ID NO: 45036 - protein, 29 aa, Homo sapiens
  MAP TO AL137225.7; EXPRESSED IN ADULT LIVER, SIGNAL = 1.1; EXPRESSED IN PLACENTA, SIGNAL = 0.83; EXPRESSED IN FETAL LIVER, SIGNAL = 0.72; EXPRESSED IN BRAIN, SIGNAL = 0.7; EXPRESSED IN BONE MARROW, SIGNAL = 0.7; EST_HUMAN HIT: AU134765.1, EVALUE 1.80e-01; SWISSPROT HIT: Q62563, EVALUE 5.00e+00
LFHQELQDIHDHLRHLQRLLTHDQGLHIP

SEQ ID NO: 45037 - protein, 35 aa, Homo sapiens; identical to SEQ ID NO: 41218
  MAP TO AC024038.3; EXPRESSED IN ADULT LIVER, SIGNAL = 0.99; EXPRESSED IN FETAL LIVER, SIGNAL = 0.88; EXPRESSED IN BONE MARROW, SIGNAL = 0.92; EXPRESSED IN LUNG, SIGNAL = 0.91; EXPRESSED IN PLACENTA, SIGNAL = 0.89; EXPRESSED IN BRAIN, SIGNAL = 0.79; EST_HUMAN HIT: AA333084.1, EVALUE 9.80e+00; SWISSPROT HIT: Q99189, EVALUE 4.90e+00

SEQ ID NO: 45038 - protein, 73 aa, Homo sapiens
  MAP TO AL136365.3; EXPRESSED IN FETAL LIVER, SIGNAL = 0.55; EXPRESSED IN PLACENTA, SIGNAL = 0.6; EXPRESSED IN BONE MARROW, SIGNAL = 0.56; EXPRESSED IN ADULT LIVER, SIGNAL = 0.63; EXPRESSED IN BRAIN, SIGNAL = 0.65; EST_HUMAN HIT: BE730059.1, EVALUE 3.40e-01; SWISSPROT HIT: P75343, EVALUE 8.80e-01
RDVWSSRIFLLSPAEGMWRTHLTWFQTPPTTAASTSRLCFLITTIYTTARSTPWPWLLILLLGRWEIPSGDPL

SEQ ID NO: 45039 - protein, 75 aa, Homo sapiens
  MAP TO AL136313.3; EXPRESSED IN LUNG, SIGNAL = 0.95; EXPRESSED IN BONE MARROW, SIGNAL = 0.84; EXPRESSED IN ADULT LIVER, SIGNAL = 0.94; EXPRESSED IN PLACENTA, SIGNAL = 0.91; EXPRESSED IN FETAL LIVER, SIGNAL = 0.82; EXPRESSED IN BRAIN, SIGNAL = 0.86; EST_HUMAN HIT: T78912.1, EVALUE 4.90e+00; SWISSPROT HIT: Q9Y2E4, EVALUE 5.60e-01
SVQRHFAYLNSLNTQENPVRKILELWKLSAFEDLDNLPKATLNLINAPWSNRSCFSLLHTLHSYKMLMELILPCS

SEQ ID NO: 45040 - protein, 19 aa, Homo sapiens
  MAP TO AL136313.3; EXPRESSED IN LUNG, SIGNAL = 0.95; EXPRESSED IN BONE MARROW, SIGNAL = 0.84; EXPRESSED IN ADULT LIVER, SIGNAL = 0.94; EXPRESSED IN PLACENTA, SIGNAL = 0.91; EXPRESSED IN FETAL LIVER, SIGNAL = 0.82; EXPRESSED IN BRAIN, SIGNAL = 0.86
APCKDTLHTLIHLILRKTL

SEQ ID NO: 45041 - protein, 47 aa, Homo sapiens
  MAP TO AC012571.3; EXPRESSED IN ADULT LIVER, SIGNAL = 0.79; EXPRESSED IN FETAL LIVER, SIGNAL = 0.57; EXPRESSED IN BONE MARROW, SIGNAL = 0.6; EXPRESSED IN LUNG, SIGNAL = 0.85; EXPRESSED IN PLACENTA, SIGNAL = 0.9; EXPRESSED IN BRAIN, SIGNAL = 0.63; EST_HUMAN HIT: BE711113.1, EVALUE 2.00e-07; SWISSPROT HIT: O15393, EVALUE 4.00e-08
PIQNTLRQARVETISTDVCNRKDVYDGLITPGMLCAGFMEGKIDACK

SEQ ID NO: 45042 - protein, 41 aa, Homo sapiens
  MAP TO AC024736.2; EXPRESSED IN FETAL LIVER, SIGNAL = 0.78; EXPRESSED IN PLACENTA, SIGNAL = 0.93; EXPRESSED IN BRAIN, SIGNAL = 0.83; EXPRESSED IN ADULT LIVER, SIGNAL =   1; EXPRESSED IN BONE MARROW, SIGNAL = 0.73; SWISSPROT HIT: P40061, EVALUE 3.70e+00
PIENGEQKRENENWLVSSSFVATERLTLALAFMDCKRALAP

SEQ ID NO: 45043 - protein, 26 aa, Homo sapiens
  MAP TO AC024736.2; EXPRESSED IN FETAL LIVER, SIGNAL = 0.78; EXPRESSED IN PLACENTA, SIGNAL = 0.93; EXPRESSED IN BRAIN, SIGNAL = 0.83; EXPRESSED IN ADULT LIVER, SIGNAL =   1; EXPRESSED IN BONE MARROW, SIGNAL = 0.73
CLSKMVNRRGRMKIGLYRLLLWLQKG

SEQ ID NO: 45044 - protein, 27 aa, Homo sapiens
  MAP TO AC022050.2; EXPRESSED IN LUNG, SIGNAL = 1.3; EXPRESSED IN PLACENTA, SIGNAL = 1.3; EXPRESSED IN BRAIN, SIGNAL =   1; EXPRESSED IN BONE MARROW, SIGNAL = 0.95; EXPRESSED IN ADULT LIVER, SIGNAL = 1.2; EXPRESSED IN FETAL LIVER, SIGNAL = 0.98
STKIGSYKSFNADSFYTTVTHEQATLY

SEQ ID NO: 45045 - protein, 18 aa, Homo sapiens
  MAP TO AC022050.2; EXPRESSED IN LUNG, SIGNAL = 1.3; EXPRESSED IN PLACENTA, SIGNAL = 1.3; EXPRESSED IN BRAIN, SIGNAL =   1; EXPRESSED IN BONE MARROW, SIGNAL = 0.95; EXPRESSED IN ADULT LIVER, SIGNAL = 1.2; EXPRESSED IN FETAL LIVER, SIGNAL = 0.98
QLKLAATSLSMRILSIPL

SEQ ID NO: 45046 - protein, 52 aa, Homo sapiens
  MAP TO AL158849.5; EXPRESSED IN ADULT LIVER, SIGNAL = 0.87; EXPRESSED IN FETAL LIVER, SIGNAL = 1.3; EXPRESSED IN BRAIN, SIGNAL =   1; EXPRESSED IN BONE MARROW, SIGNAL = 0.95; EXPRESSED IN PLACENTA, SIGNAL =   1; SWISSPROT HIT: P49413, EVALUE 2.10e+00; EST_HUMAN HIT: AV705858.1, EVALUE 3.00e-15
VTMKDNINTFVSRIIELCLQFPHGITDQVIQNEMPHIEAQQRAVAINRLLSM

SEQ ID NO: 45047 - protein, 48 aa, Homo sapiens
  MAP TO AC018425.3; EXPRESSED IN ADULT LIVER, SIGNAL = 1.5; EXPRESSED IN FETAL LIVER, SIGNAL = 1.5; EXPRESSED IN BONE MARROW, SIGNAL = 1.1; EXPRESSED IN LUNG, SIGNAL = 1.4; EXPRESSED IN PLACENTA, SIGNAL = 1.2; EXPRESSED IN BRAIN, SIGNAL =   1; SWISSPROT HIT: P18615, EVALUE 4.70e+00; EST_HUMAN HIT: BF344155.1, EVALUE 2.30e+00
FIIFLITKVRRTSNAILTSKKKNINSTTNQGQLHRCVTCTAAQGPMLR

SEQ ID NO: 45048 - protein, 31 aa, Homo sapiens
  MAP TO AC009924.4; EXPRESSED IN PLACENTA, SIGNAL = 0.82; EXPRESSED IN ADULT LIVER, SIGNAL = 0.8; EXPRESSED IN FETAL LIVER, SIGNAL = 0.75; EXPRESSED IN BRAIN, SIGNAL = 0.82; EXPRESSED IN BONE MARROW, SIGNAL = 0.77
KQMFYSTGMIRPSLTVWKKLGITQKVTVRTS

SEQ ID NO: 45049 - protein, 40 aa, Homo sapiens
  MAP TO AL158175.6; EXPRESSED IN ADULT LIVER, SIGNAL = 0.93; EXPRESSED IN BRAIN, SIGNAL = 0.75; EXPRESSED IN LUNG, SIGNAL = 0.85; EXPRESSED IN FETAL LIVER, SIGNAL = 0.78; EXPRESSED IN BONE MARROW, SIGNAL = 1.4; EXPRESSED IN PLACENTA, SIGNAL = 0.87
VSTFTVKQAPVMGKPSGRDKGLNGKLSIYSNLPLMAEDEH

SEQ ID NO: 45050 - protein, 54 aa, Homo sapiens
  MAP TO AC007458.13; EXPRESSED IN ADULT LIVER, SIGNAL = 1.4; EXPRESSED IN BRAIN, SIGNAL = 1.3; EXPRESSED IN LUNG, SIGNAL = 1.4; EXPRESSED IN PLACENTA, SIGNAL = 1.3; EXPRESSED IN FETAL LIVER, SIGNAL = 1.1; EXPRESSED IN BONE MARROW, SIGNAL = 1.5; EST_HUMAN HIT: BE887949.1, EVALUE 2.00e-05; SWISSPROT HIT: P44135, EVALUE 3.50e+00
LHVLSLPLFWDQPILQGVLVHSSKEWYLEVKIWVISVLIVIEMLLLPGPLNGQS

SEQ ID NO: 45051 - protein, 42 aa, Homo sapiens
  MAP TO AC009933.5; EXPRESSED IN BRAIN, SIGNAL = 0.67; EXPRESSED IN BONE MARROW, SIGNAL = 0.66; EXPRESSED IN ADULT LIVER, SIGNAL = 0.79; EXPRESSED IN PLACENTA, SIGNAL = 0.7; EXPRESSED IN FETAL LIVER, SIGNAL = 0.69
QPSQRGKLEMMIVVVVVVMMMMMMKMIMMMERRQRGKRRRRI

SEQ ID NO: 45052 - protein, 26 aa, Homo sapiens
  MAP TO AC011686.3; EXPRESSED IN PLACENTA, SIGNAL = 0.92; EXPRESSED IN ADULT LIVER, SIGNAL = 0.73; EXPRESSED IN FETAL LIVER, SIGNAL = 0.93; EXPRESSED IN BRAIN, SIGNAL = 0.81; EXPRESSED IN BONE MARROW, SIGNAL = 0.82
ILPRRELAPLLGATRPDVLPALYLLR

SEQ ID NO: 45053 - protein, 19 aa, Homo sapiens
  MAP TO AC012241.4; EXPRESSED IN LUNG, SIGNAL = 1.1; EXPRESSED IN PLACENTA, SIGNAL = 0.77; EXPRESSED IN ADULT LIVER, SIGNAL =   1; EXPRESSED IN FETAL LIVER, SIGNAL = 0.65; EXPRESSED IN BRAIN, SIGNAL = 0.63; EXPRESSED IN BONE MARROW, SIGNAL = 0.71
CDTEGAPQHLLLHRNEEEH

SEQ ID NO: 45054 - protein, 45 aa, Homo sapiens
  MAP TO AL157392.2; EXPRESSED IN PLACENTA, SIGNAL = 0.69; EXPRESSED IN ADULT LIVER, SIGNAL = 0.69; EXPRESSED IN FETAL LIVER, SIGNAL = 0.82; EXPRESSED IN BRAIN, SIGNAL = 0.51; EXPRESSED IN BONE MARROW, SIGNAL = 0.74; EST_HUMAN HIT: BE092058.1, EVALUE 9.00e+00
RVSVINDEAKGCKQKCCTLVREISPFAECQDGEQARARDDCPFRK

SEQ ID NO: 45055 - protein, 32 aa, Homo sapiens
  MAP TO AC015525.3; EXPRESSED IN PLACENTA, SIGNAL = 0.65; EXPRESSED IN FETAL LIVER, SIGNAL = 0.52; EXPRESSED IN BRAIN, SIGNAL = 0.76; EXPRESSED IN BONE MARROW, SIGNAL = 0.49; EST_HUMAN HIT: AA054171.1, EVALUE 7.60e+00
NPMQFEESDCDSSDGECSDATVRTNKHYSSAT

SEQ ID NO: 45056 - protein, 32 aa, Homo sapiens
  MAP TO AC015525.3; EXPRESSED IN PLACENTA, SIGNAL = 0.65; EXPRESSED IN FETAL LIVER, SIGNAL = 0.52; EXPRESSED IN BRAIN, SIGNAL = 0.76; EXPRESSED IN BONE MARROW, SIGNAL = 0.49; EST_HUMAN HIT: AA843710.1, EVALUE 1.00e-06
TPCSLKNRTVTLQMGSVLMPQLGPINTTALLP

SEQ ID NO: 45057 - protein, 31 aa, Homo sapiens
  MAP TO AL157396.2; EXPRESSED IN ADULT LIVER, SIGNAL = 0.73; EXPRESSED IN BRAIN, SIGNAL = 0.71; EXPRESSED IN PLACENTA, SIGNAL = 0.77; EXPRESSED IN FETAL LIVER, SIGNAL = 0.56; EXPRESSED IN BONE MARROW, SIGNAL = 0.59; SWISSPROT HIT: P38671, EVALUE 6.50e+00; EST_HUMAN HIT: AW885952.1, EVALUE 2.00e-10
TVEDDLLLQKPFQKEKHGKVAHKQVAAELLD

SEQ ID NO: 45058 - protein, 31 aa, Homo sapiens
  MAP TO AL157396.2; EXPRESSED IN ADULT LIVER, SIGNAL = 0.73; EXPRESSED IN BRAIN, SIGNAL = 0.71; EXPRESSED IN PLACENTA, SIGNAL = 0.77; EXPRESSED IN FETAL LIVER, SIGNAL = 0.56; EXPRESSED IN BONE MARROW, SIGNAL = 0.59; EST_HUMAN HIT: AW885952.1, EVALUE 2.00e-13
QLKMTYCSKNHFRKKNMERWPINKLQQNCWI

SEQ ID NO: 45059 - protein, 50 aa, Homo sapiens
  MAP TO AC009467.3; EXPRESSED IN PLACENTA, SIGNAL = 0.67; EXPRESSED IN ADULT LIVER, SIGNAL = 0.84; EXPRESSED IN FETAL LIVER, SIGNAL = 0.61; EXPRESSED IN BRAIN, SIGNAL = 0.66; EXPRESSED IN BONE MARROW, SIGNAL = 0.71; SWISSPROT HIT: Q04631, EVALUE 1.60e+00; EST_HUMAN HIT: BF351951.1, EVALUE 2.00e-17
SMEIFQSKLEDAEKAASTKEDYRRERWRKPTYSDKAQNCQESRESDLVKY

SEQ ID NO: 45060 - protein, 135 aa, Homo sapiens
  MAP TO AC025324.2; EXPRESSED IN ADULT LIVER, SIGNAL = 1.3; EXPRESSED IN BRAIN, SIGNAL = 1.1; EXPRESSED IN LUNG, SIGNAL = 1.2; EXPRESSED IN PLACENTA, SIGNAL = 1.4; EXPRESSED IN FETAL LIVER, SIGNAL = 0.94; EXPRESSED IN BONE MARROW, SIGNAL = 1.2; EST_HUMAN HIT: AL043810.1, EVALUE 1.00e-13; SWISSPROT HIT: P51611, EVALUE 2.20e+00
LPSRWDSRAHPSGDGGGSPSGTATVEMPAEWGRHGQGCILCGAGGGREQVGAPPPTELAVQEPHTPGHSCSHPAVALDLGIPALSGAWEAPAPTGLEVPAPAPWPLPTPSTCMKTGDEPVQSKVVAKSECCCNPA

SEQ ID NO: 45061 - protein, 48 aa, Homo sapiens
  MAP TO AC011280.3; EXPRESSED IN LUNG, SIGNAL = 0.84; EXPRESSED IN BONE MARROW, SIGNAL =   1; EXPRESSED IN ADULT LIVER, SIGNAL = 0.81; EXPRESSED IN BRAIN, SIGNAL =   1; EXPRESSED IN PLACENTA, SIGNAL = 1.1; EXPRESSED IN FETAL LIVER, SIGNAL = 1.1; SWISSPROT HIT: Q49409, EVALUE 1.20e+00
CYNKTMVLIYDERGDVPPRFLFKEGLVSSADGIPVNRDLSGASDLEKA

SEQ ID NO: 45062 - protein, 36 aa, Homo sapiens
  MAP TO AL122007.7; EXPRESSED IN LUNG, SIGNAL =   1; EXPRESSED IN BONE MARROW, SIGNAL = 1.1; EXPRESSED IN PLACENTA, SIGNAL = 0.95; EXPRESSED IN ADULT LIVER, SIGNAL = 1.4; EXPRESSED IN FETAL LIVER, SIGNAL = 1.1; EXPRESSED IN BRAIN, SIGNAL = 1.2; SWISSPROT HIT: P78559, EVALUE 9.70e-01; EST_HUMAN HIT: AW880885.1, EVALUE 2.00e-06
RELELEVKPEDVTELLQSREKTLMHKELLFTDEQTK

SEQ ID NO: 45063 - protein, 27 aa, Homo sapiens
  MAP TO AC021774.3; EXPRESSED IN ADULT LIVER, SIGNAL =   1; EXPRESSED IN BRAIN, SIGNAL = 0.75; EXPRESSED IN BONE MARROW, SIGNAL = 0.81; EXPRESSED IN LUNG, SIGNAL =   1; EXPRESSED IN PLACENTA, SIGNAL = 0.94; EXPRESSED IN FETAL LIVER, SIGNAL = 0.68
ITYQQDHEAPSPESGESTKGMKNTETA

SEQ ID NO: 45064 - protein, 20 aa, Homo sapiens
  MAP TO AC021774.3; EXPRESSED IN ADULT LIVER, SIGNAL =   1; EXPRESSED IN BRAIN, SIGNAL = 0.75; EXPRESSED IN BONE MARROW, SIGNAL = 0.81; EXPRESSED IN LUNG, SIGNAL =   1; EXPRESSED IN PLACENTA, SIGNAL = 0.94; EXPRESSED IN FETAL LIVER, SIGNAL = 0.68
SPTNRTTRPPVQNLENQQRA

SEQ ID NO: 45065 - protein, 36 aa, Homo sapiens
  MAP TO AC013823.3; EXPRESSED IN FETAL LIVER, SIGNAL = 0.47; EXPRESSED IN PLACENTA, SIGNAL = 0.92; EXPRESSED IN ADULT LIVER, SIGNAL = 0.85; EXPRESSED IN BONE MARROW, SIGNAL = 0.51; EXPRESSED IN BRAIN, SIGNAL = 0.59
EERYLKRFKNLVEFPQEELGRARMRVLLYLSLKSHW

SEQ ID NO: 45066 - protein, 23 aa, Homo sapiens
  MAP TO AC007957.34; EXPRESSED IN ADULT LIVER, SIGNAL = 1.3; EXPRESSED IN BRAIN, SIGNAL = 2.9; EXPRESSED IN LUNG, SIGNAL = 1.4; EXPRESSED IN PLACENTA, SIGNAL = 1.1; EXPRESSED IN FETAL LIVER, SIGNAL = 1.5; EXPRESSED IN BONE MARROW, SIGNAL = 1.7; EST_HUMAN HIT: BE932859.1, EVALUE 6.00e-05; SWISSPROT HIT: P42356, EVALUE 4.00e-06
MSLNIGRAKGSMNRHVAAIGPRF

SEQ ID NO: 45067 - protein, 34 aa, Homo sapiens
  MAP TO AC007957.34; EXPRESSED IN ADULT LIVER, SIGNAL = 1.3; EXPRESSED IN BRAIN, SIGNAL = 2.9; EXPRESSED IN LUNG, SIGNAL = 1.4; EXPRESSED IN PLACENTA, SIGNAL = 1.1; EXPRESSED IN FETAL LIVER, SIGNAL = 1.5; EXPRESSED IN BONE MARROW, SIGNAL = 1.7; EST_HUMAN HIT: BE883476.1, EVALUE 5.00e-12; SWISSPROT HIT: P41344, EVALUE 6.50e+00
LFSLSSWCSGLRSPSTAALTKWRSSPACCSAPCP

SEQ ID NO: 45068 - protein, 26 aa, Homo sapiens
  MAP TO AC016057.3; EXPRESSED IN FETAL LIVER, SIGNAL = 0.54; EXPRESSED IN PLACENTA, SIGNAL = 0.7; EXPRESSED IN ADULT LIVER, SIGNAL = 0.63; EXPRESSED IN BONE MARROW, SIGNAL = 0.54; EXPRESSED IN BRAIN, SIGNAL = 0.52
VEGDVQCLPQTGGGAICKNKEQKQHQ

SEQ ID NO: 45069 - protein, 35 aa, Homo sapiens
  MAP TO AC016847.3; EXPRESSED IN PLACENTA, SIGNAL = 0.85; EXPRESSED IN ADULT LIVER, SIGNAL = 0.54; EXPRESSED IN FETAL LIVER, SIGNAL = 0.51; EXPRESSED IN BRAIN, SIGNAL = 0.65; EXPRESSED IN BONE MARROW, SIGNAL = 0.69; SWISSPROT HIT: P22003, EVALUE 4.00e-14; EST_HUMAN HIT: BF371416.1, EVALUE 6.00e-13
LSRTTPLTTQSPPLASLHDTNFLNDADMVMSFVNL

SEQ ID NO: 45070 - protein, 46 aa, Homo sapiens
  MAP TO AC025644.2; EXPRESSED IN ADULT LIVER, SIGNAL = 0.84; EXPRESSED IN BRAIN, SIGNAL = 0.59; EXPRESSED IN PLACENTA, SIGNAL = 0.76; EXPRESSED IN FETAL LIVER, SIGNAL = 0.57; EXPRESSED IN BONE MARROW, SIGNAL = 0.57
CTIDLFFFLFILFFFFPSPLPSLSPPVLVSSSSSSSSSSSSSSAMN

SEQ ID NO: 45071 - protein, 33 aa, Homo sapiens
  MAP TO AC025644.2; EXPRESSED IN ADULT LIVER, SIGNAL = 0.84; EXPRESSED IN BRAIN, SIGNAL = 0.59; EXPRESSED IN PLACENTA, SIGNAL = 0.76; EXPRESSED IN FETAL LIVER, SIGNAL = 0.57; EXPRESSED IN BONE MARROW, SIGNAL = 0.57
LMMMMMMMMMMMMMKREQEEKEKEEGRGRKRRG

SEQ ID NO: 45072 - protein, 40 aa, Homo sapiens
  MAP TO AL121828.6; EXPRESSED IN PLACENTA, SIGNAL = 0.83; EXPRESSED IN ADULT LIVER, SIGNAL = 0.83; EXPRESSED IN FETAL LIVER, SIGNAL = 0.73; EXPRESSED IN BRAIN, SIGNAL = 0.81; EXPRESSED IN BONE MARROW, SIGNAL = 0.73; EXPRESSED IN LUNG, SIGNAL = 1.2; EST_HUMAN HIT: R68744.1, EVALUE 4.80e-01
RCGTVYYYGMTWPRLTDTEKLVHSWEKQPPNMASAKELAP

SEQ ID NO: 45073 - protein, 164 aa, Homo sapiens
  MAP TO AP000404.2; EXPRESSED IN ADULT LIVER, SIGNAL = 0.85; EXPRESSED IN BONE MARROW, SIGNAL = 0.86; EXPRESSED IN BRAIN, SIGNAL = 1.1; EXPRESSED IN PLACENTA, SIGNAL = 0.98; EXPRESSED IN FETAL LIVER, SIGNAL = 0.9; SWISSPROT HIT: P07973, EVALUE 2.10e+00; EST_HUMAN HIT: AU140704.1, EVALUE 1.00e-93
VPKSDLLHTKSLRGHKDCFEKYHLIANQGCPRSKLSKSTYEEVKTILSKKINWIVQYAQNKDLDSDSECSKNPQHHLFNFRHKPEEKLLPQFDSQVPKYSAKWIDGSAGGISNCTQRILEQRENTDFGLSMLQDSGATLCRNSVLWPHSHNQAQKKEETISSPE

SEQ ID NO: 45074 - protein, 33 aa, Homo sapiens
  MAP TO AC013751.3; EXPRESSED IN BRAIN, SIGNAL = 0.47; EXPRESSED IN BONE MARROW, SIGNAL = 0.53; EXPRESSED IN PLACENTA, SIGNAL = 0.47; EXPRESSED IN FETAL LIVER, SIGNAL = 0.46; SWISSPROT HIT: O75131, EVALUE 5.00e-14; EST_HUMAN HIT: AA844277.1, EVALUE 7.00e-13
VECYDYDNDGSHDLIGTFQTTMTKLKEASRSSP

SEQ ID NO: 45075 - protein, 21 aa, Homo sapiens
  MAP TO AC013751.3; EXPRESSED IN BRAIN, SIGNAL = 0.47; EXPRESSED IN BONE MARROW, SIGNAL = 0.53; EXPRESSED IN PLACENTA, SIGNAL = 0.47; EXPRESSED IN FETAL LIVER, SIGNAL = 0.46; EST_HUMAN HIT: AW026680.1, EVALUE 9.00e-06
WSVMIMTMMGHMISLEHFRPP

SEQ ID NO: 45076 - protein, 36 aa, Homo sapiens
  MAP TO AC025740.1; EXPRESSED IN FETAL LIVER, SIGNAL = 0.88; EXPRESSED IN PLACENTA, SIGNAL = 0.79; EXPRESSED IN ADULT LIVER, SIGNAL = 0.78; EXPRESSED IN BRAIN, SIGNAL = 0.67; EXPRESSED IN BONE MARROW, SIGNAL = 0.69
MCPEPEAWSNSVLSPGRDEASSSSVYSPSTYTELGE

SEQ ID NO: 45077 - protein, 30 aa, Homo sapiens
  MAP TO AC022474.3; EXPRESSED IN BRAIN, SIGNAL = 0.45; EXPRESSED IN PLACENTA, SIGNAL = 0.49; EXPRESSED IN ADULT LIVER, SIGNAL = 0.61; EXPRESSED IN BONE MARROW, SIGNAL = 0.44
TRMFLKQCLISKIHSILRVPRLERIFLRSR

SEQ ID NO: 45078 - protein, 40 aa, Homo sapiens
  MAP TO AC011957.2; EXPRESSED IN PLACENTA, SIGNAL = 0.62; EXPRESSED IN BONE MARROW, SIGNAL = 0.63; EXPRESSED IN ADULT LIVER, SIGNAL = 0.7; EXPRESSED IN FETAL LIVER, SIGNAL = 0.5; EXPRESSED IN BRAIN, SIGNAL =   2; EST_HUMAN HIT: AW897155.1, EVALUE 4.00e-19; SWISSPROT HIT: O55144, EVALUE 8.30e+00
HQGPETACDRGGHAADRPVYPDLLAGCGPPAKDSGEVQHG

SEQ ID NO: 45079 - protein, 43 aa, Homo sapiens
  MAP TO AC019040.3; EXPRESSED IN BONE MARROW, SIGNAL = 0.81; EXPRESSED IN ADULT LIVER, SIGNAL =   1; EXPRESSED IN FETAL LIVER, SIGNAL = 0.88; EXPRESSED IN BRAIN, SIGNAL = 0.79; EXPRESSED IN LUNG, SIGNAL = 0.84; EXPRESSED IN PLACENTA, SIGNAL =   1; EST_HUMAN HIT: BF128229.1, EVALUE 6.20e-01
RQCICSPWELMKQKIAKGRHRFCPQTNYWMGVIRRWLPSEKKA

SEQ ID NO: 45080 - protein, 94 aa, Homo sapiens
  MAP TO AC007613.3; EXPRESSED IN PLACENTA, SIGNAL = 0.68; EXPRESSED IN FETAL LIVER, SIGNAL = 0.6; EXPRESSED IN BRAIN, SIGNAL = 0.54; EXPRESSED IN BONE MARROW, SIGNAL = 0.61; SWISSPROT HIT: P53978, EVALUE 1.80e+00; EST_HUMAN HIT: R17132.1, EVALUE 1.00e-42
LLTPRQEAVPVVSLPAPSFSHEVGSELASVPVMPLTSILPLQVEESALPSAVLANGGKMPFTMPEAFLDDGDMVLGDELDDLLDSAPETNETVM

SEQ ID NO: 45081 - protein, 25 aa, Homo sapiens
  MAP TO AC007613.3; EXPRESSED IN PLACENTA, SIGNAL = 0.68; EXPRESSED IN FETAL LIVER, SIGNAL = 0.6; EXPRESSED IN BRAIN, SIGNAL = 0.54; EXPRESSED IN BONE MARROW, SIGNAL = 0.61; EST_HUMAN HIT: R17132.1, EVALUE 5.00e-10
WKRALCHLQCWQMEERCPSLCQKLF

SEQ ID NO: 45082 - protein, 45 aa, Homo sapiens
  MAP TO AC011831.4; EXPRESSED IN ADULT LIVER, SIGNAL = 0.87; EXPRESSED IN BRAIN, SIGNAL = 0.66; EXPRESSED IN BONE MARROW, SIGNAL = 0.6; EXPRESSED IN PLACENTA, SIGNAL = 0.69; EXPRESSED IN FETAL LIVER, SIGNAL = 0.6
VAIDTFNAEFQDSIAFIIILIEKILLMEATAHLEQQLQRHLLQWR

SEQ ID NO: 45083 - protein, 50 aa, Homo sapiens
  MAP TO AL157792.2; EXPRESSED IN PLACENTA, SIGNAL = 0.64; EXPRESSED IN FETAL LIVER, SIGNAL = 0.62; EXPRESSED IN BRAIN, SIGNAL = 0.63; EXPRESSED IN BONE MARROW, SIGNAL = 0.58; EXPRESSED IN ADULT LIVER, SIGNAL = 0.76; SWISSPROT HIT: P98160, EVALUE 7.00e-03; EST_HUMAN HIT: BF326540.1, EVALUE 3.00e-02
VNPGEAITLVCVTTGGEPAPSLTWVRSFGTLPEKTVLNGGTLTIPAITSD

SEQ ID NO: 45084 - protein, 61 aa, Homo sapiens
  MAP TO AC009943.4; EXPRESSED IN PLACENTA, SIGNAL = 0.63; EXPRESSED IN FETAL LIVER, SIGNAL = 0.63; EXPRESSED IN ADULT LIVER, SIGNAL = 0.84; EXPRESSED IN BONE MARROW, SIGNAL = 0.61; EXPRESSED IN BRAIN, SIGNAL = 0.58; SWISSPROT HIT: P02533, EVALUE 4.60e-02; EST_HUMAN HIT: BE616492.1, EVALUE 5.30e-01
STNTRYGAGFSSSGASLDVGFGWGISDEKGLEVSKADGRETRGSGSAGGETIVFGPDAGSS

SEQ ID NO: 45085 - protein, 52 aa, Homo sapiens
  MAP TO AC009943.4; EXPRESSED IN PLACENTA, SIGNAL = 0.63; EXPRESSED IN FETAL LIVER, SIGNAL = 0.63; EXPRESSED IN ADULT LIVER, SIGNAL = 0.84; EXPRESSED IN BONE MARROW, SIGNAL = 0.61; EXPRESSED IN BRAIN, SIGNAL = 0.58; SWISSPROT HIT: P09835, EVALUE 3.60e+00
IAPTQDMVLALVAVVPLWMWDLVGGYLMKRDWKSVKLMGEKLEAVDLLGVKP

SEQ ID NO: 45086 - protein, 77 aa, Homo sapiens
  MAP TO AC009334.3; EXPRESSED IN ADULT LIVER, SIGNAL = 0.93; EXPRESSED IN FETAL LIVER, SIGNAL = 0.7; EXPRESSED IN BRAIN, SIGNAL = 0.8; EXPRESSED IN BONE MARROW, SIGNAL = 1.1; EXPRESSED IN PLACENTA, SIGNAL = 0.81; EST_HUMAN HIT: AW385095.1, EVALUE 3.00e-37; SWISSPROT HIT: Q99698, EVALUE 3.00e-39
TYFGMDVSAVEDPVQRRALETMIKTYGQTPRQLFHMAHVSRPGAKLNIEGELPAAVGLLVQFAFRETREQVKEITYP

SEQ ID NO: 45087 - protein, 18 aa, Homo sapiens
  MAP TO AC009334.3; EXPRESSED IN ADULT LIVER, SIGNAL = 0.93; EXPRESSED IN FETAL LIVER, SIGNAL = 0.7; EXPRESSED IN BRAIN, SIGNAL = 0.8; EXPRESSED IN BONE MARROW, SIGNAL = 1.1; EXPRESSED IN PLACENTA, SIGNAL = 0.81; EST_HUMAN HIT: AU135542.1, EVALUE 3.00e-03
HILEWMSLQLKIQFRDER

SEQ ID NO: 45088 - protein, 25 aa, Homo sapiens
  MAP TO AL121901.10; EXPRESSED IN BONE MARROW, SIGNAL = 0.45; EXPRESSED IN ADULT LIVER, SIGNAL = 0.55; EXPRESSED IN BRAIN, SIGNAL = 0.45; EXPRESSED IN PLACENTA, SIGNAL = 0.52
VLQVGLPLPDFLAMNYNLAELDIVE

SEQ ID NO: 45089 - protein, 69 aa, Homo sapiens
  MAP TO AC013291.4; EXPRESSED IN PLACENTA, SIGNAL = 0.5; EXPRESSED IN ADULT LIVER, SIGNAL = 0.57; EXPRESSED IN BRAIN, SIGNAL = 0.46; EST_HUMAN HIT: N41861.1, EVALUE 5.00e-28; SWISSPROT HIT: Q13563, EVALUE 7.00e-03
FRSLNMVSECLFSLINGDDMFATFAKMQQKSYLVWLFSRIYLYSFISLFIYMILSLFIALITDTYETIK

SEQ ID NO: 45090 - protein, 27 aa, Homo sapiens
  MAP TO AC013626.3; EXPRESSED IN PLACENTA, SIGNAL = 0.49; EXPRESSED IN ADULT LIVER, SIGNAL = 0.53; EXPRESSED IN FETAL LIVER, SIGNAL = 0.51; EXPRESSED IN BRAIN, SIGNAL = 0.56; EXPRESSED IN BONE MARROW, SIGNAL = 0.55; SWISSPROT HIT: Q05471, EVALUE 5.00e-04; EST_HUMAN HIT: AI935484.1, EVALUE 7.00e-10
AWNPAAEDQCFDRCHRLGQKQEVIITK

SEQ ID NO: 45091 - protein, 27 aa, Homo sapiens
  MAP TO AC025812.4; EXPRESSED IN LUNG, SIGNAL = 0.83; EXPRESSED IN PLACENTA, SIGNAL = 1.4; EXPRESSED IN BONE MARROW, SIGNAL = 0.77; EXPRESSED IN ADULT LIVER, SIGNAL =   1; EXPRESSED IN FETAL LIVER, SIGNAL = 1.2; EXPRESSED IN BRAIN, SIGNAL = 0.75
GTMVWVFKKTRIKVMASCRPKQDLTLV

SEQ ID NO: 45092 - protein, 58 aa, Homo sapiens
  MAP TO AL121584.17; EXPRESSED IN LUNG, SIGNAL =   1; EXPRESSED IN PLACENTA, SIGNAL = 1.1; EXPRESSED IN FETAL LIVER, SIGNAL = 0.95; EXPRESSED IN ADULT LIVER, SIGNAL = 1.1; EXPRESSED IN BRAIN, SIGNAL = 0.83; EXPRESSED IN BONE MARROW, SIGNAL = 0.9
VNHMEDIPQAVPYKKAKVVSLQLMVCGYRAAEGEKARRAARVLSTPKVLAPGQVLQTH

SEQ ID NO: 45093 - protein, 22 aa, Homo sapiens
  MAP TO AL121584.17; EXPRESSED IN LUNG, SIGNAL =   1; EXPRESSED IN PLACENTA, SIGNAL = 1.1; EXPRESSED IN FETAL LIVER, SIGNAL = 0.95; EXPRESSED IN ADULT LIVER, SIGNAL = 1.1; EXPRESSED IN BRAIN, SIGNAL = 0.83; EXPRESSED IN BONE MARROW, SIGNAL = 0.9
LITWRIFLRLCLTKRLRWFHCN

SEQ ID NO: 45094 - protein, 23 aa, Homo sapiens
  MAP TO AL161722.2; EXPRESSED IN PLACENTA, SIGNAL = 0.59; EXPRESSED IN ADULT LIVER, SIGNAL = 0.73; EXPRESSED IN FETAL LIVER, SIGNAL = 0.47; EXPRESSED IN BRAIN, SIGNAL = 0.51; EXPRESSED IN BONE MARROW, SIGNAL = 0.59
TKTTSLECSGEPLSIWSYPLTLK

SEQ ID NO: 45095 - protein, 54 aa, Homo sapiens
  MAP TO AC015999.3; EXPRESSED IN LUNG, SIGNAL = 1.5; EXPRESSED IN PLACENTA, SIGNAL = 0.68; EXPRESSED IN FETAL LIVER, SIGNAL = 1.3; EXPRESSED IN BRAIN, SIGNAL = 0.65; EXPRESSED IN ADULT LIVER, SIGNAL = 1.1; EXPRESSED IN BONE MARROW, SIGNAL = 1.5; SWISSPROT HIT: P02468, EVALUE 2.70e+00; EST_HUMAN HIT: BE813161.1, EVALUE 5.00e-28
IEIQAPPGVPIGYVIQTWHPCLPKFTIQNEKREDVLKISGPCVVCSCCGDVDFE

SEQ ID NO: 45096 - protein, 47 aa, Homo sapiens
  MAP TO AL157377.1; EXPRESSED IN ADULT LIVER, SIGNAL =   3; EXPRESSED IN BRAIN, SIGNAL = 0.94; EXPRESSED IN BONE MARROW, SIGNAL = 1.1; EXPRESSED IN LUNG, SIGNAL = 1.1; EXPRESSED IN PLACENTA, SIGNAL = 1.1; EXPRESSED IN FETAL LIVER, SIGNAL = 2.2; EST_HUMAN HIT: BE272325.1, EVALUE 3.00e-20
EDRFYSNSERLSGPAEPRSFKMTSLDKMDRSMPSEMESSRNDAKDDL

SEQ ID NO: 45097 - protein, 54 aa, Homo sapiens
  MAP TO AC011023.3; EXPRESSED IN LUNG, SIGNAL = 1.3; EXPRESSED IN BRAIN, SIGNAL = 1.2; EXPRESSED IN PLACENTA, SIGNAL = 1.1; EXPRESSED IN ADULT LIVER, SIGNAL = 1.2; EXPRESSED IN FETAL LIVER, SIGNAL = 1.1; EXPRESSED IN BONE MARROW, SIGNAL = 0.9; SWISSPROT HIT: Q15700, EVALUE 3.00e-27; EST_HUMAN HIT: BE467912.1, EVALUE 6.00e-16
KYRYQDEDAPHDHSLPRLTHEVRGPELVHVSEKNLSQIENVHGYVLQSHISPLK

SEQ ID NO: 45098 - protein, 17 aa, Homo sapiens
  MAP TO AC011023.3; EXPRESSED IN LUNG, SIGNAL = 1.3; EXPRESSED IN BRAIN, SIGNAL = 1.2; EXPRESSED IN PLACENTA, SIGNAL = 1.1; EXPRESSED IN ADULT LIVER, SIGNAL = 1.2; EXPRESSED IN FETAL LIVER, SIGNAL = 1.1; EXPRESSED IN BONE MARROW, SIGNAL = 0.9
SIDIKMRTLHMIIPYLD

SEQ ID NO: 45099 - protein, 44 aa, Homo sapiens
  MAP TO AC027341.1; EXPRESSED IN FETAL LIVER, SIGNAL = 0.87; EXPRESSED IN BONE MARROW, SIGNAL = 0.96; EXPRESSED IN PLACENTA, SIGNAL =   1; EXPRESSED IN ADULT LIVER, SIGNAL = 1.3; EXPRESSED IN BRAIN, SIGNAL = 0.86; EXPRESSED IN LUNG, SIGNAL = 0.94
MMAPYLILHLNDHLTRILLQIPSKITFPGIPHNRRKKNMDPMES

SEQ ID NO: 45100 - protein, 44 aa, Homo sapiens
  MAP TO AL162171.1; EXPRESSED IN PLACENTA, SIGNAL = 0.55; EXPRESSED IN BONE MARROW, SIGNAL = 0.55; EXPRESSED IN ADULT LIVER, SIGNAL = 0.52; EXPRESSED IN FETAL LIVER, SIGNAL = 0.59; EXPRESSED IN BRAIN, SIGNAL = 0.52; EST_HUMAN HIT: BE781497.1, EVALUE 5.00e-19
QTYDDGAATRLMSTVKPLREPAPSEDVIDIKPEPDDLIDEDLNF

SEQ ID NO: 45101 - protein, 131 aa, Homo sapiens
  MAP TO AC021468.2; EXPRESSED IN FETAL LIVER, SIGNAL = 0.5; EXPRESSED IN BRAIN, SIGNAL = 0.47; EXPRESSED IN BONE MARROW, SIGNAL = 0.46; SWISSPROT HIT: P48980, EVALUE 8.30e+00; EST_HUMAN HIT: AI492493.1, EVALUE 3.00e-59
FPWFGMDIGGTLVKLSYFEPIDITAEEEQEEVESLKSIRKYLTSNVAYGSTGIRDVHLELKDLTLFGRRGNLHFIRFPTQDLPTFIQMGRDKNFSTLQTVLCATGGGAYKFEKDFRTVGIFYSKLKIDTCF

SEQ ID NO: 45102 - protein, 28 aa, Homo sapiens
  MAP TO AC007009.2; EXPRESSED IN BRAIN, SIGNAL = 0.49; EXPRESSED IN BONE MARROW, SIGNAL = 0.52; EST_HUMAN HIT: BE970780.1, EVALUE 6.00e+00; SWISSPROT HIT: P28284, EVALUE 6.60e+00
PCLPPGHSQPNALPPGAENASERASKKR

SEQ ID NO: 45103 - protein, 39 aa, Homo sapiens
  MAP TO AC016706.2; EXPRESSED IN LUNG, SIGNAL = 1.1; EXPRESSED IN ADULT LIVER, SIGNAL = 1.1; EXPRESSED IN BRAIN, SIGNAL = 0.58; EXPRESSED IN BONE MARROW, SIGNAL = 0.67; EXPRESSED IN PLACENTA, SIGNAL = 1.3; EXPRESSED IN FETAL LIVER, SIGNAL = 0.52; SWISSPROT HIT: P41695, EVALUE 4.90e+00; EST_HUMAN HIT: AI361174.1, EVALUE 1.10e+00
GHNNYQNGIFQDYFCMLVVYKLVKVPEAWERDSKKEIKG

SEQ ID NO: 45104 - protein, 21 aa, Homo sapiens
  MAP TO AC016706.2; EXPRESSED IN LUNG, SIGNAL = 1.1; EXPRESSED IN ADULT LIVER, SIGNAL = 1.1; EXPRESSED IN BRAIN, SIGNAL = 0.58; EXPRESSED IN BONE MARROW, SIGNAL = 0.67; EXPRESSED IN PLACENTA, SIGNAL = 1.3; EXPRESSED IN FETAL LIVER, SIGNAL = 0.52
VTTIIKMAFSRTIFACLWFIS

SEQ ID NO: 45105 - protein, 60 aa, Homo sapiens
  MAP TO AC018501.5; EXPRESSED IN BONE MARROW, SIGNAL = 0.64; EXPRESSED IN PLACENTA, SIGNAL = 0.59; EXPRESSED IN ADULT LIVER, SIGNAL = 0.67; EXPRESSED IN FETAL LIVER, SIGNAL = 0.62; EXPRESSED IN BRAIN, SIGNAL = 0.6; EST_HUMAN HIT: AA179296.1, EVALUE 8.00e-17; SWISSPROT HIT: P11881, EVALUE 3.00e-19
YREETLLNVIKSVTRNGRSIILTAVLALILVYLFSIVGYLFFKDDFILEVDRLPNETAVP

SEQ ID NO: 45106 - protein, 22 aa, Homo sapiens
  MAP TO AC018501.5; EXPRESSED IN BONE MARROW, SIGNAL = 0.64; EXPRESSED IN PLACENTA, SIGNAL = 0.59; EXPRESSED IN ADULT LIVER, SIGNAL = 0.67; EXPRESSED IN FETAL LIVER, SIGNAL = 0.62; EXPRESSED IN BRAIN, SIGNAL = 0.6; EST_HUMAN HIT: AA179296.1, EVALUE 6.00e-03
CTEKRLCLMSLKVSLAMDGPSS

SEQ ID NO: 45107 - protein, 25 aa, Homo sapiens
  MAP TO AC022268.3; EXPRESSED IN LUNG, SIGNAL = 1.2; EXPRESSED IN PLACENTA, SIGNAL = 0.96; EXPRESSED IN FETAL LIVER, SIGNAL = 1.1; EXPRESSED IN ADULT LIVER, SIGNAL = 1.1; EXPRESSED IN BRAIN, SIGNAL = 0.88; EXPRESSED IN BONE MARROW, SIGNAL = 0.95
YLLTINFVQDTTPNILVSRIKKNKA

SEQ ID NO: 45108 - protein, 17 aa, Homo sapiens
  MAP TO AC009597.4; EXPRESSED IN PLACENTA, SIGNAL = 1.1; EXPRESSED IN FETAL LIVER, SIGNAL = 1.1; EXPRESSED IN ADULT LIVER, SIGNAL = 1.1; EXPRESSED IN BRAIN, SIGNAL =   1; EXPRESSED IN BONE MARROW, SIGNAL =   1
LVYMFQQYSMVQTCTPF

SEQ ID NO: 45109 - protein, 30 aa, Homo sapiens
  MAP TO AC018516.3; EXPRESSED IN PLACENTA, SIGNAL = 0.53; EXPRESSED IN BRAIN, SIGNAL = 0.45; EXPRESSED IN BONE MARROW, SIGNAL = 0.45
PGAIETAMEDLKGHVAETSGETIQGFWLLT

SEQ ID NO: 45110 - protein, 32 aa, Homo sapiens
  MAP TO AL133355.12; EXPRESSED IN PLACENTA, SIGNAL = 0.82; EXPRESSED IN ADULT LIVER, SIGNAL = 0.77; EXPRESSED IN BRAIN, SIGNAL = 0.68; EXPRESSED IN BONE MARROW, SIGNAL = 0.75; EXPRESSED IN FETAL LIVER, SIGNAL = 0.75; EST_HUMAN HIT: BE896958.1, EVALUE 3.40e+00
GRKQSCLDPQRAGCLPLKCLSSWLRSSRMLCW

SEQ ID NO: 45111 - protein, 130 aa, Homo sapiens
  MAP TO AC026707.2; EXPRESSED IN ADULT LIVER, SIGNAL = 1.9; EXPRESSED IN FETAL LIVER, SIGNAL = 1.3; EXPRESSED IN BRAIN, SIGNAL =   1; EXPRESSED IN BONE MARROW, SIGNAL = 0.89; EXPRESSED IN LUNG, SIGNAL = 0.91; EXPRESSED IN PLACENTA, SIGNAL = 0.93; EST_HUMAN HIT: AV714764.1, EVALUE 6.00e-73; SWISSPROT HIT: P70473, EVALUE 1.00e-56
LGLKSDELPNQMSMDDWPEMKKKFADVFAKKTKAEWCQIFDGTDACVTPVLTFEEVVHHDHNKERGSFITSEEQDVSPRPAPLLLNTPAIPSFKRDPFIGEHTEEILEEFGFSREEIYQLNSDKIIESNK

SEQ ID NO: 45112 - protein, 25 aa, Homo sapiens
  MAP TO AL121777.16; EXPRESSED IN PLACENTA, SIGNAL = 0.66; EXPRESSED IN ADULT LIVER, SIGNAL = 0.74; EXPRESSED IN FETAL LIVER, SIGNAL = 0.75; EXPRESSED IN BONE MARROW, SIGNAL = 0.71; EXPRESSED IN BRAIN, SIGNAL = 0.69
GPHGLAEGLVEPSTSDDSGAKLVFQ

SEQ ID NO: 45113 - protein, 21 aa, Homo sapiens
  MAP TO AL121777.16; EXPRESSED IN PLACENTA, SIGNAL = 0.66; EXPRESSED IN ADULT LIVER, SIGNAL = 0.74; EXPRESSED IN FETAL LIVER, SIGNAL = 0.75; EXPRESSED IN BONE MARROW, SIGNAL = 0.71; EXPRESSED IN BRAIN, SIGNAL = 0.69
DLTALQKGWWNPPLLMTLGPS

SEQ ID NO: 45114 - protein, 63 aa, Homo sapiens
  MAP TO AL136984.7; EXPRESSED IN BONE MARROW, SIGNAL = 0.73; EXPRESSED IN PLACENTA, SIGNAL = 1.2; EXPRESSED IN ADULT LIVER, SIGNAL = 0.71; EXPRESSED IN FETAL LIVER, SIGNAL = 0.75; EXPRESSED IN BRAIN, SIGNAL = 0.63; EST_HUMAN HIT: BE397531.1, EVALUE 2.30e-01; SWISSPROT HIT: Q29076, EVALUE 2.00e-02
LTLTPAQQQLLLQQAQAQAQLLAAAVQQHSASQQHSAAGATISASAATPMTQIPLSQPIQIAQ

SEQ ID NO: 45115 - protein, 35 aa, Homo sapiens
  MAP TO AL136984.7; EXPRESSED IN BONE MARROW, SIGNAL = 0.73; EXPRESSED IN PLACENTA, SIGNAL = 1.2; EXPRESSED IN ADULT LIVER, SIGNAL = 0.71; EXPRESSED IN FETAL LIVER, SIGNAL = 0.75; EXPRESSED IN BRAIN, SIGNAL = 0.63; EST_HUMAN HIT: AU124383.1, EVALUE 4.00e-07
HRHRHSCWLLQCSSTPPASSTVLLEPPSPPLLPRP

SEQ ID NO: 45116 - protein, 43 aa, Homo sapiens
  MAP TO AC015474.3; EXPRESSED IN PLACENTA, SIGNAL = 0.68; EXPRESSED IN ADULT LIVER, SIGNAL = 0.96; EXPRESSED IN FETAL LIVER, SIGNAL = 0.76; EXPRESSED IN BRAIN, SIGNAL = 0.58; EXPRESSED IN BONE MARROW, SIGNAL = 0.73; EST_HUMAN HIT: AW962814.1, EVALUE 2.00e-19; SWISSPROT HIT: O94788, EVALUE 1.00e-20
WNFPLLMFAWKIAPALCCGNTVVIKPAEQTPLSALYMGALIKE

SEQ ID NO: 45117 - protein, 63 aa, Homo sapiens
  MAP TO AL118505.13; EXPRESSED IN PLACENTA, SIGNAL = 0.75; EXPRESSED IN ADULT LIVER, SIGNAL = 0.94; EXPRESSED IN FETAL LIVER, SIGNAL = 0.74; EXPRESSED IN BRAIN, SIGNAL = 0.69; EXPRESSED IN BONE MARROW, SIGNAL = 0.85; EST_HUMAN HIT: BE898012.1, EVALUE 2.00e-23; SWISSPROT HIT: P49735, EVALUE 7.00e-16
ICGIDEFDKMGNQHQALLEAMEQQSISLAKAGVVCSLPARTSIIAAANPVGGHYNKAKTVSEN

SEQ ID NO: 45118 - protein, 25 aa, Homo sapiens
  MAP TO AL118505.13; EXPRESSED IN PLACENTA, SIGNAL = 0.75; EXPRESSED IN ADULT LIVER, SIGNAL = 0.94; EXPRESSED IN FETAL LIVER, SIGNAL = 0.74; EXPRESSED IN BRAIN, SIGNAL = 0.69; EXPRESSED IN BONE MARROW, SIGNAL = 0.85; EST_HUMAN HIT: BE898012.1, EVALUE 1.00e-07
VFVESMNLIRWGINIKPCWKPWSSK

SEQ ID NO: 45119 - protein, 35 aa, Homo sapiens
  MAP TO AL136962.6; EXPRESSED IN PLACENTA, SIGNAL = 0.96; EXPRESSED IN ADULT LIVER, SIGNAL = 0.82; EXPRESSED IN FETAL LIVER, SIGNAL = 0.82; EXPRESSED IN BRAIN, SIGNAL = 0.81; EXPRESSED IN BONE MARROW, SIGNAL = 0.87; EXPRESSED IN LUNG, SIGNAL = 0.9; EST_HUMAN HIT: AA778795.1, EVALUE 6.00e-13
FNVVRTKDTPDLKSEDVNLSPNIDIYAIYGIQKVI

SEQ ID NO: 45120 - protein, 36 aa, Homo sapiens
  MAP TO AL132866.21; EXPRESSED IN PLACENTA, SIGNAL = 0.89; EXPRESSED IN FETAL LIVER, SIGNAL =   1; EXPRESSED IN ADULT LIVER, SIGNAL = 0.89; EXPRESSED IN BRAIN, SIGNAL = 0.95; EXPRESSED IN BONE MARROW, SIGNAL = 0.91
WDSPSLENFNCSAPPRRALAGQMSMEMGTGMSFGKK

SEQ ID NO: 45121 - protein, 43 aa, Homo sapiens
  MAP TO AC016205.4; EXPRESSED IN BRAIN, SIGNAL = 0.71; EXPRESSED IN BONE MARROW, SIGNAL = 0.61; EXPRESSED IN PLACENTA, SIGNAL = 0.52; EXPRESSED IN FETAL LIVER, SIGNAL = 0.69
KTLIETGGKGETKRESSIHCPESKPNYVFTSLAKTDRYDINCF

SEQ ID NO: 45122 - protein, 48 aa, Homo sapiens
  MAP TO AC015756.4; EXPRESSED IN PLACENTA, SIGNAL = 0.48; EXPRESSED IN BRAIN, SIGNAL = 0.46; SWISSPROT HIT: O51148, EVALUE 2.80e+00
LGIPAVLKVQFVDLSEFPAPLQEIYKVKTIFIKTIKQRLPFPLYLHLH

SEQ ID NO: 45123 - protein, 81 aa, Homo sapiens
  MAP TO AL050333.18; EXPRESSED IN ADULT LIVER, SIGNAL = 0.95; EXPRESSED IN FETAL LIVER, SIGNAL = 1.3; EXPRESSED IN BRAIN, SIGNAL = 1.1; EXPRESSED IN LUNG, SIGNAL = 0.86; EXPRESSED IN PLACENTA, SIGNAL = 0.9; EXPRESSED IN BONE MARROW, SIGNAL = 1.1; EST_HUMAN HIT: AI445866.1, EVALUE 1.00e-33
NKNPEEYQGTLNSHLNKVNFHEDDNQKSAFEVYKSNQAQTVSERQKSKPKSCKKGKNIREDDPVRMLQTVAKKFDFSNLSS

SEQ ID NO: 45124 - protein, 30 aa, Homo sapiens
  MAP TO AC016851.3; EXPRESSED IN LUNG, SIGNAL = 1.8; EXPRESSED IN PLACENTA, SIGNAL = 1.5; EXPRESSED IN ADULT LIVER, SIGNAL = 1.6; EXPRESSED IN BRAIN, SIGNAL = 1.2; EXPRESSED IN BONE MARROW, SIGNAL = 1.3; EXPRESSED IN FETAL LIVER, SIGNAL = 1.4
MDTRAWRAYTSRGQDEDTENFKLDPGMLEG

SEQ ID NO: 45125 - protein, 30 aa, Homo sapiens
  MAP TO AC016851.3; EXPRESSED IN LUNG, SIGNAL = 1.8; EXPRESSED IN PLACENTA, SIGNAL = 1.5; EXPRESSED IN ADULT LIVER, SIGNAL = 1.6; EXPRESSED IN BRAIN, SIGNAL = 1.2; EXPRESSED IN BONE MARROW, SIGNAL = 1.3; EXPRESSED IN FETAL LIVER, SIGNAL = 1.4
WTLEHGEHTHQGVKTRTLRTSSWIQGCWKG

SEQ ID NO: 45126 - protein, 48 aa, Homo sapiens
  MAP TO AC019276.3; EXPRESSED IN BONE MARROW, SIGNAL = 0.55; EXPRESSED IN PLACENTA, SIGNAL = 0.57; EXPRESSED IN FETAL LIVER, SIGNAL = 0.52; EXPRESSED IN ADULT LIVER, SIGNAL = 0.88; EXPRESSED IN BRAIN, SIGNAL = 0.58
TGPHWNISSGKGHFRSVAMLARMGRKSAPREVVFGFPKVCSHADGSRD

SEQ ID NO: 45127 - protein, 49 aa, Homo sapiens
  MAP TO AC019276.3; EXPRESSED IN BONE MARROW, SIGNAL = 0.55; EXPRESSED IN PLACENTA, SIGNAL = 0.57; EXPRESSED IN FETAL LIVER, SIGNAL = 0.52; EXPRESSED IN ADULT LIVER, SIGNAL = 0.88; EXPRESSED IN BRAIN, SIGNAL = 0.58; EST_HUMAN HIT: BF027812.1, EVALUE 3.00e-02; SWISSPROT HIT: P93224, EVALUE 8.10e+00
KLDHTGTSALGRATSGLWPCWQGWEGRALPGRWCLASQRSAVMRMAAEM

SEQ ID NO: 45128 - protein, 180 aa, Homo sapiens
  MAP TO AC019278.3; EXPRESSED IN PLACENTA, SIGNAL = 0.56; EXPRESSED IN FETAL LIVER, SIGNAL = 0.64; EXPRESSED IN BRAIN, SIGNAL = 0.63; EXPRESSED IN BONE MARROW, SIGNAL = 0.67; EXPRESSED IN ADULT LIVER, SIGNAL = 0.63; EST_HUMAN HIT: BE964946.2, EVALUE 1.20e-01; SWISSPROT HIT: Q05859, EVALUE 1.00e-68
GLRVLKKGATAEGGETITEIKPKDGDLALLKLTQPVQKSLVQAGLQTVKSEKKATDPKATPTLLEQLSLLLNIDMPKTEPKGADPESPRREEMGCNADQESQSGPGVPQTQGGEVKPKSPETALEAFKALFIRPPRKGTTADTSELEALKRKMRHEKESLRAVFERSNSKPADGPSDSKS

SEQ ID NO: 45129 - protein, 47 aa, Homo sapiens
  MAP TO AL133405.9; EXPRESSED IN LUNG, SIGNAL = 0.83; EXPRESSED IN ADULT LIVER, SIGNAL = 0.86; EXPRESSED IN BRAIN, SIGNAL = 1.2; EXPRESSED IN PLACENTA, SIGNAL = 0.75; EXPRESSED IN FETAL LIVER, SIGNAL = 1.7; EXPRESSED IN BONE MARROW, SIGNAL = 1.9; EST_HUMAN HIT: AI985280.1, EVALUE 2.00e-07; SWISSPROT HIT: P75709, EVALUE 8.10e+00
PSGGIPEEGIVIIGDDSSMPVCAREDLPVGQDVEVEDNNIDDPDLCK

SEQ ID NO: 45130 - protein, 42 aa, Homo sapiens
  MAP TO AL133405.9; EXPRESSED IN LUNG, SIGNAL = 0.83; EXPRESSED IN ADULT LIVER, SIGNAL = 0.86; EXPRESSED IN BRAIN, SIGNAL = 1.2; EXPRESSED IN PLACENTA, SIGNAL = 0.75; EXPRESSED IN FETAL LIVER, SIGNAL = 1.7; EXPRESSED IN BONE MARROW, SIGNAL = 1.9; EST_HUMAN HIT: AA400293.1, EVALUE 2.00e-06
SGSSILLSSTSTSCPTGRSSRAQTGMELSSPMITMPSSGIPP

SEQ ID NO: 45131 - protein, 51 aa, Homo sapiens
  MAP TO AC015670.4; EXPRESSED IN PLACENTA, SIGNAL = 0.76; EXPRESSED IN FETAL LIVER, SIGNAL = 0.63; EXPRESSED IN BRAIN, SIGNAL = 0.81; EXPRESSED IN BONE MARROW, SIGNAL = 0.76; EXPRESSED IN ADULT LIVER, SIGNAL = 0.84; EST_HUMAN HIT: AA406098.1, EVALUE 6.60e+00; SWISSPROT HIT: P53518, EVALUE 6.10e+00
KIIKESALPPTPTFINILMNAKTIENGQFPYLLNALVKNHMCLDRIGHKEK

SEQ ID NO: 45132 - protein, 18 aa, Homo sapiens
  MAP TO AC015670.4; EXPRESSED IN PLACENTA, SIGNAL = 0.76; EXPRESSED IN FETAL LIVER, SIGNAL = 0.63; EXPRESSED IN BRAIN, SIGNAL = 0.81; EXPRESSED IN BONE MARROW, SIGNAL = 0.76; EXPRESSED IN ADULT LIVER, SIGNAL = 0.84
KSLKNQLCPQPLPLSTSS

SEQ ID NO: 45133 - protein, 174 aa, Homo sapiens
  MAP TO AL121713.24; EXPRESSED IN FETAL LIVER, SIGNAL = 0.54; EXPRESSED IN BRAIN, SIGNAL = 0.65; EXPRESSED IN BONE MARROW, SIGNAL = 2.2; SWISSPROT HIT: P32583, EVALUE 4.10e-01; EST_HUMAN HIT: BF091930.1, EVALUE 1.00e-27
RSRSRDRMYSRDYRRDYRNNRGMRRPYGYRGRGRGYYQGGGGRYHRGGYRPVWNRRHSRSPRRGRSRSRSPKRRSVSSQRSRSRSRRSYRSSRSPRSSSSRSSSPYSKSPVSKRRGSQEKQTKKAEGEPQEESPLKSKSQEEPKDTFEHDPSESIDEFNKSSATSGDIWPGLSA

SEQ ID NO: 45134 - protein, 60 aa, Homo sapiens
  MAP TO AL109976.21; EXPRESSED IN LUNG, SIGNAL = 0.92; EXPRESSED IN ADULT LIVER, SIGNAL = 0.81; EXPRESSED IN BRAIN, SIGNAL = 0.9; EXPRESSED IN PLACENTA, SIGNAL = 0.94; EXPRESSED IN FETAL LIVER, SIGNAL = 0.88; EXPRESSED IN BONE MARROW, SIGNAL = 0.85
ADPGRASPASALSTRPAPVSSFRPGTSAGPRPLAAPPPAFIPVAPAASPSPPPPGSAPRL

SEQ ID NO: 45135 - protein, 39 aa, Homo sapiens
  MAP TO AC022882.3; EXPRESSED IN PLACENTA, SIGNAL = 0.57; EXPRESSED IN FETAL LIVER, SIGNAL = 0.45; EXPRESSED IN BRAIN, SIGNAL = 0.47; EXPRESSED IN BONE MARROW, SIGNAL = 0.46
VRLSPEYSLLFYVMEQDNCQNRGHEMVLFKKAAACDKLK

SEQ ID NO: 45136 - protein, 26 aa, Homo sapiens
  MAP TO AC011957.2; EXPRESSED IN BONE MARROW, SIGNAL = 1.2; EXPRESSED IN LUNG, SIGNAL =   1; EXPRESSED IN PLACENTA, SIGNAL = 1.3; EXPRESSED IN ADULT LIVER, SIGNAL = 1.7; EXPRESSED IN FETAL LIVER, SIGNAL = 1.4; EXPRESSED IN BRAIN, SIGNAL =   2; EST_HUMAN HIT: AI214087.1, EVALUE 1.00e-06
SREVKVGEYNAVADTLEIINDTIRFQ

SEQ ID NO: 45137 - protein, 26 aa, Homo sapiens
  MAP TO AC022904.3; EXPRESSED IN PLACENTA, SIGNAL = 0.65; EXPRESSED IN ADULT LIVER, SIGNAL = 0.64; EXPRESSED IN BRAIN, SIGNAL = 0.62; EXPRESSED IN BONE MARROW, SIGNAL = 0.6; EXPRESSED IN FETAL LIVER, SIGNAL = 0.59; EST_HUMAN HIT: AW390467.1, EVALUE 4.10e-01
SAMIQMFVFPQDSYVEILTINVVVVG

SEQ ID NO: 45138 - protein, 75 aa, Homo sapiens
  MAP TO AL132874.14; EXPRESSED IN ADULT LIVER, SIGNAL =   1; EXPRESSED IN PLACENTA, SIGNAL = 1.2; EXPRESSED IN FETAL LIVER, SIGNAL = 0.88; EXPRESSED IN BRAIN, SIGNAL = 0.99; EXPRESSED IN BONE MARROW, SIGNAL =   1; EXPRESSED IN LUNG, SIGNAL = 1.1; EST_HUMAN HIT: AI829394.1, EVALUE 4.00e+00; SWISSPROT HIT: Q27368, EVALUE 5.20e-01
LPRFKMNSDQVTLVGQVFESYVSEYHKNDILLILKERDEDAHYPVVVNAMTLFETNMEIGEYFNMFPSEVLTIFD

SEQ ID NO: 45139 - protein, 75 aa, Homo sapiens
  MAP TO AL157997.2; EXPRESSED IN BONE MARROW, SIGNAL = 0.46; EXPRESSED IN PLACENTA, SIGNAL = 0.57; EXPRESSED IN FETAL LIVER, SIGNAL = 0.56; EXPRESSED IN BRAIN, SIGNAL = 0.51; EST_HUMAN HIT: AA496862.1, EVALUE 2.40e+00; SWISSPROT HIT: Q00978, EVALUE 1.80e+00
IQQFHLQIMLRTGYHSLPNDACYLYESPLDSAGHQFCLDMLPLSNELLPPAKFNIPSPTVWENSPQGLLTEQQSQ

SEQ ID NO: 45140 - protein, 42 aa, Homo sapiens
  MAP TO AC008998.2; EXPRESSED IN LUNG, SIGNAL = 1.2; EXPRESSED IN PLACENTA, SIGNAL = 1.1; EXPRESSED IN FETAL LIVER, SIGNAL = 0.98; EXPRESSED IN BRAIN, SIGNAL =   1; EXPRESSED IN BONE MARROW, SIGNAL =   1; EXPRESSED IN ADULT LIVER, SIGNAL = 1.2; EST_HUMAN HIT: AA766283.1, EVALUE 4.00e-10; SWISSPROT HIT: Q57924, EVALUE 8.30e+00
SHEDPRRGSQRRDLAQPSWDRTDFTKENACFQLELQSWKFFR

SEQ ID NO: 45141 - protein, 83 aa, Homo sapiens
  MAP TO AL133511.5; EXPRESSED IN PLACENTA, SIGNAL = 0.57; EXPRESSED IN FETAL LIVER, SIGNAL = 0.57; EXPRESSED IN BRAIN, SIGNAL = 0.56; SWISSPROT HIT: P51375, EVALUE 1.00e+01; EST_HUMAN HIT: AI732934.1, EVALUE 2.00e-27
FSKYEVISSANKNNLTSSFPIWMHFISFSCLITLARISSTMLNDSGESGHSCLFPDLKGKAFSFSSFNMILAVSLSYMAFIML

SEQ ID NO: 45142 - protein, 66 aa, Homo sapiens
  MAP TO AC009428.4; EXPRESSED IN ADULT LIVER, SIGNAL = 0.84; EXPRESSED IN BRAIN, SIGNAL = 0.58; EXPRESSED IN PLACENTA, SIGNAL = 0.68; EXPRESSED IN FETAL LIVER, SIGNAL = 0.68; EXPRESSED IN BONE MARROW, SIGNAL = 0.58; SWISSPROT HIT: P01266, EVALUE 5.60e+00; EST_HUMAN HIT: AA507657.1, EVALUE 3.80e-01
WLPRTPSISWSFLSAFLSSIIPRNSLEAACVAGWWDPPYTSPSACTNTVIASCFITPGHQAKELPS

SEQ ID NO: 45143 - protein, 82 aa, Homo sapiens
  MAP TO AC022860.3; EXPRESSED IN ADULT LIVER, SIGNAL = 1.2; EXPRESSED IN FETAL LIVER, SIGNAL = 0.83; EXPRESSED IN BRAIN, SIGNAL = 0.91; EXPRESSED IN LUNG, SIGNAL = 0.88; EXPRESSED IN PLACENTA, SIGNAL = 0.77; EXPRESSED IN BONE MARROW, SIGNAL = 0.94; SWISSPROT HIT: P10266, EVALUE 1.00e-21; EST_HUMAN HIT: AI625404.1, EVALUE 7.00e-21
DDISCAAPTREILLQCYDHLQNSISDTGLIIAPDKIQTTPPYSYLGTLVNDTTIVPQKVTICRDRLKTLSNFQKLLGDINWI

SEQ ID NO: 45144 - protein, 20 aa, Homo sapiens
  MAP TO AC019342.4; EXPRESSED IN PLACENTA, SIGNAL = 0.78; EXPRESSED IN BONE MARROW, SIGNAL = 0.49; EXPRESSED IN ADULT LIVER, SIGNAL = 0.6; EXPRESSED IN FETAL LIVER, SIGNAL = 0.54; EXPRESSED IN BRAIN, SIGNAL = 0.57
TSLQSRTRVCKQLQITTAYI

SEQ ID NO: 45145 - protein, 52 aa, Homo sapiens
  MAP TO AC025324.2; EXPRESSED IN BONE MARROW, SIGNAL = 0.56; EXPRESSED IN PLACENTA, SIGNAL = 0.76; EXPRESSED IN FETAL LIVER, SIGNAL = 0.62; EXPRESSED IN ADULT LIVER, SIGNAL = 0.76; EXPRESSED IN BRAIN, SIGNAL = 0.59; EST_HUMAN HIT: BE536499.1, EVALUE 2.50e-01
QLCHLQIVTFLAFLSVSPTPKLKQLWPSAMPPSWVVLEMKTSLFLQCPPHTW

SEQ ID NO: 45146 - protein, 64 aa, Homo sapiens
  MAP TO AC022308.7; EXPRESSED IN ADULT LIVER, SIGNAL = 0.83; EXPRESSED IN BRAIN, SIGNAL = 0.86; EXPRESSED IN PLACENTA, SIGNAL = 0.86; EXPRESSED IN FETAL LIVER, SIGNAL = 0.69; EXPRESSED IN BONE MARROW, SIGNAL = 0.78; EST_HUMAN HIT: BF701491.1, EVALUE 8.80e-01
RTGSQPSSVTSTPITPPSLFCSSQTGFPSTSLCPTVGSLNAFPLVWSTLPPNCSMASSFASFRL

SEQ ID NO: 45147 - protein, 26 aa, Homo sapiens
  MAP TO AC013314.4; EXPRESSED IN BONE MARROW, SIGNAL = 0.68; EXPRESSED IN PLACENTA, SIGNAL = 0.71; EXPRESSED IN ADULT LIVER, SIGNAL = 0.83; EXPRESSED IN FETAL LIVER, SIGNAL = 0.63; EXPRESSED IN BRAIN, SIGNAL = 0.69
AFLWSVIPTLHSRPLTHSSSCSSKLF

SEQ ID NO: 45148 - protein, 50 aa, Homo sapiens
  MAP TO AC026156.2; EXPRESSED IN PLACENTA, SIGNAL = 0.69; EXPRESSED IN FETAL LIVER, SIGNAL = 0.99; EXPRESSED IN BONE MARROW, SIGNAL = 1.1; EXPRESSED IN ADULT LIVER, SIGNAL = 0.85; EXPRESSED IN BRAIN, SIGNAL = 1.6; SWISSPROT HIT: O61998, EVALUE 6.20e+00; EST_HUMAN HIT: H85240.1, EVALUE 5.00e-22
LSRHKHLAKDHSPDLYSLELAGLDEIGKRYGEDSEQFRDASKILVDALQK

SEQ ID NO: 45149 - protein, 45 aa, Homo sapiens
  MAP TO AC018909.3; EXPRESSED IN PLACENTA, SIGNAL = 0.5; EXPRESSED IN ADULT LIVER, SIGNAL = 0.62; EXPRESSED IN BONE MARROW, SIGNAL = 0.5; EXPRESSED IN BRAIN, SIGNAL = 0.64; EST_HUMAN HIT: BF195585.1, EVALUE 9.00e-19; SWISSPROT HIT: P47006, EVALUE 4.80e+00
LKQSEANADTKEKLPLRLRIFEKFPNRPQMVKISKLPSDFTVPKI

SEQ ID NO: 45150 - protein, 41 aa, Homo sapiens
  MAP TO AC007989.2; EXPRESSED IN LUNG, SIGNAL = 1.1; EXPRESSED IN PLACENTA, SIGNAL = 1.1; EXPRESSED IN ADULT LIVER, SIGNAL = 1.3; EXPRESSED IN FETAL LIVER, SIGNAL = 0.98; EXPRESSED IN BRAIN, SIGNAL = 1.2; EXPRESSED IN BONE MARROW, SIGNAL = 0.98
MTMPEMAATSSGTSVPLTRHLFLIKSAVTIQVLYVSSPSKL

SEQ ID NO: 45151 - protein, 61 aa, Homo sapiens
  MAP TO AC026192.1; EXPRESSED IN ADULT LIVER, SIGNAL = 0.6; EXPRESSED IN BRAIN, SIGNAL = 0.47; EXPRESSED IN BONE MARROW, SIGNAL = 0.56; EXPRESSED IN PLACENTA, SIGNAL = 0.5; EXPRESSED IN FETAL LIVER, SIGNAL = 0.48; EST_HUMAN HIT: H22933.1, EVALUE 2.70e+00; SWISSPROT HIT: Q09200, EVALUE 3.50e+00
ISSVGSSPTRNKPIAVVETSKDPENKQPLSLRPSLLYLHVPMHYFEKEQQEGKKEVRKAGV

SEQ ID NO: 45152 - protein, 38 aa, Homo sapiens
  MAP TO AL133320.8; EXPRESSED IN BONE MARROW, SIGNAL = 0.81; EXPRESSED IN LUNG, SIGNAL =   1; EXPRESSED IN PLACENTA, SIGNAL = 0.81; EXPRESSED IN FETAL LIVER, SIGNAL = 0.75; EXPRESSED IN ADULT LIVER, SIGNAL = 0.99; EXPRESSED IN BRAIN, SIGNAL = 0.78; EST_HUMAN HIT: BF312159.1, EVALUE 1.10e+00
ATPTTGPEGMCSGDRAASTSISKGKTPAQWSHGCATPA

SEQ ID NO: 45153 - protein, 62 aa, Homo sapiens
  MAP TO AL133544.5; EXPRESSED IN FETAL LIVER, SIGNAL = 0.67; EXPRESSED IN PLACENTA, SIGNAL = 0.47; EXPRESSED IN ADULT LIVER, SIGNAL = 0.61; EXPRESSED IN BRAIN, SIGNAL = 0.68; EXPRESSED IN BONE MARROW, SIGNAL = 0.59; SWISSPROT HIT: Q38859, EVALUE 1.50e+00; EST_HUMAN HIT: AU116951.1, EVALUE 7.00e-31
EAEMFKRYNGTFPLPGIHQSQDALCTCPKLPHQGSFQIDEFVHTESSSTKMQLVKQRLETVT

SEQ ID NO: 45154 - protein, 52 aa, Homo sapiens
  MAP TO AL133544.5; EXPRESSED IN FETAL LIVER, SIGNAL = 0.67; EXPRESSED IN PLACENTA, SIGNAL = 0.47; EXPRESSED IN ADULT LIVER, SIGNAL = 0.61; EXPRESSED IN BRAIN, SIGNAL = 0.68; EXPRESSED IN BONE MARROW, SIGNAL = 0.59; SWISSPROT HIT: P10687, EVALUE 3.60e+00; EST_HUMAN HIT: AU116951.1, EVALUE 2.00e-24
RLKCSNATMEHFHYLEYTKVKMPYVPVQNYPIKALFRLMNLSTLKVLQRRCS

SEQ ID NO: 45155 - protein, 43 aa, Homo sapiens
  MAP TO AC020610.6; EXPRESSED IN PLACENTA, SIGNAL = 0.75; EXPRESSED IN FETAL LIVER, SIGNAL = 0.74; EXPRESSED IN BONE MARROW, SIGNAL = 0.82; EXPRESSED IN LUNG, SIGNAL = 0.96; EXPRESSED IN ADULT LIVER, SIGNAL = 0.92; EXPRESSED IN BRAIN, SIGNAL = 0.85
MLRERRVVGLRLGKDGGWLCPIMMVTMMVIIIIMMVIGCKLLV

SEQ ID NO: 45156 - protein, 27 aa, Homo sapiens
  MAP TO AL133344.19; EXPRESSED IN PLACENTA, SIGNAL = 0.6; EXPRESSED IN BONE MARROW, SIGNAL = 2.2; EXPRESSED IN ADULT LIVER, SIGNAL = 0.55; EXPRESSED IN BRAIN, SIGNAL = 0.5; EXPRESSED IN FETAL LIVER, SIGNAL = 2.6; EST_HUMAN HIT: AU143543.1, EVALUE 5.00e-08
RCLVSRRRQIGPCAGLGTKRLPMVNVL

SEQ ID NO: 45157 - protein, 173 aa, Homo sapiens
  MAP TO AL137853.3; EXPRESSED IN LUNG, SIGNAL =   1; EXPRESSED IN FETAL LIVER, SIGNAL = 0.56; EXPRESSED IN BRAIN, SIGNAL = 0.73; EXPRESSED IN BONE MARROW, SIGNAL = 0.46; EST_HUMAN HIT: BF330766.1, EVALUE 1.00e-29; SWISSPROT HIT: P15508, EVALUE 2.00e-06
ARHQELLSQQQNFILATQSAQAFLDQHGHNLTPEEQQMLQQKLGELKEQYSTSLAQSEAELKQVQTLQDELQKFLQDHKEFESWLERSEKELENMHKGGSSPETLPSLLKRQGSFSEDVISHKGDLRFVTISGQKVLDMENSFKEGKEPSEIGNLVKDKLKDATERYTALHSK

SEQ ID NO: 45158 - protein, 45 aa, Homo sapiens
  MAP TO AL137853.3; EXPRESSED IN LUNG, SIGNAL =   1; EXPRESSED IN FETAL LIVER, SIGNAL = 0.56; EXPRESSED IN BRAIN, SIGNAL = 0.73; EXPRESSED IN BONE MARROW, SIGNAL = 0.46; EST_HUMAN HIT: BE733841.1, EVALUE 4.00e+00
PVTKNCCPSSKISFWPPSQLRPSWISMATISHLRSNRCCNRSWES

SEQ ID NO: 45159 - protein, 38 aa, Homo sapiens
  MAP TO AL137225.7; EXPRESSED IN PLACENTA, SIGNAL = 0.56; EXPRESSED IN FETAL LIVER, SIGNAL = 0.68; EXPRESSED IN BONE MARROW, SIGNAL = 0.59; EXPRESSED IN ADULT LIVER, SIGNAL = 0.69; EXPRESSED IN BRAIN, SIGNAL = 0.69; SWISSPROT HIT: P22857, EVALUE 6.40e+00; EST_HUMAN HIT: AI337183.1, EVALUE 9.00e-13
FPSPSPILKKEIDATVLKEPWGPRRPTRRCGPQSQTPE

SEQ ID NO: 45160 - protein, 29 aa, Homo sapiens
  MAP TO AL035668.15; EXPRESSED IN BONE MARROW, SIGNAL = 0.51; EXPRESSED IN ADULT LIVER, SIGNAL = 0.59; EXPRESSED IN FETAL LIVER, SIGNAL = 0.53; EXPRESSED IN BRAIN, SIGNAL = 0.46
LLCWPWTKVSLKSSCFPLIITRTPHLTRL

SEQ ID NO: 45161 - protein, 43 aa, Homo sapiens
  MAP TO AL121941.13; EXPRESSED IN LUNG, SIGNAL =   1; EXPRESSED IN PLACENTA, SIGNAL = 0.99; EXPRESSED IN ADULT LIVER, SIGNAL = 0.97; EXPRESSED IN FETAL LIVER, SIGNAL = 0.88; EXPRESSED IN BRAIN, SIGNAL =   1; EXPRESSED IN BONE MARROW, SIGNAL = 0.91
PALLATWHSALAVLYAENGQQMRMTDLSQFTNKAATRGWQGWM

SEQ ID NO: 45162 - protein, 21 aa, Homo sapiens
  MAP TO AL121941.13; EXPRESSED IN LUNG, SIGNAL =   1; EXPRESSED IN PLACENTA, SIGNAL = 0.99; EXPRESSED IN ADULT LIVER, SIGNAL = 0.97; EXPRESSED IN FETAL LIVER, SIGNAL = 0.88; EXPRESSED IN BRAIN, SIGNAL =   1; EXPRESSED IN BONE MARROW, SIGNAL = 0.91
RPSWPPGIVLLLYCMQRMVSK

SEQ ID NO: 45163 - protein, 42 aa, Homo sapiens
  MAP TO AC019058.3; EXPRESSED IN BONE MARROW, SIGNAL = 0.6; EXPRESSED IN PLACENTA, SIGNAL = 0.81; EXPRESSED IN ADULT LIVER, SIGNAL = 0.88; EXPRESSED IN BRAIN, SIGNAL = 0.65; EXPRESSED IN FETAL LIVER, SIGNAL = 0.71
TTPRIEVGGVLKGPQLEAMSKWINLFKDQQNTNSWSLLGIKN

SEQ ID NO: 45164 - protein, 34 aa, Homo sapiens
  MAP TO AL161743.2; EXPRESSED IN LUNG, SIGNAL = 0.99; EXPRESSED IN PLACENTA, SIGNAL =   1; EXPRESSED IN ADULT LIVER, SIGNAL = 0.97; EXPRESSED IN FETAL LIVER, SIGNAL = 0.95; EXPRESSED IN BRAIN, SIGNAL = 0.96; EXPRESSED IN BONE MARROW, SIGNAL = 0.97; SWISSPROT HIT: P25055, EVALUE 6.50e+00
LHSEDKRKTPLKVLEEWKTHLIPSLHCAGGEQKE

SEQ ID NO: 45165 - protein, 30 aa, Homo sapiens
  MAP TO AL136112.9; EXPRESSED IN LUNG, SIGNAL = 1.3; EXPRESSED IN ADULT LIVER, SIGNAL = 1.3; EXPRESSED IN BRAIN, SIGNAL = 1.3; EXPRESSED IN PLACENTA, SIGNAL = 0.83; EXPRESSED IN FETAL LIVER, SIGNAL = 1.4; EXPRESSED IN BONE MARROW, SIGNAL = 1.1; EST_HUMAN HIT: BF209778.1, EVALUE 5.00e-08
PDPPLWRLAVSEACPYSSGPDSERRRLASK

SEQ ID NO: 45166 - protein, 32 aa, Homo sapiens
  MAP TO AC017086.3; EXPRESSED IN ADULT LIVER, SIGNAL = 0.57; EXPRESSED IN PLACENTA, SIGNAL = 0.78; EXPRESSED IN FETAL LIVER, SIGNAL = 0.51; EXPRESSED IN BONE MARROW, SIGNAL = 0.49; EXPRESSED IN BRAIN, SIGNAL = 0.67; EST_HUMAN HIT: AI692856.1, EVALUE 1.00e-05
CHKLGGLNNENLFLAVLESGKLKIKVPADSVP

SEQ ID NO: 45167 - protein, 39 aa, Homo sapiens
  MAP TO AC019083.5; EXPRESSED IN BONE MARROW, SIGNAL = 0.93; EXPRESSED IN PLACENTA, SIGNAL = 0.77; EXPRESSED IN ADULT LIVER, SIGNAL = 0.99; EXPRESSED IN BRAIN, SIGNAL = 0.75; EXPRESSED IN FETAL LIVER, SIGNAL = 1.1
TGPSTRCGSGSSTSWTPTSWMPIVSLSKSSTSTASTSAA

SEQ ID NO: 45168 - protein, 66 aa, Homo sapiens
  MAP TO AC008474.4; EXPRESSED IN PLACENTA, SIGNAL = 0.83; EXPRESSED IN FETAL LIVER, SIGNAL = 0.56; EXPRESSED IN BRAIN, SIGNAL = 0.58; EXPRESSED IN BONE MARROW, SIGNAL = 0.87; SWISSPROT HIT: Q02357, EVALUE 5.00e-08; EST_HUMAN HIT: BE392372.1, EVALUE 5.00e-31
RLAKVPASGLGVNVTSQDGSSPLHVAALHGRADLIPLLLKHGANAGARNADQAVPLHLACQQGHFQ

SEQ ID NO: 45169 - protein, 41 aa, Homo sapiens
  MAP TO AL121897.15; EXPRESSED IN LUNG, SIGNAL = 1.3; EXPRESSED IN PLACENTA, SIGNAL = 0.94; EXPRESSED IN ADULT LIVER, SIGNAL = 1.3; EXPRESSED IN BRAIN, SIGNAL = 1.3; EXPRESSED IN BONE MARROW, SIGNAL = 1.1; EXPRESSED IN FETAL LIVER, SIGNAL = 1.1; SWISSPROT HIT: O15066, EVALUE 1.00e-16; EST_HUMAN HIT: AW502035.1, EVALUE 2.00e-15
KRREREIQQQMESRDEETLELKETYSSLQQEVDIKTKKLKK

SEQ ID NO: 45170 - protein, 40 aa, Homo sapiens
  MAP TO AL121897.15; EXPRESSED IN LUNG, SIGNAL = 1.3; EXPRESSED IN PLACENTA, SIGNAL = 0.94; EXPRESSED IN ADULT LIVER, SIGNAL = 1.3; EXPRESSED IN BRAIN, SIGNAL = 1.3; EXPRESSED IN BONE MARROW, SIGNAL = 1.1; EXPRESSED IN FETAL LIVER, SIGNAL = 1.1; SWISSPROT HIT: Q10126, EVALUE 1.60e+00; EST_HUMAN HIT: AW499691.1, EVALUE 1.00e-18
NVEKEKSSNRWKVEMRRPWNLKRHTAHCSKRWTSRPKNSK

SEQ ID NO: 45171 - protein, 104 aa, Homo sapiens
  MAP TO AL121585.13; EXPRESSED IN ADULT LIVER, SIGNAL = 0.71; EXPRESSED IN FETAL LIVER, SIGNAL = 0.63; EXPRESSED IN BRAIN, SIGNAL = 0.46; EXPRESSED IN BONE MARROW, SIGNAL = 0.59; EXPRESSED IN PLACENTA, SIGNAL = 0.6; SWISSPROT HIT: Q9WTJ2, EVALUE 6.00e-26; EST_HUMAN HIT: BE612721.1, EVALUE 5.00e-48
IRPYKCNVCNKAFTQRCSLESHLKKIHGVQQQYAYKQRRDKLYVCEDCGYTGPTQEDLYLHVNSAHPGSSFLKKTSKKLAALLQGKLTSAHQENTSLSEEEERK

SEQ ID NO: 45172 - protein, 23 aa, Homo sapiens
  MAP TO AL121585.13; EXPRESSED IN ADULT LIVER, SIGNAL = 0.71; EXPRESSED IN FETAL LIVER, SIGNAL = 0.63; EXPRESSED IN BRAIN, SIGNAL = 0.46; EXPRESSED IN BONE MARROW, SIGNAL = 0.59; EXPRESSED IN PLACENTA, SIGNAL = 0.6; EST_HUMAN HIT: AA151181.1, EVALUE 5.00e-06
AFVPTNATSAIKPSPSAALWSPT

SEQ ID NO: 45173 - protein, 41 aa, Homo sapiens
  MAP TO AL157392.2; EXPRESSED IN ADULT LIVER, SIGNAL = 0.52; EXPRESSED IN BRAIN, SIGNAL = 0.52; EXPRESSED IN BONE MARROW, SIGNAL = 0.51; EXPRESSED IN PLACENTA, SIGNAL = 0.48; EXPRESSED IN FETAL LIVER, SIGNAL = 0.46; EST_HUMAN HIT: BF224452.1, EVALUE 7.00e-17; SWISSPROT HIT: P25109, EVALUE 8.30e+00
VLQLCWSTYRLCWEHDFVQGIKVIPLQLFYFVSAISDHSTQ

SEQ ID NO: 45174 - protein, 20 aa, Homo sapiens
  MAP TO AL157392.2; EXPRESSED IN ADULT LIVER, SIGNAL = 0.52; EXPRESSED IN BRAIN, SIGNAL = 0.52; EXPRESSED IN BONE MARROW, SIGNAL = 0.51; EXPRESSED IN PLACENTA, SIGNAL = 0.48; EXPRESSED IN FETAL LIVER, SIGNAL = 0.46; EST_HUMAN HIT: BF224452.1, EVALUE 1.40e-01
FFSFAGVRIDFAGSMTLCKA

SEQ ID NO: 45175 - protein, 71 aa, Homo sapiens
  MAP TO AC024196.2; EXPRESSED IN PLACENTA, SIGNAL = 0.55; EXPRESSED IN FETAL LIVER, SIGNAL = 0.52; EXPRESSED IN BONE MARROW, SIGNAL = 0.53; EXPRESSED IN ADULT LIVER, SIGNAL = 0.68; EXPRESSED IN BRAIN, SIGNAL = 0.55; SWISSPROT HIT: P04264, EVALUE 4.00e-36; EST_HUMAN HIT: AL048474.2, EVALUE 5.00e-35
VRFLEQQNQVLQTKWELLQQVDTSTRTHNLEPYFESFINNLRRRVDQLKSDQSRLDSELKNMQDMVEDYRN

SEQ ID NO: 45176 - protein, 32 aa, Homo sapiens
  MAP TO AL137225.7; EXPRESSED IN ADULT LIVER, SIGNAL = 0.62; EXPRESSED IN PLACENTA, SIGNAL = 0.67; EXPRESSED IN FETAL LIVER, SIGNAL = 0.58; EXPRESSED IN BRAIN, SIGNAL = 0.51; EXPRESSED IN BONE MARROW, SIGNAL = 0.49
MATFVLSQTKLGQISLDLQNCQPVFTRIHMRA

SEQ ID NO: 45177 - protein, 33 aa, Homo sapiens
  MAP TO AC009597.4; EXPRESSED IN BRAIN, SIGNAL = 0.55; EXPRESSED IN PLACENTA, SIGNAL = 0.51; EXPRESSED IN FETAL LIVER, SIGNAL = 0.61; EXPRESSED IN BONE MARROW, SIGNAL = 0.53; EST_HUMAN HIT: BE385464.1, EVALUE 9.90e+00
VRNYCRKIVLFWRLSTVCLLGSLCISQKRQYIP

SEQ ID NO: 45178 - protein, 41 aa, Homo sapiens
  MAP TO AC022020.3; EXPRESSED IN PLACENTA, SIGNAL = 0.49; EXPRESSED IN BRAIN, SIGNAL = 0.47; EST_HUMAN HIT: BF028872.1, EVALUE 9.30e+00
FPLACQKAESFHASAFQLFLCYIREPLSHVLKVTNVCCQAR

SEQ ID NO: 45179 - protein, 42 aa, Homo sapiens
  MAP TO AL158150.2; EXPRESSED IN ADULT LIVER, SIGNAL = 0.67; EXPRESSED IN LUNG, SIGNAL = 0.85; EXPRESSED IN PLACENTA, SIGNAL = 0.91; EXPRESSED IN FETAL LIVER, SIGNAL = 0.87; EXPRESSED IN BRAIN, SIGNAL =   1; EXPRESSED IN BONE MARROW, SIGNAL = 0.74; SWISSPROT HIT: P04486, EVALUE 1.20e+00; EST_HUMAN HIT: AA397758.1, EVALUE 4.10e+00
MSSLRIYRELPFLSLLPAQRVLQAKAGVPERAYTNGRPDYIK

SEQ ID NO: 45180 - protein, 37 aa, Homo sapiens
  MAP TO AL158150.2; EXPRESSED IN ADULT LIVER, SIGNAL = 0.67; EXPRESSED IN LUNG, SIGNAL = 0.85; EXPRESSED IN PLACENTA, SIGNAL = 0.91; EXPRESSED IN FETAL LIVER, SIGNAL = 0.87; EXPRESSED IN BRAIN, SIGNAL =   1; EXPRESSED IN BONE MARROW, SIGNAL = 0.74; SWISSPROT HIT: P12916, EVALUE 8.40e+00; EST_HUMAN HIT: AA397758.1, EVALUE 9.60e+00
VFSPNIPRTTLSITPTCPESPSSQGGSTRKGLYQWKA

SEQ ID NO: 45181 - protein, 34 aa, Homo sapiens
  MAP TO AC018528.3; EXPRESSED IN BONE MARROW, SIGNAL = 0.73; EXPRESSED IN FETAL LIVER, SIGNAL = 0.7; EXPRESSED IN BRAIN, SIGNAL = 0.67; EXPRESSED IN PLACENTA, SIGNAL = 0.77
SSKTSFFTKEQASGFELSFLSSLEEFTIAADSLK

SEQ ID NO: 45182 - protein, 41 aa, Homo sapiens
  MAP TO AL136313.3; EXPRESSED IN PLACENTA, SIGNAL = 0.62; EXPRESSED IN FETAL LIVER, SIGNAL =   1; EXPRESSED IN BRAIN, SIGNAL = 0.81; EXPRESSED IN BONE MARROW, SIGNAL = 1.1; EXPRESSED IN ADULT LIVER, SIGNAL = 0.75; EST_HUMAN HIT: AI085314.1, EVALUE 2.00e-18; SWISSPROT HIT: P42702, EVALUE 3.70e+00
SFAIWKPMSTSDFHSKLLSSQSDCESCEKLGCASEVGCGMP

SEQ ID NO: 45183 - protein, 38 aa, Homo sapiens
  MAP TO AL136313.3; EXPRESSED IN PLACENTA, SIGNAL = 0.62; EXPRESSED IN FETAL LIVER, SIGNAL =   1; EXPRESSED IN BRAIN, SIGNAL = 0.81; EXPRESSED IN BONE MARROW, SIGNAL = 1.1; EXPRESSED IN ADULT LIVER, SIGNAL = 0.75; EST_HUMAN HIT: AI085314.1, EVALUE 2.00e-16; SWISSPROT HIT: P43571, EVALUE 3.70e+00
MAFHSPPQKHIPIFHNSRSQTVRKAILSGSQRWTWVSR

SEQ ID NO: 45184 - protein, 40 aa, Homo sapiens
  MAP TO AC019276.3; EXPRESSED IN BRAIN, SIGNAL = 0.52; EXPRESSED IN PLACENTA, SIGNAL = 0.61; EXPRESSED IN FETAL LIVER, SIGNAL = 0.5; EXPRESSED IN BONE MARROW, SIGNAL = 0.57
MAAAVITIITITTVTFSVTSTTAKTTIIVIIQRGGSNWNA

SEQ ID NO: 45185 - protein, 36 aa, Homo sapiens
  MAP TO AL121898.10; EXPRESSED IN PLACENTA, SIGNAL = 0.53; EXPRESSED IN FETAL LIVER, SIGNAL = 0.92; EXPRESSED IN BONE MARROW, SIGNAL = 0.83; EXPRESSED IN BRAIN, SIGNAL = 0.73; EST_HUMAN HIT: AW885378.1, EVALUE 5.70e-02
LGWGLTTCISSNSQVMLMLMVTTNAVYPVFWTYVLL

SEQ ID NO: 45186 - protein, 76 aa, Homo sapiens
  MAP TO AC020906.3; EXPRESSED IN ADULT LIVER, SIGNAL = 0.62; EXPRESSED IN BRAIN, SIGNAL = 0.66; EXPRESSED IN BONE MARROW, SIGNAL = 0.55; EXPRESSED IN PLACENTA, SIGNAL = 0.64; EXPRESSED IN FETAL LIVER, SIGNAL = 0.65; EST_HUMAN HIT: AA412397.1, EVALUE 1.00e-10
MPLALTLLLLSGLGAPGGWGCLQCDPLVLEALGHLRSALIPSRFQLEQLQARAGAVLMGMEGPFFRDYALNVFVGK

SEQ ID NO: 45187 - protein, 33 aa, Homo sapiens
  MAP TO AC020906.3; EXPRESSED IN ADULT LIVER, SIGNAL = 0.62; EXPRESSED IN BRAIN, SIGNAL = 0.66; EXPRESSED IN BONE MARROW, SIGNAL = 0.55; EXPRESSED IN PLACENTA, SIGNAL = 0.64; EXPRESSED IN FETAL LIVER, SIGNAL = 0.65
ATPWCWRPWVTCAPPSSPVASSWSSCRRAPGPC

SEQ ID NO: 45188 - protein, 101 aa, Homo sapiens
  MAP TO AC024575.1; EXPRESSED IN ADULT LIVER, SIGNAL = 2.4; EXPRESSED IN PLACENTA, SIGNAL = 0.83; EXPRESSED IN FETAL LIVER, SIGNAL = 2.5; EXPRESSED IN BRAIN, SIGNAL =   2; EXPRESSED IN BONE MARROW, SIGNAL = 1.3; EXPRESSED IN LUNG, SIGNAL = 1.5; EST_HUMAN HIT: AI280176.1, EVALUE 1.00e-48; SWISSPROT HIT: P09544, EVALUE 7.10e+00
LYLLFLSLTLATVNARWLEPRTTAAMWALQTVEKERGLGGEVPGSHQGPDPYRQLREKDPKYSALRQNFFRYHGLSSLCNLGCVLSNGLCLAGLALEIRSL

SEQ ID NO: 45189 - protein, 90 aa, Homo sapiens
  MAP TO AL049870.3; EXPRESSED IN PLACENTA, SIGNAL = 0.46; EXPRESSED IN FETAL LIVER, SIGNAL = 0.52; EXPRESSED IN BRAIN, SIGNAL = 0.54; EXPRESSED IN BONE MARROW, SIGNAL = 0.48; SWISSPROT HIT: Q04652, EVALUE 2.00e-11; EST_HUMAN HIT: N44974.1, EVALUE 7.00e-33
EFGICVLDQKVYVIGGIATNVRPGVTIRKHENSVECWNPDTNTWTSLERMNESRSTLGVVVLAGELYALGGYDGQSYLQSVEKYIPKIRK

SEQ ID NO: 45190 - protein, 33 aa, Homo sapiens
  MAP TO AC018845.3; EXPRESSED IN PLACENTA, SIGNAL = 0.64; EXPRESSED IN ADULT LIVER, SIGNAL =   1; EXPRESSED IN FETAL LIVER, SIGNAL = 0.76; EXPRESSED IN BRAIN, SIGNAL = 0.71; EXPRESSED IN BONE MARROW, SIGNAL = 0.62; EST_HUMAN HIT: N48523.1, EVALUE 1.00e-12; SWISSPROT HIT: P24298, EVALUE 7.00e-10
FHSFKKVLYEMGPEYSSNVELASFHSTSKGYMG

SEQ ID NO: 45191 - protein, 20 aa, Homo sapiens
  MAP TO AC018845.3; EXPRESSED IN PLACENTA, SIGNAL = 0.64; EXPRESSED IN ADULT LIVER, SIGNAL =   1; EXPRESSED IN FETAL LIVER, SIGNAL = 0.76; EXPRESSED IN BRAIN, SIGNAL = 0.71; EXPRESSED IN BONE MARROW, SIGNAL = 0.62; EST_HUMAN HIT: AA455269.1, EVALUE 4.80e+00; SWISSPROT HIT: P55101, EVALUE 3.90e+00
HLCPPLPWPHWAAASLRTLW

SEQ ID NO: 45192 - protein, 47 aa, Homo sapiens
  MAP TO AC021782.2; EXPRESSED IN BRAIN, SIGNAL = 0.55; EXPRESSED IN BONE MARROW, SIGNAL = 0.45; SWISSPROT HIT: P50851, EVALUE 2.00e-09; EST_HUMAN HIT: T06397.1, EVALUE 4.00e-07
TEEDVVKSKKTFRSQAIVNQNAETELMLEGDDDAVSLLQEKEIDNLA

SEQ ID NO: 45193 - protein, 56 aa, Homo sapiens; identical to SEQ ID NO: 44838
  MAP TO AC012571.3; EXPRESSED IN FETAL LIVER, SIGNAL = 0.56; EXPRESSED IN BRAIN, SIGNAL = 0.52; EXPRESSED IN ADULT LIVER, SIGNAL = 0.73; EXPRESSED IN BONE MARROW, SIGNAL = 0.54; EST_HUMAN HIT: AV693135.1, EVALUE 6.00e-11; SWISSPROT HIT: O35453, EVALUE 3.00e-12

SEQ ID NO: 45194 - protein, 42 aa, Homo sapiens
  MAP TO AL109915.9; EXPRESSED IN PLACENTA, SIGNAL = 0.55; EXPRESSED IN BRAIN, SIGNAL =   2
ISDPFAPEPTPPTTTAEIATASASASTTTTVTAVTAEVDLFG

SEQ ID NO: 45195 - protein, 28 aa, Homo sapiens
  MAP TO AC008433.3; EXPRESSED IN ADULT LIVER, SIGNAL = 0.56; EXPRESSED IN BRAIN, SIGNAL = 0.54; EXPRESSED IN BONE MARROW, SIGNAL = 0.54; EXPRESSED IN PLACENTA, SIGNAL = 0.52; EXPRESSED IN FETAL LIVER, SIGNAL = 0.53
GSHDQLSTTKESCGLDYSVYQIDFAVIM

SEQ ID NO: 45196 - protein, 34 aa, Homo sapiens
  MAP TO AC018501.5; EXPRESSED IN PLACENTA, SIGNAL = 0.54; EXPRESSED IN FETAL LIVER, SIGNAL = 0.5; EXPRESSED IN ADULT LIVER, SIGNAL = 0.59; EXPRESSED IN BRAIN, SIGNAL = 0.54; EXPRESSED IN BONE MARROW, SIGNAL = 0.55
KVPIPWSTLATSVGQHIRRLTWTVKYRGRTCPPM

SEQ ID NO: 45197 - protein, 67 aa, Homo sapiens
  MAP TO AL121673.27; EXPRESSED IN PLACENTA, SIGNAL = 0.83; EXPRESSED IN ADULT LIVER, SIGNAL = 0.86; EXPRESSED IN FETAL LIVER, SIGNAL = 0.83; EXPRESSED IN BONE MARROW, SIGNAL = 0.85; EXPRESSED IN BRAIN, SIGNAL = 0.81; SWISSPROT HIT: P26807, EVALUE 2.00e+00; EST_HUMAN HIT: AW438701.1, EVALUE 1.90e+00
QPGVLVRPQVADCLGHPLQPDILVSPAAVEGAPVPTWPAPPAQLREGAVAAACHVGQIACLEGLFLT

SEQ ID NO: 45198 - protein, 38 aa, Homo sapiens
  MAP TO AL132866.21; EXPRESSED IN ADULT LIVER, SIGNAL = 0.63; EXPRESSED IN BRAIN, SIGNAL = 0.6; EXPRESSED IN BONE MARROW, SIGNAL = 0.64; EXPRESSED IN PLACENTA, SIGNAL = 0.77; EXPRESSED IN FETAL LIVER, SIGNAL = 0.62; SWISSPROT HIT: P51145, EVALUE 6.40e+00; EST_HUMAN HIT: AA132611.1, EVALUE 3.00e-15
CSHKPRKARETSRHQKLAGMAPAVSPLSLQQEPTLLTP

SEQ ID NO: 45199 - protein, 28 aa, Homo sapiens
  MAP TO AP001436.1; EXPRESSED IN ADULT LIVER, SIGNAL = 0.7; EXPRESSED IN PLACENTA, SIGNAL = 0.67; EXPRESSED IN FETAL LIVER, SIGNAL = 0.61; EXPRESSED IN BRAIN, SIGNAL = 0.7; EXPRESSED IN BONE MARROW, SIGNAL = 0.55
MHKTDFFPLNEEIGQLVFIPFSNQLRPA

SEQ ID NO: 45200 - protein, 27 aa, Homo sapiens
  MAP TO AL121911.10; EXPRESSED IN ADULT LIVER, SIGNAL = 0.56; EXPRESSED IN BRAIN, SIGNAL = 0.53; EXPRESSED IN BONE MARROW, SIGNAL = 0.52; EST_HUMAN HIT: AI690301.1, EVALUE 7.90e+00
YNKKTEIRKPNTESTNTLILDFAASKT

SEQ ID NO: 45201 - protein, 17 aa, Homo sapiens
  MAP TO AL121911.10; EXPRESSED IN ADULT LIVER, SIGNAL = 0.56; EXPRESSED IN BRAIN, SIGNAL = 0.53; EXPRESSED IN BONE MARROW, SIGNAL = 0.52
TIRRRKFANQTLNLPIP

SEQ ID NO: 45202 - protein, 53 aa, Homo sapiens
  MAP TO AC008506.4; EXPRESSED IN ADULT LIVER, SIGNAL = 1.2; EXPRESSED IN FETAL LIVER, SIGNAL = 1.2; EXPRESSED IN BONE MARROW, SIGNAL = 0.94; EXPRESSED IN LUNG, SIGNAL = 1.2; EXPRESSED IN PLACENTA, SIGNAL = 1.1; EXPRESSED IN BRAIN, SIGNAL = 0.97; SWISSPROT HIT: P55653, EVALUE 1.20e+00
AITISPSICFTQLLSYLPGFKDPALNMLKAEEGTEVSQQPLLNTQVRQQSSET

SEQ ID NO: 45203 - protein, 24 aa, Homo sapiens
  MAP TO AC008506.4; EXPRESSED IN ADULT LIVER, SIGNAL = 1.2; EXPRESSED IN FETAL LIVER, SIGNAL = 1.2; EXPRESSED IN BONE MARROW, SIGNAL = 0.94; EXPRESSED IN LUNG, SIGNAL = 1.2; EXPRESSED IN PLACENTA, SIGNAL = 1.1; EXPRESSED IN BRAIN, SIGNAL = 0.97
PLPSHQASASHSCSATFLASRILP

SEQ ID NO: 45204 - protein, 49 aa, Homo sapiens
  MAP TO AL138956.3; EXPRESSED IN PLACENTA, SIGNAL = 0.98; EXPRESSED IN BONE MARROW, SIGNAL = 0.92; EXPRESSED IN FETAL LIVER, SIGNAL = 0.85; EXPRESSED IN LUNG, SIGNAL = 0.84; EXPRESSED IN ADULT LIVER, SIGNAL = 0.75; EXPRESSED IN BRAIN, SIGNAL = 0.77
VILLKRRNVGSSSVTSEKSCVYKTLGEDHHREVIRAYLIFFFFFLKVII

SEQ ID NO: 45205 - protein, 139 aa, Homo sapiens
  MAP TO AC007956.5; EXPRESSED IN PLACENTA, SIGNAL = 0.84; EXPRESSED IN LUNG, SIGNAL = 1.2; EXPRESSED IN FETAL LIVER, SIGNAL = 1.1; EXPRESSED IN BRAIN, SIGNAL = 1.5; EXPRESSED IN BONE MARROW, SIGNAL = 1.4; EXPRESSED IN ADULT LIVER, SIGNAL = 1.3; EST_HUMAN HIT: BE876618.1, EVALUE 6.00e-17
PPGSYRPPPPMGKPPGSIVRPSAPPARSSVPVTRPPVPIPPPPPPPPLPPPPPVIKPQTSAVEQERWDEDSFYGLWDTNDEQGLNSEFKSETAAIPSAPVLPPPPVHSSIPPPGPVPMGMPPMSKPPPVQQTVDYGHGR

SEQ ID NO: 45206 - protein, 29 aa, Homo sapiens
  MAP TO AC013662.3; EXPRESSED IN PLACENTA, SIGNAL =   1; EXPRESSED IN ADULT LIVER, SIGNAL = 0.84; EXPRESSED IN FETAL LIVER, SIGNAL = 1.3; EXPRESSED IN BRAIN, SIGNAL = 0.95; EXPRESSED IN BONE MARROW, SIGNAL = 0.76
SLAFSNPQAAVSFSKEVQLDGGAKKNEPN

SEQ ID NO: 45207 - protein, 29 aa, Homo sapiens
  MAP TO AC013662.3; EXPRESSED IN PLACENTA, SIGNAL =   1; EXPRESSED IN ADULT LIVER, SIGNAL = 0.84; EXPRESSED IN FETAL LIVER, SIGNAL = 1.3; EXPRESSED IN BRAIN, SIGNAL = 0.95; EXPRESSED IN BONE MARROW, SIGNAL = 0.76
LWHLVTHKLLFLFPKKFSSMEGPRKMSPT

SEQ ID NO: 45208 - protein, 86 aa, Homo sapiens
  MAP TO AC025226.2; EXPRESSED IN BRAIN, SIGNAL = 0.85; EXPRESSED IN PLACENTA, SIGNAL = 0.48; EST_HUMAN HIT: T50138.1, EVALUE 5.00e-05
NSNPFHSCPFHSIPFPLSPFHSIPFHSSPFHSVPFHSFPFHSIPFHSIPFHSIPFHSRLYYYTPFDSIPFDYIPFDSIPLHSIPFH

SEQ ID NO: 45209 - protein, 35 aa, Homo sapiens
  MAP TO AC025226.2; EXPRESSED IN BRAIN, SIGNAL = 0.85; EXPRESSED IN PLACENTA, SIGNAL = 0.48; EST_HUMAN HIT: AA503573.1, EVALUE 2.00e-10
LMEWNGMQWNGIEWNVIEWNGIEWSVIVQSRMEWN

SEQ ID NO: 45210 - protein, 37 aa, Homo sapiens
  MAP TO AC021486.3; EXPRESSED IN FETAL LIVER, SIGNAL = 0.58; EXPRESSED IN BRAIN, SIGNAL = 0.49; EXPRESSED IN PLACENTA, SIGNAL = 0.58; EXPRESSED IN ADULT LIVER, SIGNAL = 0.59; EXPRESSED IN BONE MARROW, SIGNAL = 0.51; EST_HUMAN HIT: AI523881.1, EVALUE 8.50e-01
FDVFLGIGRLPWSLVCWACLCCGFQSQARFYKFCRIG

SEQ ID NO: 45211 - protein, 37 aa, Homo sapiens
  MAP TO AC021486.3; EXPRESSED IN FETAL LIVER, SIGNAL = 0.58; EXPRESSED IN BRAIN, SIGNAL = 0.49; EXPRESSED IN PLACENTA, SIGNAL = 0.58; EXPRESSED IN ADULT LIVER, SIGNAL = 0.59; EXPRESSED IN BONE MARROW, SIGNAL = 0.51; EST_HUMAN HIT: AA730849.1, EVALUE 5.60e+00; SWISSPROT HIT: Q9Y0I1, EVALUE 6.40e+00
TNATKFVKPGLRLKATAQTSPAHQAPGKPSDSEEDIK

SEQ ID NO: 45212 - protein, 20 aa, Homo sapiens
  MAP TO AL139824.7; EXPRESSED IN PLACENTA, SIGNAL = 0.51; EXPRESSED IN FETAL LIVER, SIGNAL = 0.54; EXPRESSED IN BRAIN, SIGNAL = 0.46; EXPRESSED IN BONE MARROW, SIGNAL = 0.55
GRLWGRMCSSPLKWHPGSVS

SEQ ID NO: 45213 - protein, 33 aa, Homo sapiens
  MAP TO AP001415.1; EXPRESSED IN ADULT LIVER, SIGNAL = 0.62; EXPRESSED IN BRAIN, SIGNAL = 0.74; EXPRESSED IN PLACENTA, SIGNAL = 0.71; EXPRESSED IN FETAL LIVER, SIGNAL = 0.82; EXPRESSED IN BONE MARROW, SIGNAL = 0.77
FMQLHSQHPTSHGMLRMQHHLARVTSAWRLFRC

SEQ ID NO: 45214 - protein, 34 aa, Homo sapiens
  MAP TO AC013332.4; EXPRESSED IN PLACENTA, SIGNAL = 0.69; EXPRESSED IN ADULT LIVER, SIGNAL = 0.73; EXPRESSED IN FETAL LIVER, SIGNAL = 0.68; EXPRESSED IN BONE MARROW, SIGNAL = 0.62; EXPRESSED IN BRAIN, SIGNAL = 0.68; EST_HUMAN HIT: AI659238.1, EVALUE 8.00e-14
FCLLYGTKLVFQERAWYLEHKYLTPMASTRIRNQ

SEQ ID NO: 45215 - protein, 17 aa, Homo sapiens
  MAP TO AC013332.4; EXPRESSED IN PLACENTA, SIGNAL = 0.69; EXPRESSED IN ADULT LIVER, SIGNAL = 0.73; EXPRESSED IN FETAL LIVER, SIGNAL = 0.68; EXPRESSED IN BONE MARROW, SIGNAL = 0.62; EXPRESSED IN BRAIN, SIGNAL = 0.68; EST_HUMAN HIT: AW630376.1, EVALUE 1.00e-04
FVCCMEPSWCFRSGPGI

SEQ ID NO: 45216 - protein, 58 aa, Homo sapiens
  MAP TO AC021880.2; EXPRESSED IN BONE MARROW, SIGNAL = 0.89; EXPRESSED IN ADULT LIVER, SIGNAL = 0.85; EXPRESSED IN BRAIN, SIGNAL = 0.98; EXPRESSED IN LUNG, SIGNAL = 0.92; EXPRESSED IN PLACENTA, SIGNAL = 0.84; EXPRESSED IN FETAL LIVER, SIGNAL = 0.81; SWISSPROT HIT: P30427, EVALUE 9.10e-01; EST_HUMAN HIT: AW993131.1, EVALUE 3.60e+00
KTARRLMLTAMERLRQSAMERLRQSAMERLRQSAMERLRQSAMEEAQAVTGVWLLRDG

SEQ ID NO: 45217 - protein, 41 aa, Homo sapiens
  MAP TO AC011666.18; EXPRESSED IN BONE MARROW, SIGNAL = 0.43; EXPRESSED IN BRAIN, SIGNAL = 0.56; EST_HUMAN HIT: AI056693.1, EVALUE 9.00e-19
NVLVIHHVPGLECHDRTVCSQRLRELQAHHVHNNSGCDVAY

SEQ ID NO: 45218 - protein, 25 aa, Homo sapiens
  MAP TO AC021468.2; EXPRESSED IN PLACENTA, SIGNAL = 0.64; EXPRESSED IN ADULT LIVER, SIGNAL = 0.63; EXPRESSED IN FETAL LIVER, SIGNAL = 0.87; EXPRESSED IN BRAIN, SIGNAL =   1; EXPRESSED IN BONE MARROW, SIGNAL = 0.59
PKHHHHHHHHHHHHRYYLWSCHYML

SEQ ID NO: 45219 - protein, 25 aa, Homo sapiens
  MAP TO AC021468.2; EXPRESSED IN PLACENTA, SIGNAL = 0.64; EXPRESSED IN ADULT LIVER, SIGNAL = 0.63; EXPRESSED IN FETAL LIVER, SIGNAL = 0.87; EXPRESSED IN BRAIN, SIGNAL =   1; EXPRESSED IN BONE MARROW, SIGNAL = 0.59
PQASSSSSSSSSSSSLLFMELPLHA

SEQ ID NO: 45220 - protein, 59 aa, Homo sapiens
  MAP TO AL136172.12; EXPRESSED IN LUNG, SIGNAL = 1.3; EXPRESSED IN FETAL LIVER, SIGNAL = 1.9; EXPRESSED IN ADULT LIVER, SIGNAL = 0.92; EXPRESSED IN BRAIN, SIGNAL = 1.1; EXPRESSED IN PLACENTA, SIGNAL = 1.5; EXPRESSED IN HELA, SIGNAL = 3.6; EXPRESSED IN BONE MARROW, SIGNAL = 2.5; SWISSPROT HIT: P04844, EVALUE 6.00e-17; EST_HUMAN HIT: BE795250.1, EVALUE 7.00e-16
DQVIQLMNAIFSKKNFESLSEAFSVASAAAVLSHNRYHVPVVVVPEGSASDTHEQAILR

SEQ ID NO: 45221 - protein, 42 aa, Homo sapiens
  MAP TO AL161450.2; EXPRESSED IN LUNG, SIGNAL = 0.89; EXPRESSED IN PLACENTA, SIGNAL = 0.88; EXPRESSED IN FETAL LIVER, SIGNAL = 0.8; EXPRESSED IN BONE MARROW, SIGNAL = 1.3; EXPRESSED IN ADULT LIVER, SIGNAL = 0.77; EXPRESSED IN BRAIN, SIGNAL = 0.63; EST_HUMAN HIT: BE242517.1, EVALUE 6.00e-18; SWISSPROT HIT: O60674, EVALUE 5.00e-19
NGDISGNANSMKQIDPVLQVYLYHSLGKSEADYLTFPSGEYV

SEQ ID NO: 45222 - protein, 62 aa, Homo sapiens
  MAP TO AL161662.1; EXPRESSED IN LUNG, SIGNAL = 0.9; EXPRESSED IN PLACENTA, SIGNAL = 0.97; EXPRESSED IN ADULT LIVER, SIGNAL = 0.8; EXPRESSED IN FETAL LIVER, SIGNAL = 1.1; EXPRESSED IN BRAIN, SIGNAL = 1.2; EXPRESSED IN BONE MARROW, SIGNAL = 1.1; EST_HUMAN HIT: N95077.1, EVALUE 1.00e-27; SWISSPROT HIT: P49014, EVALUE 1.00e-28
KTLLAKAVANQTSATFLRVVGSELIQKYLGDGPKLVRELFRVAEEHAPSIVFIDEIDAIGTK

SEQ ID NO: 45223 - protein, 48 aa, Homo sapiens
  MAP TO AC021356.5; EXPRESSED IN ADULT LIVER, SIGNAL = 0.62; EXPRESSED IN BRAIN, SIGNAL = 0.65; EXPRESSED IN PLACENTA, SIGNAL = 0.61; EXPRESSED IN FETAL LIVER, SIGNAL = 0.48; EXPRESSED IN BONE MARROW, SIGNAL = 0.45
SSIASMYSIITEKLSGAETYSFLRISDFDIRRMDPIFGGHKNLSEITK

SEQ ID NO: 45224 - protein, 17 aa, Homo sapiens
  MAP TO AC021356.5; EXPRESSED IN ADULT LIVER, SIGNAL = 0.62; EXPRESSED IN BRAIN, SIGNAL = 0.65; EXPRESSED IN PLACENTA, SIGNAL = 0.61; EXPRESSED IN FETAL LIVER, SIGNAL = 0.48; EXPRESSED IN BONE MARROW, SIGNAL = 0.45
CIVSSLKNSVELRLTLF

SEQ ID NO: 45225 - protein, 62 aa, Homo sapiens
  MAP TO AL121828.6; EXPRESSED IN LUNG, SIGNAL = 0.87; EXPRESSED IN PLACENTA, SIGNAL = 0.78; EXPRESSED IN ADULT LIVER, SIGNAL = 0.78; EXPRESSED IN FETAL LIVER, SIGNAL = 0.76; EXPRESSED IN BRAIN, SIGNAL = 0.7; EXPRESSED IN BONE MARROW, SIGNAL = 0.72
MGNAVFCGHERQRKLNSEWDLYLVPYIFECFDFHHLSHWGNPILGLGTMLMENLEEENLYIE

SEQ ID NO: 45226 - protein, 27 aa, Homo sapiens
  MAP TO AC027279.1; EXPRESSED IN BONE MARROW, SIGNAL = 0.65; EXPRESSED IN ADULT LIVER, SIGNAL = 0.8; EXPRESSED IN BRAIN, SIGNAL = 0.76; EXPRESSED IN PLACENTA, SIGNAL = 0.75; EXPRESSED IN FETAL LIVER, SIGNAL = 0.63; EST_HUMAN HIT: R78254.1, EVALUE 7.00e-10; SWISSPROT HIT: P19070, EVALUE 6.60e+00
LHLFVCLTNGMWLSGRVKCLTTLRLPC

SEQ ID NO: 45227 - protein, 27 aa, Homo sapiens
  MAP TO AL158176.5; EXPRESSED IN PLACENTA, SIGNAL = 0.58; EXPRESSED IN ADULT LIVER, SIGNAL = 0.71; EXPRESSED IN FETAL LIVER, SIGNAL = 0.97; EXPRESSED IN BRAIN, SIGNAL = 0.71; EXPRESSED IN BONE MARROW, SIGNAL = 0.55; EST_HUMAN HIT: BF212834.1, EVALUE 8.00e-08
PENRLLLKEVGPTGEGRVSVIEQLLDE

SEQ ID NO: 45228 - protein, 25 aa, Homo sapiens
  MAP TO AC027350.1; EXPRESSED IN PLACENTA, SIGNAL = 0.87; EXPRESSED IN ADULT LIVER, SIGNAL = 0.96; EXPRESSED IN FETAL LIVER, SIGNAL = 0.85; EXPRESSED IN BRAIN, SIGNAL = 0.81; EXPRESSED IN BONE MARROW, SIGNAL = 0.83; EXPRESSED IN LUNG, SIGNAL =   1
LGPQSDLPIQVLLALKLKCKYILQE

SEQ ID NO: 45229 - protein, 33 aa, Homo sapiens
  MAP TO AC027305.1; EXPRESSED IN LUNG, SIGNAL = 1.5; EXPRESSED IN ADULT LIVER, SIGNAL = 1.1; EXPRESSED IN BRAIN, SIGNAL = 0.84; EXPRESSED IN PLACENTA, SIGNAL = 1.4; EXPRESSED IN FETAL LIVER, SIGNAL = 0.99; EXPRESSED IN BONE MARROW, SIGNAL = 0.9
GMSTFYAPGSKPKASDTQKDKLVQVPAFKELVA

SEQ ID NO: 45230 - protein, 18 aa, Homo sapiens
  MAP TO AC022997.3; EXPRESSED IN LUNG, SIGNAL = 1.4; EXPRESSED IN BONE MARROW, SIGNAL = 1.1; EXPRESSED IN PLACENTA, SIGNAL = 1.2; EXPRESSED IN ADULT LIVER, SIGNAL = 1.3; EXPRESSED IN FETAL LIVER, SIGNAL = 1.2; EXPRESSED IN BRAIN, SIGNAL = 1.1
IIKDKFSPKFPASLAKVV

SEQ ID NO: 45231 - protein, 74 aa, Homo sapiens
  MAP TO AL121883.13; EXPRESSED IN LUNG, SIGNAL = 1.5; EXPRESSED IN PLACENTA, SIGNAL = 1.3; EXPRESSED IN FETAL LIVER, SIGNAL = 1.7; EXPRESSED IN BONE MARROW, SIGNAL = 1.3; EXPRESSED IN ADULT LIVER, SIGNAL = 1.6; EXPRESSED IN BRAIN, SIGNAL = 1.8; EST_HUMAN HIT: AW512786.1, EVALUE 1.00e-29; SWISSPROT HIT: P57528, EVALUE 4.40e+00
GNEETKLQVLKLLLNLAENPAMTRELLRAQVPSSLGSLFNKKENKEVILKLLVIFENINDNFKWEENEPTQNQF

SEQ ID NO: 45232 - protein, 33 aa, Homo sapiens
  MAP TO AL133227.7; EXPRESSED IN ADULT LIVER, SIGNAL =   1; EXPRESSED IN PLACENTA, SIGNAL = 1.2; EXPRESSED IN HELA, SIGNAL = 2.2; EXPRESSED IN FETAL LIVER, SIGNAL = 1.2; EXPRESSED IN BONE MARROW, SIGNAL = 1.2; EXPRESSED IN LUNG, SIGNAL = 0.93; EXPRESSED IN BRAIN, SIGNAL = 1.4; EST_HUMAN HIT: AA295835.1, EVALUE 5.00e-10
SLAILESMVLNSQSLYQKIAEEITVGQLISHLQ

SEQ ID NO: 45233 - protein, 40 aa, Homo sapiens
  MAP TO AC016326.4; EXPRESSED IN BONE MARROW, SIGNAL = 0.61; EXPRESSED IN PLACENTA, SIGNAL = 0.71; EXPRESSED IN ADULT LIVER, SIGNAL = 0.71; EXPRESSED IN BRAIN, SIGNAL = 0.86; EXPRESSED IN FETAL LIVER, SIGNAL = 0.8; EST_HUMAN HIT: AI963556.1, EVALUE 7.00e-19
WYMISIVHIYNRWRNSEIRCYVNGQLVSYGDMAWHVNTND

SEQ ID NO: 45234 - protein, 23 aa, Homo sapiens
  MAP TO AC009466.2; EXPRESSED IN ADULT LIVER, SIGNAL = 0.57; EXPRESSED IN PLACENTA, SIGNAL = 0.68; EXPRESSED IN FETAL LIVER, SIGNAL = 1.4; EXPRESSED IN BONE MARROW, SIGNAL = 0.62; EXPRESSED IN BRAIN, SIGNAL = 0.61; EST_HUMAN HIT: AA809070.1, EVALUE 1.00e-04
LSVMMKLLSSEDEVLVGNAALCL

SEQ ID NO: 45235 - protein, 24 aa, Homo sapiens
  MAP TO AC009466.2; EXPRESSED IN ADULT LIVER, SIGNAL = 0.57; EXPRESSED IN PLACENTA, SIGNAL = 0.68; EXPRESSED IN FETAL LIVER, SIGNAL = 1.4; EXPRESSED IN BONE MARROW, SIGNAL = 0.62; EXPRESSED IN BRAIN, SIGNAL = 0.61; EST_HUMAN HIT: AA809070.1, EVALUE 4.00e-06
SDTQKTAVQVNAGIALGKLCTAEP

SEQ ID NO: 45236 - protein, 31 aa, Homo sapiens
  MAP TO AL121908.7; EXPRESSED IN BONE MARROW, SIGNAL =   1; EXPRESSED IN LUNG, SIGNAL = 1.2; EXPRESSED IN PLACENTA, SIGNAL = 1.1; EXPRESSED IN ADULT LIVER, SIGNAL = 1.1; EXPRESSED IN FETAL LIVER, SIGNAL = 0.92; EXPRESSED IN BRAIN, SIGNAL = 1.1
RFERKTPEARGESRGSGEDKALHPGSLCDHK

SEQ ID NO: 45237 - protein, 31 aa, Homo sapiens
  MAP TO AL121908.7; EXPRESSED IN BONE MARROW, SIGNAL =   1; EXPRESSED IN LUNG, SIGNAL = 1.2; EXPRESSED IN PLACENTA, SIGNAL = 1.1; EXPRESSED IN ADULT LIVER, SIGNAL = 1.1; EXPRESSED IN FETAL LIVER, SIGNAL = 0.92; EXPRESSED IN BRAIN, SIGNAL = 1.1
GDLRERLQKPAGRAGVLGKIKPFIQDPSVTI

SEQ ID NO: 45238 - protein, 64 aa, Homo sapiens
  MAP TO AC019342.4; EXPRESSED IN PLACENTA, SIGNAL = 0.53; EXPRESSED IN FETAL LIVER, SIGNAL = 0.46; EXPRESSED IN BRAIN, SIGNAL = 0.48; EXPRESSED IN BONE MARROW, SIGNAL = 0.43; EST_HUMAN HIT: AI908422.1, EVALUE 7.60e+00
EETMGGKFKTAERLGVDVALGNSYCCCCCCKNGNAGCQSPLAPHSVIRGDAGERFSQRNTRRIA

SEQ ID NO: 45239 - protein, 17 aa, Homo sapiens
  MAP TO AC019342.4; EXPRESSED IN PLACENTA, SIGNAL = 0.53; EXPRESSED IN FETAL LIVER, SIGNAL = 0.46; EXPRESSED IN BRAIN, SIGNAL = 0.48; EXPRESSED IN BONE MARROW, SIGNAL = 0.43
RRPWVASLRQQRGWVWT

SEQ ID NO: 45240 - protein, 45 aa, Homo sapiens
  MAP TO AC008643.2; EXPRESSED IN LUNG, SIGNAL = 1.3; EXPRESSED IN ADULT LIVER, SIGNAL = 1.3; EXPRESSED IN BRAIN, SIGNAL = 0.95; EXPRESSED IN BONE MARROW, SIGNAL = 0.95; EXPRESSED IN PLACENTA, SIGNAL = 1.1; EXPRESSED IN FETAL LIVER, SIGNAL = 0.97; EST_HUMAN HIT: AA323250.1, EVALUE 1.00e-18
MASLLQSDRVLYLVQGEKKVRAPLSQLYFCRYCSELRSLECVSHE

SEQ ID NO: 45241 - protein, 32 aa, Homo sapiens
  MAP TO AC011815.2; EXPRESSED IN PLACENTA, SIGNAL = 0.47; EXPRESSED IN ADULT LIVER, SIGNAL = 0.58; EXPRESSED IN FETAL LIVER, SIGNAL = 0.52; EXPRESSED IN BRAIN, SIGNAL = 0.99; SWISSPROT HIT: Q03923, EVALUE 4.00e-10; EST_HUMAN HIT: BE810292.1, EVALUE 3.00e-12
RIHSGEKAYECSECGKAFNQSSALIRHRKIHT

SEQ ID NO: 45242 - protein, 26 aa, Homo sapiens
  MAP TO AC011815.2; EXPRESSED IN PLACENTA, SIGNAL = 0.47; EXPRESSED IN ADULT LIVER, SIGNAL = 0.58; EXPRESSED IN FETAL LIVER, SIGNAL = 0.52; EXPRESSED IN BRAIN, SIGNAL = 0.99; EST_HUMAN HIT: AI081685.1, EVALUE 5.00e-06
CVRKFLQKRDLIDVMYVGTASSSIPL

SEQ ID NO: 45243 - protein, 36 aa, Homo sapiens
  MAP TO AC013389.3; EXPRESSED IN PLACENTA, SIGNAL =   1; EXPRESSED IN ADULT LIVER, SIGNAL = 0.68; EXPRESSED IN FETAL LIVER, SIGNAL = 0.68; EXPRESSED IN BONE MARROW, SIGNAL = 0.92; EXPRESSED IN BRAIN, SIGNAL = 0.7
LCLSEQIADHSVIDTFVQNSLPVFGLPELLISLNIV

SEQ ID NO: 45244 - protein, 79 aa, Homo sapiens
  MAP TO AL161627.2; EXPRESSED IN ADULT LIVER, SIGNAL = 0.71; EXPRESSED IN PLACENTA, SIGNAL = 0.97; EXPRESSED IN FETAL LIVER, SIGNAL = 1.2; EXPRESSED IN BONE MARROW, SIGNAL =   1; EXPRESSED IN BRAIN, SIGNAL = 2.9; SWISSPROT HIT: P15779, EVALUE 1.70e+00; EST_HUMAN HIT: AI635849.1, EVALUE 9.00e-41
VLIVCSTGLAGIMLLNYQQDYTVWVLPLIIVCLFAFLVAHCFLSIYEMVVDVLFLCFAIDTKYNDGSPGREFYMDKVLM

SEQ ID NO: 45245 - protein, 69 aa, Homo sapiens
  MAP TO AL161732.1; EXPRESSED IN LUNG, SIGNAL = 1.8; EXPRESSED IN PLACENTA, SIGNAL = 0.87; EXPRESSED IN BONE MARROW, SIGNAL = 0.61; EXPRESSED IN FETAL LIVER, SIGNAL = 0.92; EXPRESSED IN BRAIN, SIGNAL = 0.49; EST_HUMAN HIT: BF109832.1, EVALUE 3.00e-36; SWISSPROT HIT: Q9X6V9, EVALUE 9.60e+00
VYVQTWSTQNLSMTITRDEYPSNPMVLRGINQKAAFPQYQPVVMLEKGYTIHWNGPAPRTTFLYLVNFN

SEQ ID NO: 45246 - protein, 44 aa, Homo sapiens
  MAP TO AC009311.2; EXPRESSED IN PLACENTA, SIGNAL = 0.62; EXPRESSED IN ADULT LIVER, SIGNAL = 0.58; EXPRESSED IN FETAL LIVER, SIGNAL = 0.56; EXPRESSED IN BRAIN, SIGNAL = 0.57; EXPRESSED IN BONE MARROW, SIGNAL = 0.56
SEANALELLSKLNDTIKNSDKNVRTRALWVISKQTFPSEVVGKM

SEQ ID NO: 45247 - protein, 48 aa, Homo sapiens
  MAP TO AC015570.5; EXPRESSED IN LUNG, SIGNAL = 1.1; EXPRESSED IN ADULT LIVER, SIGNAL = 1.2; EXPRESSED IN BRAIN, SIGNAL = 0.99; EXPRESSED IN FETAL LIVER, SIGNAL = 0.96; EXPRESSED IN PLACENTA, SIGNAL = 0.96; EXPRESSED IN BONE MARROW, SIGNAL = 0.99
RFLMLTKRELSSAPFGNLIFFAFGFEGRGIHGNVLSFNQYLLLIQHDK

SEQ ID NO: 45248 - protein, 44 aa, Homo sapiens
  MAP TO AC018909.3; EXPRESSED IN BONE MARROW, SIGNAL = 0.7; EXPRESSED IN LUNG, SIGNAL = 0.9; EXPRESSED IN ADULT LIVER, SIGNAL = 1.1; EXPRESSED IN BRAIN, SIGNAL = 0.75; EXPRESSED IN PLACENTA, SIGNAL = 0.77; EXPRESSED IN FETAL LIVER, SIGNAL = 0.61; SWISSPROT HIT: Q01815, EVALUE 6.00e-03
IAEYVFVIFMSIELNLKIMADGLFFTPTAVIRDFGGVMDIFIYL

SEQ ID NO: 45249 - protein, 63 aa, Homo sapiens
  MAP TO AL031726.11; EXPRESSED IN FETAL LIVER, SIGNAL = 1.3; EXPRESSED IN BRAIN, SIGNAL =   5; EXPRESSED IN BONE MARROW, SIGNAL = 0.48; EXPRESSED IN ADULT LIVER, SIGNAL = 3.3; SWISSPROT HIT: P05026, EVALUE 1.00e-24; EST_HUMAN HIT: W16806.1, EVALUE 2.00e-23
RDEDKDKVGNVEYFGLGNSPGFPLQYYPYYGKLLQPKYLQPLLAVQFTNLTMDTEIRIECKAY

SEQ ID NO: 45250 - protein, 56 aa, Homo sapiens
  MAP TO AC019222.3; EXPRESSED IN LUNG, SIGNAL = 1.2; EXPRESSED IN ADULT LIVER, SIGNAL = 1.6; EXPRESSED IN FETAL LIVER, SIGNAL = 1.1; EXPRESSED IN BRAIN, SIGNAL =   1; EXPRESSED IN PLACENTA, SIGNAL = 1.3; EXPRESSED IN BONE MARROW, SIGNAL =   1; SWISSPROT HIT: P23561, EVALUE 4.60e+00; EST_HUMAN HIT: W25952.1, EVALUE 4.80e+00
MGLGFEQRKTVVLNPDGTLKSPGELLRISTQEQLYLGQLNNMSGVGPGHEQFLAFQ

SEQ ID NO: 45251 - protein, 47 aa, Homo sapiens
  MAP TO AL135844.8; EXPRESSED IN ADULT LIVER, SIGNAL = 0.53; EXPRESSED IN BONE MARROW, SIGNAL = 0.89; EXPRESSED IN PLACENTA, SIGNAL = 0.47; EXPRESSED IN FETAL LIVER, SIGNAL = 0.8; EXPRESSED IN BRAIN, SIGNAL = 0.78; SWISSPROT HIT: P43059, EVALUE 4.70e+00; EST_HUMAN HIT: BE562648.1, EVALUE 3.00e-20
ASEENGLPHTSARTQLPQSMKIMHEIMYKLEVLYVLCVLLMGRQRNQ

SEQ ID NO: 45252 - protein, 20 aa, Homo sapiens
  MAP TO AL135844.8; EXPRESSED IN ADULT LIVER, SIGNAL = 0.53; EXPRESSED IN BONE MARROW, SIGNAL = 0.89; EXPRESSED IN PLACENTA, SIGNAL = 0.47; EXPRESSED IN FETAL LIVER, SIGNAL = 0.8; EXPRESSED IN BRAIN, SIGNAL = 0.78; EST_HUMAN HIT: AW386328.1, EVALUE 8.00e-05
GLLRRMACLTRQPEPSCPSQ

SEQ ID NO: 45253 - protein, 87 aa, Homo sapiens
  MAP TO AL137786.2; EXPRESSED IN PLACENTA, SIGNAL = 1.1; EXPRESSED IN ADULT LIVER, SIGNAL =   1; EXPRESSED IN BRAIN, SIGNAL = 1.2; EXPRESSED IN BONE MARROW, SIGNAL = 1.1; EXPRESSED IN LUNG, SIGNAL = 1.2; EXPRESSED IN FETAL LIVER, SIGNAL = 1.1
HCADATTATTIAATTITIATAASTAAINTAAAATATTATTASATGIATTAETASTARCCYHHSCYYCYYYLYCDHCCYCQLRKNEEQ

SEQ ID NO: 45254 - protein, 103 aa, Homo sapiens
  MAP TO AL137786.2; EXPRESSED IN PLACENTA, SIGNAL = 1.1; EXPRESSED IN ADULT LIVER, SIGNAL =   1; EXPRESSED IN BRAIN, SIGNAL = 1.2; EXPRESSED IN BONE MARROW, SIGNAL = 1.1; EXPRESSED IN LUNG, SIGNAL = 1.2; EXPRESSED IN FETAL LIVER, SIGNAL = 1.1
LQRVHKSVQFVHLLLYSVILYLFFVLPQLAIAAVITVEVIITVVAGVVVAAASSGSGLSSGGNAGGTSSSSSGGSSSSSCIDSSSTGSSSNRNGSSSDCGSSG

SEQ ID NO: 45255 - protein, 19 aa, Homo sapiens
  MAP TO AC016790.3; EXPRESSED IN BRAIN, SIGNAL = 0.56
ELLERPYITWTEKPENITP

SEQ ID NO: 45256 - protein, 85 aa, Homo sapiens
  MAP TO AL162390.2; EXPRESSED IN PLACENTA, SIGNAL = 0.57; EXPRESSED IN FETAL LIVER, SIGNAL = 0.79; EXPRESSED IN ADULT LIVER, SIGNAL = 0.75; EXPRESSED IN BONE MARROW, SIGNAL = 0.77; EXPRESSED IN BRAIN, SIGNAL = 0.62; EXPRESSED IN LUNG, SIGNAL = 0.92; SWISSPROT HIT: Q14525, EVALUE 1.00e-03; EST_HUMAN HIT: BE835242.1, EVALUE 7.00e-25
IEELQQALIVKQNEELDRQRRIGNTRKMIEDLQNELKTTENCENLQPQIDAITNDLRRIQDEKALCEGEIIDKRRERETLEKEKK

SEQ ID NO: 45257 - protein, 63 aa, Homo sapiens
  MAP TO AC019221.3; EXPRESSED IN BONE MARROW, SIGNAL = 0.91; EXPRESSED IN PLACENTA, SIGNAL = 0.83; EXPRESSED IN ADULT LIVER, SIGNAL = 1.1; EXPRESSED IN BRAIN, SIGNAL = 0.9; EXPRESSED IN LUNG, SIGNAL = 0.9; EXPRESSED IN FETAL LIVER, SIGNAL = 0.87; EST_HUMAN HIT: AW882372.1, EVALUE 7.00e-32; SWISSPROT HIT: P36781, EVALUE 7.80e+00
VFIEATQETGQAAQDTWNLGYARPVCHSPACPASTQEERLRRCGRQQLQSSGSKDLLITEHPG

SEQ ID NO: 45258 - protein, 40 aa, Homo sapiens
  MAP TO AC019221.3; EXPRESSED IN BONE MARROW, SIGNAL = 0.91; EXPRESSED IN PLACENTA, SIGNAL = 0.83; EXPRESSED IN ADULT LIVER, SIGNAL = 1.1; EXPRESSED IN BRAIN, SIGNAL = 0.9; EXPRESSED IN LUNG, SIGNAL = 0.9; EXPRESSED IN FETAL LIVER, SIGNAL = 0.87; EST_HUMAN HIT: BF304596.1, EVALUE 5.00e-07
VFSLRLLRKPVRLPRTPGTWAMPGLSATALPAPLPHRKRG

SEQ ID NO: 45259 - protein, 62 aa, Homo sapiens
  MAP TO AC013332.4; EXPRESSED IN PLACENTA, SIGNAL = 0.85; EXPRESSED IN FETAL LIVER, SIGNAL = 0.75; EXPRESSED IN BONE MARROW, SIGNAL = 0.68; EXPRESSED IN ADULT LIVER, SIGNAL = 0.75; EXPRESSED IN BRAIN, SIGNAL = 0.78; EST_HUMAN HIT: BE072572.1, EVALUE 8.00e-06; SWISSPROT HIT: P57063, EVALUE 7.80e+00
NQNHGILRTTNDSTKPENLPHLEFHCARFIFHCQGTTGKAIQNEAHPLKVQGPWQKSKAHET

SEQ ID NO: 45260 - protein, 39 aa, Homo sapiens
  MAP TO AC022268.3; EXPRESSED IN PLACENTA, SIGNAL = 1.4; EXPRESSED IN ADULT LIVER, SIGNAL = 1.2; EXPRESSED IN BRAIN, SIGNAL =   1; EXPRESSED IN BONE MARROW, SIGNAL =   1; EXPRESSED IN LUNG, SIGNAL =   1; EXPRESSED IN FETAL LIVER, SIGNAL = 0.91; SWISSPROT HIT: P13466, EVALUE 4.90e-02; EST_HUMAN HIT: AI694385.1, EVALUE 4.30e-02
IYTDWANHYLAKSGHKRLIKDLQQDIADGVLLAEIIQII

SEQ ID NO: 45261 - protein, 32 aa, Homo sapiens
  MAP TO AC009334.3; EXPRESSED IN BONE MARROW, SIGNAL = 1.2; EXPRESSED IN LUNG, SIGNAL = 1.1; EXPRESSED IN ADULT LIVER, SIGNAL =   1; EXPRESSED IN BRAIN, SIGNAL = 0.84; EXPRESSED IN PLACENTA, SIGNAL = 0.99; EXPRESSED IN FETAL LIVER, SIGNAL = 0.84; SWISSPROT HIT: Q99698, EVALUE 3.00e-12; EST_HUMAN HIT: BE813335.1, EVALUE 4.00e-11
LCYVQSLAGHKSPVTAVSASETSGDIATVCDS

SEQ ID NO: 45262 - protein, 65 aa, Homo sapiens
  MAP TO AC019184.2; EXPRESSED IN PLACENTA, SIGNAL = 0.9; EXPRESSED IN FETAL LIVER, SIGNAL = 0.91; EXPRESSED IN LUNG, SIGNAL =   1; EXPRESSED IN ADULT LIVER, SIGNAL = 1.1; EXPRESSED IN BRAIN, SIGNAL = 0.82; EXPRESSED IN BONE MARROW, SIGNAL = 0.87; EST_HUMAN HIT: AA912152.1, EVALUE 2.00e-04; SWISSPROT HIT: P34574, EVALUE 2.60e+00
MQAEKAQSIVCKLEAQKSWSYSSSPGPRDQEPGGQQCKSVSPGLSPKVQELGVLFEGKRTDAPAQ

SEQ ID NO: 45263 - protein, 39 aa, Homo sapiens
  MAP TO AC019184.2; EXPRESSED IN PLACENTA, SIGNAL = 0.9; EXPRESSED IN FETAL LIVER, SIGNAL = 0.91; EXPRESSED IN LUNG, SIGNAL =   1; EXPRESSED IN ADULT LIVER, SIGNAL = 1.1; EXPRESSED IN BRAIN, SIGNAL = 0.82; EXPRESSED IN BONE MARROW, SIGNAL = 0.87; EST_HUMAN HIT: C15209.1, EVALUE 3.30e-02
CRQRRHNRLSASWRPRKAGHIVPVQALGTKNQVASSASL

SEQ ID NO: 45264 - protein, 77 aa, Homo sapiens
  MAP TO AC026273.2; EXPRESSED IN PLACENTA, SIGNAL = 0.62; EXPRESSED IN ADULT LIVER, SIGNAL = 0.63; EXPRESSED IN FETAL LIVER, SIGNAL = 0.92; EXPRESSED IN BONE MARROW, SIGNAL = 0.82; EXPRESSED IN BRAIN, SIGNAL = 1.3; EST_HUMAN HIT: BE439625.1, EVALUE 1.00e-35; SWISSPROT HIT: Q88435, EVALUE 9.20e-01
HTGFSPLPPPRHVQLNHVEFEDQDDEARVQYDGFRPGMYVRVEIENVPCEFVQNFDPHYPIILGGLGNSEGNVGHVQ

SEQ ID NO: 45265 - protein, 45 aa, Homo sapiens
  MAP TO AC016212.3; EXPRESSED IN PLACENTA, SIGNAL = 1.1; EXPRESSED IN ADULT LIVER, SIGNAL = 1.1; EXPRESSED IN BRAIN, SIGNAL = 0.81; EXPRESSED IN BONE MARROW, SIGNAL = 0.95; EXPRESSED IN LUNG, SIGNAL = 0.94; EXPRESSED IN FETAL LIVER, SIGNAL = 0.98; SWISSPROT HIT: P50676, EVALUE 2.80e+00; EST_HUMAN HIT: BF081244.1, EVALUE 5.30e+00
SVHVKILHGVQAPLLPIQVQKPLLCVLCCQIHHFWLTSNLPPWEK

SEQ ID NO: 45266 - protein, 74 aa, Homo sapiens
  MAP TO AL133344.19; EXPRESSED IN ADULT LIVER, SIGNAL = 0.78; EXPRESSED IN FETAL LIVER, SIGNAL = 1.6; EXPRESSED IN BRAIN, SIGNAL = 0.61; EXPRESSED IN PLACENTA, SIGNAL = 0.69; EXPRESSED IN BONE MARROW, SIGNAL = 0.65; SWISSPROT HIT: P00530, EVALUE 8.50e-01; EST_HUMAN HIT: AA287162.1, EVALUE 2.00e-03
TSIRRHRITLPPPDEDQFYTVYHFNVGTEVVFYGRTFKIYDCDAFTRNFLRKIGVKVNPPVQCPEDPYMKIRRE

SEQ ID NO: 45267 - protein, 50 aa, Homo sapiens
  MAP TO AL133344.19; EXPRESSED IN ADULT LIVER, SIGNAL = 0.78; EXPRESSED IN FETAL LIVER, SIGNAL = 1.6; EXPRESSED IN BRAIN, SIGNAL = 0.61; EXPRESSED IN PLACENTA, SIGNAL = 0.69; EXPRESSED IN BONE MARROW, SIGNAL = 0.65; EST_HUMAN HIT: BF688481.1, EVALUE 6.60e+00
GLLSGVIGLLFRLLMRISFILCIILMSAQRLSSMAGHSRFMTVMHSQETF

SEQ ID NO: 45268 - protein, 59 aa, Homo sapiens
  MAP TO AL133319.21; EXPRESSED IN ADULT LIVER, SIGNAL = 0.67; EXPRESSED IN PLACENTA, SIGNAL = 0.65; EXPRESSED IN FETAL LIVER, SIGNAL = 1.1; EXPRESSED IN BRAIN, SIGNAL = 0.8; EXPRESSED IN BONE MARROW, SIGNAL = 0.74; SWISSPROT HIT: P29616, EVALUE 2.00e+00; EST_HUMAN HIT: AW793453.1, EVALUE 2.10e+00
DFKMKKLVARREEADSETEGRKKSIEDVQKMSSEEKSFITLLHFSKNVLDSEVQERCKY

SEQ ID NO: 45269 - protein, 34 aa, Homo sapiens
  MAP TO AL109964.20; EXPRESSED IN ADULT LIVER, SIGNAL = 1.3; EXPRESSED IN LUNG, SIGNAL = 1.1; EXPRESSED IN PLACENTA, SIGNAL = 1.2; EXPRESSED IN FETAL LIVER, SIGNAL = 1.1; EXPRESSED IN BONE MARROW, SIGNAL =   1; EXPRESSED IN BRAIN, SIGNAL = 1.2; EST_HUMAN HIT: AA613061.1, EVALUE 7.50e+00
MGEDPKIHGPNFPRLASGPHLLPDLLRAGHVDPC

SEQ ID NO: 45270 - protein, 24 aa, Homo sapiens
  MAP TO AL109964.20; EXPRESSED IN ADULT LIVER, SIGNAL = 1.3; EXPRESSED IN LUNG, SIGNAL = 1.1; EXPRESSED IN PLACENTA, SIGNAL = 1.2; EXPRESSED IN FETAL LIVER, SIGNAL = 1.1; EXPRESSED IN BONE MARROW, SIGNAL =   1; EXPRESSED IN BRAIN, SIGNAL = 1.2
CHGGRSKDTRTELPQAGLWAPPAA

SEQ ID NO: 45271 - protein, 37 aa, Homo sapiens
  MAP TO AL121747.19; EXPRESSED IN BONE MARROW, SIGNAL = 0.83; EXPRESSED IN ADULT LIVER, SIGNAL = 0.91; EXPRESSED IN BRAIN, SIGNAL = 0.78; EXPRESSED IN PLACENTA, SIGNAL = 0.68; EXPRESSED IN FETAL LIVER, SIGNAL = 0.97; EST_HUMAN HIT: AA443192.1, EVALUE 8.00e-14; SWISSPROT HIT: Q60737, EVALUE 6.00e-15
NQDDYQLVRKLGRGKYSEVFEAINITNNEKVVVKILK

SEQ ID NO: 45272 - protein, 34 aa, Homo sapiens
  MAP TO AC006457.3; EXPRESSED IN PLACENTA, SIGNAL = 0.76; EXPRESSED IN FETAL LIVER, SIGNAL = 0.51; EXPRESSED IN BRAIN, SIGNAL = 0.56; EXPRESSED IN BONE MARROW, SIGNAL = 0.61; EXPRESSED IN ADULT LIVER, SIGNAL = 0.9; EST_HUMAN HIT: AA348480.1, EVALUE 5.00e-10
EKASTAQLEEIIAFGIFYPAALSYPLLECCHHDC

SEQ ID NO: 45273 - protein, 41 aa, Homo sapiens
  MAP TO AC021468.2; EXPRESSED IN LUNG, SIGNAL = 1.5; EXPRESSED IN PLACENTA, SIGNAL = 1.1; EXPRESSED IN FETAL LIVER, SIGNAL = 1.1; EXPRESSED IN BONE MARROW, SIGNAL = 0.96; EXPRESSED IN ADULT LIVER, SIGNAL = 1.3; EXPRESSED IN BRAIN, SIGNAL = 0.97; EST_HUMAN HIT: AU132570.1, EVALUE 4.00e-19; SWISSPROT HIT: P98175, EVALUE 8.30e+00
GQWTSTLWPNAMPASPARARITGHAPRTLWSCTAVPAPTAT

SEQ ID NO: 45274 - protein, 50 aa, Homo sapiens
  MAP TO AC016206.3; EXPRESSED IN ADULT LIVER, SIGNAL = 0.7; EXPRESSED IN FETAL LIVER, SIGNAL = 0.58; EXPRESSED IN BRAIN, SIGNAL = 0.51; EXPRESSED IN PLACENTA, SIGNAL = 0.65; EXPRESSED IN BONE MARROW, SIGNAL = 0.45
KPNRIRHSIQKQSLLMKKKIMSASYWQAFIVHYGSDFSAEETRALGFEIS

SEQ ID NO: 45275 - protein, 32 aa, Homo sapiens
  MAP TO AC025129.2; EXPRESSED IN PLACENTA, SIGNAL = 0.51; EXPRESSED IN ADULT LIVER, SIGNAL = 0.56; EXPRESSED IN BRAIN, SIGNAL = 0.5; EXPRESSED IN BONE MARROW, SIGNAL = 0.47
QQCTSEIRATKLRRHGDAEACLEFRMTIEIME

SEQ ID NO: 45276 - protein, 63 aa, Homo sapiens
  MAP TO AL138811.1; EXPRESSED IN PLACENTA, SIGNAL = 1.1; EXPRESSED IN ADULT LIVER, SIGNAL = 0.9; EXPRESSED IN FETAL LIVER, SIGNAL = 0.85; EXPRESSED IN BRAIN, SIGNAL = 0.64; EXPRESSED IN BONE MARROW, SIGNAL = 0.66; EXPRESSED IN LUNG, SIGNAL = 0.93; SWISSPROT HIT: P38770, EVALUE 1.80e-01; EST_HUMAN HIT: BF681188.1, EVALUE 5.20e-01
NVPEVNNENSEMSTEKSENTIIQKYNTEQEIREENMENFCSDTEYREKEEKKEGSFIEEIIID

SEQ ID NO: 45277 - protein, 45 aa, Homo sapiens
  MAP TO AL121946.11; EXPRESSED IN FETAL LIVER, SIGNAL = 0.8; EXPRESSED IN PLACENTA, SIGNAL = 0.82; EXPRESSED IN ADULT LIVER, SIGNAL = 1.1; EXPRESSED IN BRAIN, SIGNAL = 0.76; EXPRESSED IN BONE MARROW, SIGNAL = 0.64; EST_HUMAN HIT: AW842893.1, EVALUE 9.00e+00; SWISSPROT HIT: P07266, EVALUE 6.30e+00
GSLCMSSGIKTPKRWELMVSNTTFVNFDLINCVAIRTCSDCSQGQ

SEQ ID NO: 45278 - protein, 63 aa, Homo sapiens
  MAP TO AC010458.2; EXPRESSED IN BRAIN, SIGNAL = 0.56; EST_HUMAN HIT: BE935842.1, EVALUE 4.00e-30; SWISSPROT HIT: P37255, EVALUE 6.80e-01
AISSLYTNDGDMEALEADLKHRFTRQEWDLAKSLQKTIQAARSENYSLTDFWAYMVISKQTRE

SEQ ID NO: 45279 - protein, 18 aa, Homo sapiens
  MAP TO AC010458.2; EXPRESSED IN BRAIN, SIGNAL = 0.56; EST_HUMAN HIT: BE935842.1, EVALUE 6.00e-03
QYLLSTPMMVTWKLSRLT

SEQ ID NO: 45280 - protein, 68 aa, Homo sapiens
  MAP TO AL139421.2; EXPRESSED IN BRAIN, SIGNAL = 0.5; EXPRESSED IN PLACENTA, SIGNAL = 0.46; EXPRESSED IN FETAL LIVER, SIGNAL = 0.6; EXPRESSED IN BONE MARROW, SIGNAL = 0.63; EST_HUMAN HIT: AA682308.1, EVALUE 6.00e-29; SWISSPROT HIT: P22793, EVALUE 1.20e-02
VMKEQEQYIATQYKEAIDLGQELRLTREQVQNSHTELAEARHQQVQAQREIERLSSELEDMKQLSKEK

SEQ ID NO: 45281 - protein, 34 aa, Homo sapiens
  MAP TO AC011599.8; EXPRESSED IN ADULT LIVER, SIGNAL = 0.89; EXPRESSED IN BRAIN, SIGNAL = 1.1; EXPRESSED IN BONE MARROW, SIGNAL =   1; EXPRESSED IN LUNG, SIGNAL = 1.1; EXPRESSED IN PLACENTA, SIGNAL = 0.96; EXPRESSED IN FETAL LIVER, SIGNAL = 0.85; EST_HUMAN HIT: AW293876.1, EVALUE 2.00e-13
TRPPSCASRLRRRPSSAHAHSPRAMSSPRTCRTS

SEQ ID NO: 45282 - protein, 38 aa, Homo sapiens
  MAP TO AC011599.8; EXPRESSED IN ADULT LIVER, SIGNAL = 0.89; EXPRESSED IN BRAIN, SIGNAL = 1.1; EXPRESSED IN BONE MARROW, SIGNAL =   1; EXPRESSED IN LUNG, SIGNAL = 1.1; EXPRESSED IN PLACENTA, SIGNAL = 0.96; EXPRESSED IN FETAL LIVER, SIGNAL = 0.85; EST_HUMAN HIT: BF061639.1, EVALUE 6.00e-16; SWISSPROT HIT: P42780, EVALUE 6.40e+00
VEGEAPSSETGTSLDSPSAYPQGPLVPGSSLSPDHYEH

SEQ ID NO: 45283 - protein, 49 aa, Homo sapiens
  MAP TO AL157396.2; EXPRESSED IN PLACENTA, SIGNAL = 0.83; EXPRESSED IN BONE MARROW, SIGNAL = 0.65; EXPRESSED IN FETAL LIVER, SIGNAL = 1.3; EXPRESSED IN BRAIN, SIGNAL = 0.62; SWISSPROT HIT: P51160, EVALUE 1.00e-23; EST_HUMAN HIT: W29086.1, EVALUE 2.00e-06
KEDLPDPRSAELYEFRFSDFPLTEHGLIKCGIRLFFEINVVEKFKVPVE

SEQ ID NO: 45284 - protein, 26 aa, Homo sapiens
  MAP TO AL157396.2; EXPRESSED IN PLACENTA, SIGNAL = 0.83; EXPRESSED IN BONE MARROW, SIGNAL = 0.65; EXPRESSED IN FETAL LIVER, SIGNAL = 1.3; EXPRESSED IN BRAIN, SIGNAL = 0.62
KRTCQTHAQQNCTNSASVTSPLQSTD

SEQ ID NO: 45285 - protein, 112 aa, Homo sapiens
  MAP TO AC013800.3; EXPRESSED IN PLACENTA, SIGNAL = 0.56; EXPRESSED IN FETAL LIVER, SIGNAL = 0.49; EXPRESSED IN ADULT LIVER, SIGNAL = 0.52; EXPRESSED IN BRAIN, SIGNAL = 0.58; EXPRESSED IN BONE MARROW, SIGNAL = 0.57; SWISSPROT HIT: P49457, EVALUE 2.00e-05; EST_HUMAN HIT: AI937380.1, EVALUE 1.00e-06
FELIKCEDPGTPKFGYKVHDEGHFAGSSVSFSCDPGYSLRGSEELLCLSGERRTWDRPLPTCVGRRALPLQGTLGSPIIPSSSPGLIPVRPHAPGPGGHQLGLNPLVNRHHG

SEQ ID NO: 45286 - protein, 48 aa, Homo sapiens
  MAP TO AC013800.3; EXPRESSED IN PLACENTA, SIGNAL = 0.56; EXPRESSED IN FETAL LIVER, SIGNAL = 0.49; EXPRESSED IN ADULT LIVER, SIGNAL = 0.52; EXPRESSED IN BRAIN, SIGNAL = 0.58; EXPRESSED IN BONE MARROW, SIGNAL = 0.57; EST_HUMAN HIT: BE011802.1, EVALUE 6.70e+00
ALNSSNVRTQEPPSLATRFMMKVILQGAPCPSAVTLDTACGVVRSCCV

SEQ ID NO: 45287 - protein, 41 aa, Homo sapiens
  MAP TO AC025516.2; EXPRESSED IN LUNG, SIGNAL = 1.3; EXPRESSED IN PLACENTA, SIGNAL =   1; EXPRESSED IN FETAL LIVER, SIGNAL =   1; EXPRESSED IN ADULT LIVER, SIGNAL = 1.1; EXPRESSED IN BRAIN, SIGNAL = 0.97; EXPRESSED IN BONE MARROW, SIGNAL = 0.96; SWISSPROT HIT: P57110, EVALUE 9.00e-08; EST_HUMAN HIT: AI400905.1, EVALUE 1.00e-06
EGPVINFDGATTLKNFCSWQQTQNDLDDVHPSHHDTAVLIT

SEQ ID NO: 45288 - protein, 65 aa, Homo sapiens
  MAP TO AL133344.19; EXPRESSED IN BONE MARROW, SIGNAL = 0.89; EXPRESSED IN PLACENTA, SIGNAL = 0.84; EXPRESSED IN ADULT LIVER, SIGNAL = 0.93; EXPRESSED IN FETAL LIVER, SIGNAL = 0.76; EXPRESSED IN BRAIN, SIGNAL = 0.81; SWISSPROT HIT: P00722, EVALUE 2.60e+00; EST_HUMAN HIT: AV755842.1, EVALUE 8.00e-31
DILMSLTVGNLAEQEFVTIARHYRVPEGTCSDMDFLIALAHEKFKKNMFENFDTFIYSCVYEDRE

SEQ ID NO: 45289 - protein, 56 aa, Homo sapiens
  MAP TO AL162390.2; EXPRESSED IN PLACENTA, SIGNAL = 0.73; EXPRESSED IN BONE MARROW, SIGNAL = 0.8; EXPRESSED IN ADULT LIVER, SIGNAL = 0.94; EXPRESSED IN FETAL LIVER, SIGNAL = 0.8; EXPRESSED IN BRAIN, SIGNAL = 2.8; EST_HUMAN HIT: BE770581.1, EVALUE 7.00e-04
EIHRKLQAVDSGLIALRETSKHLEHKDNELRQKKKELLERKTKKRQLEQKISSKLG

SEQ ID NO: 45290 - protein, 37 aa, Homo sapiens
  MAP TO AC011941.4; EXPRESSED IN PLACENTA, SIGNAL = 0.99; EXPRESSED IN ADULT LIVER, SIGNAL = 1.1; EXPRESSED IN BRAIN, SIGNAL =   1; EXPRESSED IN BONE MARROW, SIGNAL =   1; EXPRESSED IN LUNG, SIGNAL =   1; EXPRESSED IN FETAL LIVER, SIGNAL = 0.96; EST_HUMAN HIT: BF664959.1, EVALUE 2.50e+00
CIYVMQMQMTCGEVMRWEGSILTPWWSCWSHCRWTAS

SEQ ID NO: 45291 - protein, 60 aa, Homo sapiens
  MAP TO AC009079.4; EXPRESSED IN PLACENTA, SIGNAL = 0.54; EXPRESSED IN FETAL LIVER, SIGNAL = 0.77; EXPRESSED IN BONE MARROW, SIGNAL = 0.65; EXPRESSED IN ADULT LIVER, SIGNAL = 0.74; EXPRESSED IN BRAIN, SIGNAL = 0.48; EST_HUMAN HIT: AV756022.1, EVALUE 6.00e-28; SWISSPROT HIT: P56315, EVALUE 2.00e+00
AKEMDETVAEFIKRTILKIPMNELTTILKAWDFLSENQLQTVNFRQRKESVVQHLIHLCE

SEQ ID NO: 45292 - protein, 177 aa, Homo sapiens
  MAP TO AC007923.2; EXPRESSED IN LUNG, SIGNAL = 0.83; EXPRESSED IN PLACENTA, SIGNAL = 0.76; EXPRESSED IN ADULT LIVER, SIGNAL = 1.1; EXPRESSED IN FETAL LIVER, SIGNAL = 0.9; EXPRESSED IN BONE MARROW, SIGNAL = 1.1; EXPRESSED IN BRAIN, SIGNAL = 0.6; SWISSPROT HIT: P10266, EVALUE 7.00e-51; EST_HUMAN HIT: AA190368.1, EVALUE 2.00e-32
GDPNLASPWQLTKEAEAELQLIKKQVYKAQINRIDPEKTLDLLFFSTQHSPTGVIVQEQDLVEWLFLLRTNSWTLILYLDQITTIIGNGGTRIVKLHGYDPGKIIVPLTKAQIQQAFINSLTWQTHLADFVGILNNHFPKTKFLFQFLKLTNWILPKITKFKQIEGAENIFTDGSSN

SEQ ID NO: 45293 - protein, 29 aa, Homo sapiens
  MAP TO AC016205.4; EXPRESSED IN PLACENTA, SIGNAL = 1.3; EXPRESSED IN ADULT LIVER, SIGNAL = 1.6; EXPRESSED IN HELA, SIGNAL = 2.4; EXPRESSED IN BRAIN, SIGNAL = 1.6; EXPRESSED IN BONE MARROW, SIGNAL = 1.7; EXPRESSED IN LUNG, SIGNAL = 1.4; EXPRESSED IN FETAL LIVER, SIGNAL =   2; EST_HUMAN HIT: AI204358.1, EVALUE 6.00e-09
ISIMENIPASSNHYLNGEISSTANMVLNE

SEQ ID NO: 45294 - protein, 43 aa, Homo sapiens
  MAP TO AC022174.2; EXPRESSED IN LUNG, SIGNAL = 1.3; EXPRESSED IN PLACENTA, SIGNAL = 0.96; EXPRESSED IN ADULT LIVER, SIGNAL = 0.89; EXPRESSED IN FETAL LIVER, SIGNAL = 0.77; EXPRESSED IN BRAIN, SIGNAL = 0.76; EXPRESSED IN BONE MARROW, SIGNAL = 0.76; SWISSPROT HIT: O15269, EVALUE 6.30e+00
MFYGDYVFLDQRSCFNIELSGLSVNEEIIELYQSGGNNSPSET

SEQ ID NO: 45295 - protein, 23 aa, Homo sapiens
  MAP TO AC022174.2; EXPRESSED IN LUNG, SIGNAL = 1.3; EXPRESSED IN PLACENTA, SIGNAL = 0.96; EXPRESSED IN ADULT LIVER, SIGNAL = 0.89; EXPRESSED IN FETAL LIVER, SIGNAL = 0.77; EXPRESSED IN BRAIN, SIGNAL = 0.76; EXPRESSED IN BONE MARROW, SIGNAL = 0.76
CSMATMFSWTRDPALILNYQVSV

SEQ ID NO: 45296 - protein, 90 aa, Homo sapiens
  MAP TO AC016576.4; EXPRESSED IN ADULT LIVER, SIGNAL =   1; EXPRESSED IN BRAIN, SIGNAL = 0.87; EXPRESSED IN LUNG, SIGNAL = 0.99; EXPRESSED IN PLACENTA, SIGNAL = 0.99; EXPRESSED IN FETAL LIVER, SIGNAL = 0.87; EXPRESSED IN BONE MARROW, SIGNAL = 0.79; EST_HUMAN HIT: BE811954.1, EVALUE 8.20e+00; SWISSPROT HIT: Q39575, EVALUE 1.00e-15
CRKLPRALKDWQAFLDLKKIIDDFSECCPLLEYMASKAMMERHWERITTLTGHSLDVGNESFKLRNIMEAPLLKYKEEIEVEYDVMEDCK

SEQ ID NO: 45297 - protein, 37 aa, Homo sapiens; identical to SEQ ID NO: 40345
  MAP TO AL161661.1; EXPRESSED IN LUNG, SIGNAL = 0.85; EXPRESSED IN PLACENTA, SIGNAL = 0.69; EXPRESSED IN FETAL LIVER, SIGNAL = 0.63; EXPRESSED IN BRAIN, SIGNAL =   1; EXPRESSED IN BONE MARROW, SIGNAL = 0.7; EXPRESSED IN ADULT LIVER, SIGNAL = 0.81; SWISSPROT HIT: Q92556, EVALUE 1.00e-10; EST_HUMAN HIT: AU125848.1, EVALUE 8.00e-14

SEQ ID NO: 45298 - protein, 19 aa, Homo sapiens
  MAP TO AL161661.1; EXPRESSED IN LUNG, SIGNAL = 0.85; EXPRESSED IN PLACENTA, SIGNAL = 0.69; EXPRESSED IN FETAL LIVER, SIGNAL = 0.63; EXPRESSED IN BRAIN, SIGNAL =   1; EXPRESSED IN BONE MARROW, SIGNAL = 0.7; EXPRESSED IN ADULT LIVER, SIGNAL = 0.81
SSTVPMTFRSLQCVSTPGS

SEQ ID NO: 45299 - protein, 63 aa, Homo sapiens
  MAP TO AC018731.3; EXPRESSED IN ADULT LIVER, SIGNAL = 0.66; EXPRESSED IN BRAIN, SIGNAL = 0.52; EXPRESSED IN FETAL LIVER, SIGNAL = 0.57; EXPRESSED IN BONE MARROW, SIGNAL = 0.56; EST_HUMAN HIT: BE218978.1, EVALUE 6.00e-29; SWISSPROT HIT: Q63210, EVALUE 4.50e+00
ASVLNVKESKAPERTVVVAGLPVDLFSDQLLAVLVKSHFQDIKNEGGDVEDVIYPTRTKGVAY

SEQ ID NO: 45300 - protein, 65 aa, Homo sapiens
  MAP TO AC019275.3; EXPRESSED IN PLACENTA, SIGNAL = 0.72; EXPRESSED IN FETAL LIVER, SIGNAL = 0.69; EXPRESSED IN BONE MARROW, SIGNAL = 0.67; EXPRESSED IN ADULT LIVER, SIGNAL = 0.77; EXPRESSED IN BRAIN, SIGNAL = 0.6; EST_HUMAN HIT: BE891806.1, EVALUE 2.00e-31; SWISSPROT HIT: Q92674, EVALUE 2.00e+00
QGSKFRRNVSTLLIELGFQIKKKTKRLYINKANIWNSALDAFRNRNFNPSYAIEVAYVIENDNFG

SEQ ID NO: 45301 - protein, 49 aa, Homo sapiens
  MAP TO AC013799.3; EXPRESSED IN PLACENTA, SIGNAL =   1; EXPRESSED IN BONE MARROW, SIGNAL =   1; EXPRESSED IN LUNG, SIGNAL =   1; EXPRESSED IN ADULT LIVER, SIGNAL = 1.2; EXPRESSED IN FETAL LIVER, SIGNAL = 0.7; EXPRESSED IN BRAIN, SIGNAL = 0.96
LNILLITNINMRRRRKMKKRRRRKRKRGKRRSRKRREKRGEGVKRSLIT

SEQ ID NO: 45302 - protein, 63 aa, Homo sapiens
  MAP TO AL080312.14; EXPRESSED IN ADULT LIVER, SIGNAL = 0.55; EXPRESSED IN BRAIN, SIGNAL = 0.45; EXPRESSED IN PLACENTA, SIGNAL = 0.53; EXPRESSED IN FETAL LIVER, SIGNAL = 0.54; EXPRESSED IN BONE MARROW, SIGNAL = 0.57; EST_HUMAN HIT: BF680206.1, EVALUE 2.00e-27; SWISSPROT HIT: P18892, EVALUE 6.80e-01
RHSITVTTLTSAGNIGEDGILSCTFELDIKLSDIMIQWLKEGVIGLVHEFKEGKDELSEQDEM

SEQ ID NO: 45303 - protein, 48 aa, Homo sapiens
  MAP TO AC022216.3; EXPRESSED IN PLACENTA, SIGNAL = 0.76; EXPRESSED IN ADULT LIVER, SIGNAL = 0.65; EXPRESSED IN FETAL LIVER, SIGNAL = 0.64; EXPRESSED IN BRAIN, SIGNAL = 0.69; EXPRESSED IN BONE MARROW, SIGNAL = 0.71; SWISSPROT HIT: Q9ZER9, EVALUE 1.20e+00
SWTLKRLCLPILRNSSLHNITNTTSKALSKNTQQHLKKIPLLLPVTLC

SEQ ID NO: 45304 - protein, 74 aa, Homo sapiens
  MAP TO AC026442.1; EXPRESSED IN PLACENTA, SIGNAL = 0.5; EXPRESSED IN ADULT LIVER, SIGNAL = 0.61; EXPRESSED IN BRAIN, SIGNAL = 0.52; EXPRESSED IN BONE MARROW, SIGNAL = 0.42; SWISSPROT HIT: Q07920, EVALUE 3.60e+00; EST_HUMAN HIT: BE063509.1, EVALUE 2.00e-08
TISQRGCTPPAILGVILSSLHWILGTISQGKCTLPAILGITSSSPPRVLGTISQDGYTPTAILRLTSTSPLLDI

SEQ ID NO: 45305 - protein, 28 aa, Homo sapiens
  MAP TO AL136300.5; EXPRESSED IN PLACENTA, SIGNAL = 0.58; EXPRESSED IN FETAL LIVER, SIGNAL = 0.61; EXPRESSED IN BONE MARROW, SIGNAL = 0.52; EXPRESSED IN BRAIN, SIGNAL = 0.57
MGNIDDFDTCKCPEFAAYRAGNMTSGLM

SEQ ID NO: 45306 - protein, 23 aa, Homo sapiens
  MAP TO AL136300.5; EXPRESSED IN PLACENTA, SIGNAL = 0.58; EXPRESSED IN FETAL LIVER, SIGNAL = 0.61; EXPRESSED IN BONE MARROW, SIGNAL = 0.52; EXPRESSED IN BRAIN, SIGNAL = 0.57
LWAILMILILASAQNSLLIVLGI

SEQ ID NO: 45307 - protein, 68 aa, Homo sapiens
  MAP TO AC022939.2; EXPRESSED IN ADULT LIVER, SIGNAL = 0.69; EXPRESSED IN FETAL LIVER, SIGNAL = 0.58; EXPRESSED IN BRAIN, SIGNAL = 0.49; EXPRESSED IN BONE MARROW, SIGNAL = 0.46; EXPRESSED IN PLACENTA, SIGNAL = 0.54; EST_HUMAN HIT: BF333210.1, EVALUE 2.00e-34; SWISSPROT HIT: P36924, EVALUE 2.00e+00
DSQMVVDSFKSGFEPPGDFPFEDYSQHIYRTISDGTISASKQESGKMDAKTTVGKAKGKLWLFGKKPK

SEQ ID NO: 45308 - protein, 50 aa, Homo sapiens
  MAP TO AC023296.2; EXPRESSED IN PLACENTA, SIGNAL = 0.74; EXPRESSED IN ADULT LIVER, SIGNAL = 0.84; EXPRESSED IN FETAL LIVER, SIGNAL = 0.73; EXPRESSED IN BONE MARROW, SIGNAL = 0.71; EXPRESSED IN LUNG, SIGNAL = 0.91; EXPRESSED IN BRAIN, SIGNAL = 0.74; SWISSPROT HIT: Q24248, EVALUE 1.60e+00
SSRDISRRLNSHLLTTVGGSQGKNDQPRGRGADGGLSSGVLDPGPLLSMR

SEQ ID NO: 45309 - protein, 49 aa, Homo sapiens
  MAP TO AC023296.2; EXPRESSED IN PLACENTA, SIGNAL = 0.74; EXPRESSED IN ADULT LIVER, SIGNAL = 0.84; EXPRESSED IN FETAL LIVER, SIGNAL = 0.73; EXPRESSED IN BONE MARROW, SIGNAL = 0.71; EXPRESSED IN LUNG, SIGNAL = 0.91; EXPRESSED IN BRAIN, SIGNAL = 0.74
AARGISLGDSTATCSPQWEGVRVRMISPEAGELMVVSVLEFWIQDHSCL

SEQ ID NO: 45310 - protein, 74 aa, Homo sapiens
  MAP TO AC013396.4; EXPRESSED IN ADULT LIVER, SIGNAL = 1.1; EXPRESSED IN BRAIN, SIGNAL = 1.2; EXPRESSED IN LUNG, SIGNAL = 0.83; EXPRESSED IN FETAL LIVER, SIGNAL = 0.9; EXPRESSED IN PLACENTA, SIGNAL = 0.96; EXPRESSED IN BONE MARROW, SIGNAL = 0.78; SWISSPROT HIT: Q13330, EVALUE 3.00e-15; EST_HUMAN HIT: AI342393.1, EVALUE 1.00e-36
DPRVRSHVSRQAMQGMPVRNTGSPKSAVKTRQAFFLHTTYFTKFARQVCKNTLRLRQAARRPFVAINYAAIRAE

SEQ ID NO: 45311 - protein, 27 aa, Homo sapiens
  MAP TO AC013396.4; EXPRESSED IN ADULT LIVER, SIGNAL = 1.1; EXPRESSED IN BRAIN, SIGNAL = 1.2; EXPRESSED IN LUNG, SIGNAL = 0.83; EXPRESSED IN FETAL LIVER, SIGNAL = 0.9; EXPRESSED IN PLACENTA, SIGNAL = 0.96; EXPRESSED IN BONE MARROW, SIGNAL = 0.78; EST_HUMAN HIT: AA879218.1, EVALUE 1.00e-08
TLVLEVTCPARPCRECQSETLGVQSLQ

SEQ ID NO: 45312 - protein, 45 aa, Homo sapiens
  MAP TO AC025115.2; EXPRESSED IN ADULT LIVER, SIGNAL = 0.59; EXPRESSED IN BRAIN, SIGNAL = 0.45; EXPRESSED IN PLACENTA, SIGNAL = 0.64; EXPRESSED IN BONE MARROW, SIGNAL = 0.46; EST_HUMAN HIT: AA938905.1, EVALUE 3.10e+00
PPPWGTCSSLRRLALTLTSIPLCTSSLVTWPLLTSALRRLQSPKW

SEQ ID NO: 45313 - protein, 27 aa, Homo sapiens
  MAP TO AL118525.17; EXPRESSED IN PLACENTA, SIGNAL = 0.46; EXPRESSED IN ADULT LIVER, SIGNAL = 0.61; EXPRESSED IN FETAL LIVER, SIGNAL = 0.82; EXPRESSED IN BRAIN, SIGNAL = 0.56; EXPRESSED IN BONE MARROW, SIGNAL = 0.61; EST_HUMAN HIT: AV698976.1, EVALUE 1.20e+00; SWISSPROT HIT: Q16647, EVALUE 1.00e-10
RPGEPPLDLGSIPWLGYALDFGKDAAS

SEQ ID NO: 45314 - protein, 26 aa, Homo sapiens
  MAP TO AL118525.17; EXPRESSED IN PLACENTA, SIGNAL = 0.46; EXPRESSED IN ADULT LIVER, SIGNAL = 0.61; EXPRESSED IN FETAL LIVER, SIGNAL = 0.82; EXPRESSED IN BRAIN, SIGNAL = 0.56; EXPRESSED IN BONE MARROW, SIGNAL = 0.61; EST_HUMAN HIT: BF203332.1, EVALUE 6.10e+00; SWISSPROT HIT: P97849, EVALUE 8.70e+00
DLVSLPWTWAASPGWGMPWTLEKMLP

SEQ ID NO: 45315 - protein, 61 aa, Homo sapiens
  MAP TO AC013357.9; EXPRESSED IN LUNG, SIGNAL =   1; EXPRESSED IN PLACENTA, SIGNAL = 0.99; EXPRESSED IN FETAL LIVER, SIGNAL = 0.8; EXPRESSED IN BRAIN, SIGNAL = 0.83; EXPRESSED IN BONE MARROW, SIGNAL = 0.82; EXPRESSED IN ADULT LIVER, SIGNAL = 0.89; EST_HUMAN HIT: BE160256.1, EVALUE 1.00e-06
LTSEGIVFISDFSPSKPPSGPGKKVYISSPHSSPAHNKLATATGAKKALNKVKILITQEKP

SEQ ID NO: 45316 - protein, 49 aa, Homo sapiens
  MAP TO AC013357.9; EXPRESSED IN LUNG, SIGNAL =   1; EXPRESSED IN PLACENTA, SIGNAL = 0.99; EXPRESSED IN FETAL LIVER, SIGNAL = 0.8; EXPRESSED IN BRAIN, SIGNAL = 0.83; EXPRESSED IN BONE MARROW, SIGNAL = 0.82; EXPRESSED IN ADULT LIVER, SIGNAL = 0.89; EST_HUMAN HIT: BE160256.1, EVALUE 3.00e-19; SWISSPROT HIT: Q03164, EVALUE 2.40e-01
CLPARVLFSSQTSPHPSLPQALGKKFTYPAHTLAQLITSWPQPQVPRKL

SEQ ID NO: 45317 - protein, 30 aa, Homo sapiens [sequence omitted]

SEQ ID NO: 45318 - protein, 57 aa, Homo sapiens
  MAP TO AC009476.3; EXPRESSED IN BONE MARROW, SIGNAL = 0.51; EXPRESSED IN PLACENTA, SIGNAL = 0.58; EXPRESSED IN FETAL LIVER, SIGNAL = 0.47; EXPRESSED IN BRAIN, SIGNAL = 0.49; EST_HUMAN HIT: W90085.1, EVALUE 8.10e+00
QTLDHLLPHKVAVVVVVFKSPQVLQSVETGLWTVTPDPSWIYEENDKLSFDECTWPW

SEQ ID NO: 45319 - protein, 67 aa, Homo sapiens
  MAP TO AL136089.8; EXPRESSED IN PLACENTA, SIGNAL = 1.1; EXPRESSED IN FETAL LIVER, SIGNAL = 0.54; EXPRESSED IN BRAIN, SIGNAL = 7.9; EXPRESSED IN ADULT LIVER, SIGNAL = 0.79; EXPRESSED IN BONE MARROW, SIGNAL = 0.79; EST_HUMAN HIT: BE302594.1, EVALUE 2.00e-22
LKEQRERERWQRQRKVLAAGSSLEEGGEFDDLVSALRSGEVFDKDLCKLKRSRKRSGSQALEVTRER

SEQ ID NO: 45320 - protein, 37 aa, Homo sapiens
  MAP TO AL133458.11; EXPRESSED IN FETAL LIVER, SIGNAL = 0.72; EXPRESSED IN BONE MARROW, SIGNAL = 1.3; EXPRESSED IN BRAIN, SIGNAL = 0.68; SWISSPROT HIT: P80022, EVALUE 6.00e-05; EST_HUMAN HIT: AI986481.1, EVALUE 1.00e-15
KHEWEKHGTCAAQVDALNSQKKYFGRSLELYRELDLN

SEQ ID NO: 45321 - protein, 37 aa, Homo sapiens
  MAP TO AL133458.11; EXPRESSED IN FETAL LIVER, SIGNAL = 0.72; EXPRESSED IN BONE MARROW, SIGNAL = 1.3; EXPRESSED IN BRAIN, SIGNAL = 0.68; SWISSPROT HIT: O53951, EVALUE 6.40e+00; EST_HUMAN HIT: AI986481.1, EVALUE 6.00e-16
SMSGKSMGPAPPRWMRSTPRRSTLAEAWNSTGSWTST

SEQ ID NO: 45322 - protein, 27 aa, Homo sapiens
  MAP TO AL161940.3; EXPRESSED IN PLACENTA, SIGNAL = 0.47; EXPRESSED IN FETAL LIVER, SIGNAL = 0.5; EXPRESSED IN BONE MARROW, SIGNAL = 0.53; EXPRESSED IN ADULT LIVER, SIGNAL = 0.54; EXPRESSED IN BRAIN, SIGNAL = 0.52
LHSDETLQCLLTLKVWLLLCLLCFQTQ

SEQ ID NO: 45323 - protein, 19 aa, Homo sapiens
  MAP TO AL160060.3; EXPRESSED IN BONE MARROW, SIGNAL = 0.99; EXPRESSED IN LUNG, SIGNAL = 1.2; EXPRESSED IN PLACENTA, SIGNAL = 1.2; EXPRESSED IN FETAL LIVER, SIGNAL = 0.89; EXPRESSED IN ADULT LIVER, SIGNAL =   1; EXPRESSED IN BRAIN, SIGNAL = 0.81
PPAFLGSRPLPASSRQQQP

SEQ ID NO: 45324 - protein, 76 aa, Homo sapiens
  MAP TO AC021846.3; EXPRESSED IN PLACENTA, SIGNAL = 0.54; EXPRESSED IN ADULT LIVER, SIGNAL = 0.51; EXPRESSED IN BRAIN, SIGNAL = 0.46; EXPRESSED IN BONE MARROW, SIGNAL = 0.43; SWISSPROT HIT: P16070, EVALUE 5.20e-01; EST_HUMAN HIT: BE788134.1, EVALUE 3.00e+00
KSPKGQTIKSEGAAPEIKCILKYNQNQSLSCYQWTVTQNTGQEITHTIGYQITSQEQCTKLTEGPNYGDGINRDLK

SEQ ID NO: 45325 - protein, 35 aa, Homo sapiens
  MAP TO AC021846.3; EXPRESSED IN PLACENTA, SIGNAL = 0.54; EXPRESSED IN ADULT LIVER, SIGNAL = 0.51; EXPRESSED IN BRAIN, SIGNAL = 0.46; EXPRESSED IN BONE MARROW, SIGNAL = 0.43
NHQKVRPSNQKEQHQKSSAYSNIIKINLYHATNGQ

SEQ ID NO: 45326 - protein, 29 aa, Homo sapiens
  MAP TO AL161445.2; EXPRESSED IN BRAIN, SIGNAL = 0.47; EST_HUMAN HIT: AA044450.1, EVALUE 1.00e-10
FPVLPNLRYGLHQISASERIWKDIDPNFI

SEQ ID NO: 45327 - protein, 29 aa, Homo sapiens
  MAP TO AL161445.2; EXPRESSED IN BRAIN, SIGNAL = 0.47; EST_HUMAN HIT: AA044450.1, EVALUE 2.00e-10
FLFFPTCAMDFIRFQHQREYGRTSTLTSS

SEQ ID NO: 45328 - protein, 35 aa, Homo sapiens
  MAP TO AL133354.8; EXPRESSED IN BONE MARROW, SIGNAL = 0.55; EXPRESSED IN PLACENTA, SIGNAL = 0.68; EXPRESSED IN ADULT LIVER, SIGNAL = 0.52; EXPRESSED IN FETAL LIVER, SIGNAL = 0.54; EXPRESSED IN BRAIN, SIGNAL = 0.49; EST_HUMAN HIT: BE314749.1, EVALUE 7.50e+00; SWISSPROT HIT: Q15303, EVALUE 8.40e+00
WRPRGCISEGRVKIRVQRSEGAWSTQTLNCTRCRR

SEQ ID NO: 45329 - protein, 67 aa, Homo sapiens
  MAP TO AL158049.2; EXPRESSED IN BONE MARROW, SIGNAL = 0.65; EXPRESSED IN LUNG, SIGNAL = 1.4; EXPRESSED IN PLACENTA, SIGNAL = 0.64; EXPRESSED IN ADULT LIVER, SIGNAL = 0.8; EXPRESSED IN FETAL LIVER, SIGNAL = 0.54; EXPRESSED IN BRAIN, SIGNAL = 0.63; EST_HUMAN HIT: BE397068.1, EVALUE 1.00e-29; SWISSPROT HIT: P29994, EVALUE 1.00e-26
NFLRCQNNKTNYNLVCETLQFLDIMCGSTTGGLGLLGLYINEDNVGLVIQTLETLTEYCQGPCHENQ

SEQ ID NO: 45330 - protein, 66 aa, Homo sapiens
  MAP TO AL158049.2; EXPRESSED IN BONE MARROW, SIGNAL = 0.65; EXPRESSED IN LUNG, SIGNAL = 1.4; EXPRESSED IN PLACENTA, SIGNAL = 0.64; EXPRESSED IN ADULT LIVER, SIGNAL = 0.8; EXPRESSED IN FETAL LIVER, SIGNAL = 0.54; EXPRESSED IN BRAIN, SIGNAL = 0.63; EST_HUMAN HIT: BE397068.1, EVALUE 7.00e-36; SWISSPROT HIT: P94965, EVALUE 2.10e-01
TSCAVRTTKPTTTWYARRCSSWTSCAAAPRAAWGCWGSTSMRTTWASSSRPWRPSLSTARAPAMRT

SEQ ID NO: 45331 - protein, 36 aa, Homo sapiens
  MAP TO AL157392.2; EXPRESSED IN LUNG, SIGNAL = 0.94; EXPRESSED IN ADULT LIVER, SIGNAL = 1.3; EXPRESSED IN BRAIN, SIGNAL = 0.82; EXPRESSED IN BONE MARROW, SIGNAL = 1.1; EXPRESSED IN PLACENTA, SIGNAL = 1.2; EXPRESSED IN FETAL LIVER, SIGNAL =   1
TYLPHNKHSFTEIKMKMLSGVRNRWYHLNIKTTLST

SEQ ID NO: 45332 - protein, 31 aa, Homo sapiens
  MAP TO AC009476.3; EXPRESSED IN PLACENTA, SIGNAL = 0.76; EXPRESSED IN ADULT LIVER, SIGNAL = 0.81; EXPRESSED IN BRAIN, SIGNAL = 0.69; EXPRESSED IN BONE MARROW, SIGNAL = 0.66; EXPRESSED IN FETAL LIVER, SIGNAL = 0.74; SWISSPROT HIT: P14100, EVALUE 6.50e+00
KNYKYNYLWKAMGVQHEPQKHKKNQIINQLE

SEQ ID NO: 45333 - protein, 58 aa, Homo sapiens
  MAP TO AC011599.8; EXPRESSED IN BONE MARROW, SIGNAL = 1.7; EXPRESSED IN PLACENTA, SIGNAL = 1.6; EXPRESSED IN ADULT LIVER, SIGNAL = 1.6; EXPRESSED IN FETAL LIVER, SIGNAL = 1.7; EXPRESSED IN BRAIN, SIGNAL = 1.9; EXPRESSED IN LUNG, SIGNAL = 1.6; EST_HUMAN HIT: AI906278.1, EVALUE 3.00e-16
ELEKQKGVVRPSMSQCSSLKKESGNGTLSRACLDDSYASGEGLKRSALSSSLRDLSEA

SEQ ID NO: 45334 - protein, 31 aa, Homo sapiens
  MAP TO AC011599.8; EXPRESSED IN BONE MARROW, SIGNAL = 1.7; EXPRESSED IN PLACENTA, SIGNAL = 1.6; EXPRESSED IN ADULT LIVER, SIGNAL = 1.6; EXPRESSED IN FETAL LIVER, SIGNAL = 1.7; EXPRESSED IN BRAIN, SIGNAL = 1.9; EXPRESSED IN LUNG, SIGNAL = 1.6
LCSSHQDPHPLCSSGAREAERRRAAQHVPVL

SEQ ID NO: 45335 - protein, 26 aa, Homo sapiens
  MAP TO AL157396.2; EXPRESSED IN PLACENTA, SIGNAL = 0.56; EXPRESSED IN ADULT LIVER, SIGNAL = 0.62; EXPRESSED IN FETAL LIVER, SIGNAL = 0.68; EXPRESSED IN BRAIN, SIGNAL = 0.74; EXPRESSED IN BONE MARROW, SIGNAL = 0.57; EST_HUMAN HIT: BF110909.1, EVALUE 3.00e-08
ETLMRKKVLQNLNFGRVHYQRQMKNH

SEQ ID NO: 45336 - protein, 39 aa, Homo sapiens
  MAP TO AC016790.3; EXPRESSED IN ADULT LIVER, SIGNAL = 0.87; EXPRESSED IN PLACENTA, SIGNAL = 0.58; EXPRESSED IN FETAL LIVER, SIGNAL = 1.1; EXPRESSED IN BRAIN, SIGNAL = 7.7; EXPRESSED IN BONE MARROW, SIGNAL = 0.99; EXPRESSED IN LUNG, SIGNAL = 0.96; SWISSPROT HIT: Q13634, EVALUE 1.00e-16; EST_HUMAN HIT: AI740827.1, EVALUE 1.00e-13
TSVLQVTATDADDPTYGNSARVVYSILQGQPYFSVDPKT

SEQ ID NO: 45337 - protein, 51 aa, Homo sapiens
  MAP TO AL132874.14; EXPRESSED IN PLACENTA, SIGNAL = 0.65; EXPRESSED IN FETAL LIVER, SIGNAL = 0.88; EXPRESSED IN BRAIN, SIGNAL = 0.83; EXPRESSED IN LUNG, SIGNAL = 0.87; EXPRESSED IN ADULT LIVER, SIGNAL = 0.9; EXPRESSED IN BONE MARROW, SIGNAL = 0.94; SWISSPROT HIT: P32447, EVALUE 5.00e-14; EST_HUMAN HIT: AI762132.1, EVALUE 4.00e-23
ADAPNPGLIPDADAVGVTVVLITCTYRGQEFIRVGYYVNNEYTETELRENH

SEQ ID NO: 45338 - protein, 41 aa, Homo sapiens
  MAP TO AC020919.3; EXPRESSED IN LUNG, SIGNAL = 1.2; EXPRESSED IN PLACENTA, SIGNAL = 1.1; EXPRESSED IN FETAL LIVER, SIGNAL = 1.2; EXPRESSED IN ADULT LIVER, SIGNAL = 1.3; EXPRESSED IN BRAIN, SIGNAL = 0.92; EXPRESSED IN BONE MARROW, SIGNAL = 0.91; SWISSPROT HIT: P03340, EVALUE 6.30e+00
RTNLSGIQCRQPRWLALCWGQWSGPGGSRAGRPPRRSLTCR

SEQ ID NO: 45339 - protein, 39 aa, Homo sapiens
  MAP TO AL050342.42; EXPRESSED IN PLACENTA, SIGNAL = 0.92; EXPRESSED IN FETAL LIVER, SIGNAL = 0.96; EXPRESSED IN BONE MARROW, SIGNAL = 0.99; EXPRESSED IN LUNG, SIGNAL = 0.97; EXPRESSED IN ADULT LIVER, SIGNAL = 1.1; EXPRESSED IN BRAIN, SIGNAL = 0.96; EST_HUMAN HIT: BF303666.1, EVALUE 7.20e+00
NLCSSRNFVPDDSLRTIYLLYALSPLISCGDLDGSRYLD

SEQ ID NO: 45340 - protein, 121 aa, Homo sapiens
  MAP TO AC024575.1; EXPRESSED IN ADULT LIVER, SIGNAL = 0.73; EXPRESSED IN BRAIN, SIGNAL = 0.66; EXPRESSED IN BONE MARROW, SIGNAL = 0.66; EXPRESSED IN PLACENTA, SIGNAL = 0.69; EXPRESSED IN FETAL LIVER, SIGNAL = 0.81; SWISSPROT HIT: P02969, EVALUE 3.40e+00; EST_HUMAN HIT: BE885128.1, EVALUE 2.00e-49
KIRFQYPPSTRELFRLLCSAHEAPGPAPSLLLLDGLEEYLAEDPEPQEAAYLIALLLDTAAHFSHRLGPGRDCGLMVALQTQEEAGSGDVLHLALLQRYFPAQCWLQPDAPGPGEHGLRAC

SEQ ID NO: 45341 - protein, 58 aa, Homo sapiens
  MAP TO AC024575.1; EXPRESSED IN ADULT LIVER, SIGNAL = 0.73; EXPRESSED IN BRAIN, SIGNAL = 0.66; EXPRESSED IN BONE MARROW, SIGNAL = 0.66; EXPRESSED IN PLACENTA, SIGNAL = 0.69; EXPRESSED IN FETAL LIVER, SIGNAL = 0.81; SWISSPROT HIT: Q04864, EVALUE 1.60e+00; EST_HUMAN HIT: AI264689.1, EVALUE 8.00e-32
QARRPCSPGPGASGCSQHWAGKYRWSSARCRTSPLPASSWVWRATMSPQSRPGPSRWL

SEQ ID NO: 45342 - protein, 32 aa, Homo sapiens
  MAP TO AC024972.2; EXPRESSED IN ADULT LIVER, SIGNAL = 0.87; EXPRESSED IN BRAIN, SIGNAL = 1.1; EXPRESSED IN BONE MARROW, SIGNAL = 0.82; EXPRESSED IN LUNG, SIGNAL =   1; EXPRESSED IN PLACENTA, SIGNAL = 0.94; EXPRESSED IN FETAL LIVER, SIGNAL = 0.96; SWISSPROT HIT: P17139, EVALUE 9.80e-01; EST_HUMAN HIT: BF115266.1, EVALUE 6.00e-11
RSSSASPLAACAGCAPSALCPRTSPSRRYGPW

SEQ ID NO: 45343 - protein, 31 aa, Homo sapiens
  MAP TO AC019141.3; EXPRESSED IN BRAIN, SIGNAL = 0.68; EXPRESSED IN LUNG, SIGNAL = 0.85; EXPRESSED IN PLACENTA, SIGNAL = 0.62; EXPRESSED IN ADULT LIVER, SIGNAL = 0.69; EXPRESSED IN BONE MARROW, SIGNAL = 0.76; EXPRESSED IN FETAL LIVER, SIGNAL = 0.65
ISAYRIAASAYSQLFSLTATSTIKDISQIPT

SEQ ID NO: 45344 - protein, 41 aa, Homo sapiens
  MAP TO AC011218.4; EXPRESSED IN PLACENTA, SIGNAL = 0.48; EXPRESSED IN BRAIN, SIGNAL = 0.6; EXPRESSED IN BONE MARROW, SIGNAL = 0.47; SWISSPROT HIT: Q46639, EVALUE 4.80e+00; EST_HUMAN HIT: AI160578.1, EVALUE 2.00e-16
IWWTLTNFGEIPGTIAFEMDEGTYIHALDNGLFTLGAPHSE

SEQ ID NO: 45345 - protein, 51 aa, Homo sapiens
  MAP TO AC022542.3; EXPRESSED IN LUNG, SIGNAL =   1; EXPRESSED IN ADULT LIVER, SIGNAL =   1; EXPRESSED IN FETAL LIVER, SIGNAL = 0.92; EXPRESSED IN BRAIN, SIGNAL =   1; EXPRESSED IN BONE MARROW, SIGNAL = 0.93; EXPRESSED IN PLACENTA, SIGNAL = 1.1; SWISSPROT HIT: P11265, EVALUE 8.00e+00; EST_HUMAN HIT: BE548778.1, EVALUE 6.60e+00
NTRDSGPTVVRVAARKAFSTSSGGCSHSRASGNQGSLGEAVGDGWEQVERI

SEQ ID NO: 45346 - protein, 39 aa, Homo sapiens
  MAP TO AC022542.3; EXPRESSED IN LUNG, SIGNAL =   1; EXPRESSED IN ADULT LIVER, SIGNAL =   1; EXPRESSED IN FETAL LIVER, SIGNAL = 0.92; EXPRESSED IN BRAIN, SIGNAL =   1; EXPRESSED IN BONE MARROW, SIGNAL = 0.93; EXPRESSED IN PLACENTA, SIGNAL = 1.1
RFWSNCGSSGCKESIFNQQRRLQSFTSIRKSGEPRRGCG

SEQ ID NO: 45347 - protein, 50 aa, Homo sapiens
  MAP TO AP001432.1; EXPRESSED IN PLACENTA, SIGNAL = 0.59; EXPRESSED IN BRAIN, SIGNAL = 1.3; EXPRESSED IN BONE MARROW, SIGNAL = 0.57; EXPRESSED IN FETAL LIVER, SIGNAL = 0.71; SWISSPROT HIT: P53804, EVALUE 6.00e-23; EST_HUMAN HIT: AI078304.1, EVALUE 8.00e-22
GEISRIEKEHQVLQDQLQEVYENYEQIKLKGLEETRDLEEKLKRHLEENK

SEQ ID NO: 45348 - protein, 28 aa, Homo sapiens
  MAP TO AC010397.3; EXPRESSED IN PLACENTA, SIGNAL = 0.56; EXPRESSED IN FETAL LIVER, SIGNAL = 0.74; EXPRESSED IN BONE MARROW, SIGNAL = 0.72; EXPRESSED IN ADULT LIVER, SIGNAL = 0.62; EXPRESSED IN BRAIN, SIGNAL = 0.52; EST_HUMAN HIT: BE887580.1, EVALUE 6.00e-09
REVYSILQAEGILLPRYAILNRDPNNPK

SEQ ID NO: 45349 - protein, 19 aa, Homo sapiens
  MAP TO AC010397.3; EXPRESSED IN PLACENTA, SIGNAL = 0.56; EXPRESSED IN FETAL LIVER, SIGNAL = 0.74; EXPRESSED IN BONE MARROW, SIGNAL = 0.72; EXPRESSED IN ADULT LIVER, SIGNAL = 0.62; EXPRESSED IN BRAIN, SIGNAL = 0.52
EKYIVFFKLKVFYFLVMLF

SEQ ID NO: 45350 - protein, 19 aa, Homo sapiens
  MAP TO AC018529.4; EXPRESSED IN BRAIN, SIGNAL = 0.6; EXPRESSED IN BONE MARROW, SIGNAL = 0.65; EXPRESSED IN PLACENTA, SIGNAL = 0.47; EXPRESSED IN ADULT LIVER, SIGNAL = 0.58; EXPRESSED IN FETAL LIVER, SIGNAL = 0.5
GHCRRHMQMSLLAARLQRP

SEQ ID NO: 45351 - protein, 101 aa, Homo sapiens
  MAP TO AL121944.10; EXPRESSED IN LUNG, SIGNAL = 1.2; EXPRESSED IN FETAL LIVER, SIGNAL =   1; EXPRESSED IN PLACENTA, SIGNAL = 1.2; EXPRESSED IN ADULT LIVER, SIGNAL = 1.2; EXPRESSED IN BRAIN, SIGNAL = 0.96; EXPRESSED IN BONE MARROW, SIGNAL = 1.4; SWISSPROT HIT: O95371, EVALUE 1.00e-10; EST_HUMAN HIT: AI023490.1, EVALUE 3.00e-05
LCFTTSSIPQLLFNLGSPGKTISHTGCAIQLFMFLGLGGKSVFSWQPWPMTASLQSASPFTILSLCTLSCAGSWCLWPGGVGLLSSLVMSPVTMKLPRCGR

SEQ ID NO: 45352 - protein, 50 aa, Homo sapiens
  MAP TO AC015805.3; EXPRESSED IN ADULT LIVER, SIGNAL = 0.63; EXPRESSED IN BRAIN, SIGNAL = 0.66; EXPRESSED IN PLACENTA, SIGNAL = 0.57; EXPRESSED IN FETAL LIVER, SIGNAL = 0.59; EXPRESSED IN BONE MARROW, SIGNAL = 0.72; EST_HUMAN HIT: AV729327.1, EVALUE 3.00e-03; SWISSPROT HIT: Q27889, EVALUE 9.30e-01
PTARVSAAGSEAKTRGGSTTANNRRSQSFNNYDKSKPVTSPPPPPSSHEK

SEQ ID NO: 45353 - protein, 51 aa, Homo sapiens
  MAP TO AC015805.3; EXPRESSED IN ADULT LIVER, SIGNAL = 0.63; EXPRESSED IN BRAIN, SIGNAL = 0.66; EXPRESSED IN PLACENTA, SIGNAL = 0.57; EXPRESSED IN FETAL LIVER, SIGNAL = 0.59; EXPRESSED IN BONE MARROW, SIGNAL = 0.72
VLPRGYPLQAARPKHAEGQLLLTTDAARALTTMINPNQSPPHPHRQAATRK

SEQ ID NO: 45354 - protein, 21 aa, Homo sapiens
  MAP TO AC009874.5; EXPRESSED IN PLACENTA, SIGNAL = 0.64; EXPRESSED IN ADULT LIVER, SIGNAL = 0.57; EXPRESSED IN FETAL LIVER, SIGNAL = 0.74; EXPRESSED IN BRAIN, SIGNAL = 0.84; EXPRESSED IN BONE MARROW, SIGNAL = 0.7; SWISSPROT HIT: P28677, EVALUE 5.90e-01; EST_HUMAN HIT: AA018828.1, EVALUE 6.00e-05
KMDKNKDGVVTIDEFIESCQK

SEQ ID NO: 45355 - protein, 41 aa, Homo sapiens
  MAP TO AC007687.16; EXPRESSED IN BONE MARROW, SIGNAL = 0.57; EXPRESSED IN ADULT LIVER, SIGNAL = 0.73; EXPRESSED IN BRAIN, SIGNAL = 0.79; EXPRESSED IN PLACENTA, SIGNAL = 0.74; EXPRESSED IN FETAL LIVER, SIGNAL = 0.6; SWISSPROT HIT: Q92995, EVALUE 2.00e-18; EST_HUMAN HIT: AA311884.1, EVALUE 2.00e-17
RNRIGSENPSDVFRFLVEERIQCCQTRKVRYTERVDYLMQL

SEQ ID NO: 45356 - protein, 37 aa, Homo sapiens
  MAP TO AC007687.16; EXPRESSED IN BONE MARROW, SIGNAL = 0.57; EXPRESSED IN ADULT LIVER, SIGNAL = 0.73; EXPRESSED IN BRAIN, SIGNAL = 0.79; EXPRESSED IN PLACENTA, SIGNAL = 0.74; EXPRESSED IN FETAL LIVER, SIGNAL = 0.6; EST_HUMAN HIT: AW958624.1, EVALUE 1.00e-15
GTASAQKTQAMFFVFWWKNAFSAVRPGKSATRRGWIT

SEQ ID NO: 45357 - protein, 22 aa, Homo sapiens
  MAP TO AC022204.3; EXPRESSED IN PLACENTA, SIGNAL = 1.3; EXPRESSED IN ADULT LIVER, SIGNAL = 1.2; EXPRESSED IN FETAL LIVER, SIGNAL = 1.1; EXPRESSED IN BRAIN, SIGNAL = 1.1; EXPRESSED IN BONE MARROW, SIGNAL = 1.2; EXPRESSED IN LUNG, SIGNAL = 1.1; EST_HUMAN HIT: AA149457.1, EVALUE 1.00e-04
PCWLQIGWCPPSLRMGLPLPIH

SEQ ID NO: 45358 - protein, 33 aa, Homo sapiens [sequence omitted]

SEQ ID NO: 45359 - protein, 71 aa, Homo sapiens
  MAP TO AC013771.3; EXPRESSED IN PLACENTA, SIGNAL = 0.81; EXPRESSED IN ADULT LIVER, SIGNAL = 0.77; EXPRESSED IN BRAIN, SIGNAL = 0.62; EXPRESSED IN FETAL LIVER, SIGNAL = 0.6; EXPRESSED IN BONE MARROW, SIGNAL = 0.82; EST_HUMAN HIT: AA457673.1, EVALUE 2.00e-06; SWISSPROT HIT: P19967, EVALUE 5.30e+00
LGWEKSYYSCGFSRVTRPAARASSVNWNSSGYHCWVFQLTPLRSWCSRALSTPCSGRSPCIFSSCSPGSTA

SEQ ID NO: 45360 - protein, 60 aa, Homo sapiens
  MAP TO AC013626.3; EXPRESSED IN ADULT LIVER, SIGNAL = 1.1; EXPRESSED IN BONE MARROW, SIGNAL = 1.2; EXPRESSED IN BRAIN, SIGNAL = 1.1; EXPRESSED IN LUNG, SIGNAL = 1.2; EXPRESSED IN PLACENTA, SIGNAL = 1.3; EXPRESSED IN FETAL LIVER, SIGNAL = 1.2; EST_HUMAN HIT: F06450.1, EVALUE 4.00e-26; SWISSPROT HIT: P36607, EVALUE 1.00e-08
ASGFVFTRLDGSMAQKKRVESIQCFQNTEAGSPTIMLLSLKAGGVGLNLSAASRVFLMDP

SEQ ID NO: 45361 - protein, 34 aa, Homo sapiens
  MAP TO AC013626.3; EXPRESSED IN ADULT LIVER, SIGNAL = 1.1; EXPRESSED IN BONE MARROW, SIGNAL = 1.2; EXPRESSED IN BRAIN, SIGNAL = 1.1; EXPRESSED IN LUNG, SIGNAL = 1.2; EXPRESSED IN PLACENTA, SIGNAL = 1.3; EXPRESSED IN FETAL LIVER, SIGNAL = 1.2; EST_HUMAN HIT: F05282.1, EVALUE 8.00e-14
PLDLCLLVWMVPWPKRKELNQFSVFKTLKQDLQL

SEQ ID NO: 45362 - protein, 48 aa, Homo sapiens
  MAP TO AC023134.3; EXPRESSED IN ADULT LIVER, SIGNAL = 0.71; EXPRESSED IN BRAIN, SIGNAL = 0.6; EXPRESSED IN PLACENTA, SIGNAL = 0.61; EXPRESSED IN FETAL LIVER, SIGNAL = 0.61; EXPRESSED IN BONE MARROW, SIGNAL = 0.64; EST_HUMAN HIT: BE748849.1, EVALUE 6.00e-20; SWISSPROT HIT: P27692, EVALUE 1.60e+00
AVSKDDSIISSLDVTDIAPSRKRRQRMQRNLGTEPKMAPQENQLQEKE

SEQ ID NO: 45363 - protein, 48 aa, Homo sapiens
  MAP TO AC013591.3; EXPRESSED IN ADULT LIVER, SIGNAL = 0.69; EXPRESSED IN BONE MARROW, SIGNAL = 0.62; EXPRESSED IN PLACENTA, SIGNAL = 0.58; EXPRESSED IN FETAL LIVER, SIGNAL = 0.6; EXPRESSED IN BRAIN, SIGNAL = 0.68
KRRKTRWKPRRPWGLMSEQARGHLHPCNVQRKLHSQSQGQRMWTNTQR

SEQ ID NO: 45364 - protein, 78 aa, Homo sapiens
  MAP TO AC019233.3; EXPRESSED IN PLACENTA, SIGNAL = 1.1; EXPRESSED IN FETAL LIVER, SIGNAL = 1.1; EXPRESSED IN BRAIN, SIGNAL = 1.1; EXPRESSED IN LUNG, SIGNAL = 1.1; EXPRESSED IN ADULT LIVER, SIGNAL = 1.5; EXPRESSED IN BONE MARROW, SIGNAL = 1.2; SWISSPROT HIT: Q64689, EVALUE 1.90e+00; EST_HUMAN HIT: AW845035.1, EVALUE 6.00e+00
EVDGTHYVFSSGFYEFGLTHQFRCYLQNISPKIMNHDVVLQGSNNLINCLQLISQKAASLSLKKMTKLWMRFHFRGLE

SEQ ID NO: 45365 - protein, 130 aa, Homo sapiens
  MAP TO AL121914.16; EXPRESSED IN BONE MARROW, SIGNAL = 0.86; EXPRESSED IN FETAL LIVER, SIGNAL = 0.98; EXPRESSED IN PLACENTA, SIGNAL = 0.49; EXPRESSED IN ADULT LIVER, SIGNAL = 0.72; EXPRESSED IN BRAIN, SIGNAL = 0.88; EST_HUMAN HIT: BF034377.1, EVALUE 9.00e-72; SWISSPROT HIT: Q05048, EVALUE 4.00e-74
EAEMLRSISFHPSGDFILVGTQHPTLRLYDINTFQCFVSCNPQDQHTDAICSVNYNSSANMYVTGSKDGCIKLWDGVSNRCITTFEKAHDGAEVCSAIFSKNSKYILSSGKDSVAKLWEISTGRTLVRYT

SEQ ID NO: 45366 - protein, 62 aa, Homo sapiens
  MAP TO AL121914.16; EXPRESSED IN BONE MARROW, SIGNAL = 0.86; EXPRESSED IN FETAL LIVER, SIGNAL = 0.98; EXPRESSED IN PLACENTA, SIGNAL = 0.49; EXPRESSED IN ADULT LIVER, SIGNAL = 0.72; EXPRESSED IN BRAIN, SIGNAL = 0.88; EST_HUMAN HIT: R28249.1, EVALUE 4.00e-28; SWISSPROT HIT: O21326, EVALUE 9.00e-01
KLKCYVPSLFILLETLYLSELSILLFAFMISTPFNVLSLAILKINTPMLYVPLITILVPICT

SEQ ID NO: 45367 - protein, 34 aa, Homo sapiens
  MAP TO AC018389.3; EXPRESSED IN PLACENTA, SIGNAL = 1.2; EXPRESSED IN FETAL LIVER, SIGNAL = 0.99; EXPRESSED IN BONE MARROW, SIGNAL = 0.98; EXPRESSED IN LUNG, SIGNAL = 1.1; EXPRESSED IN ADULT LIVER, SIGNAL = 1.3; EXPRESSED IN BRAIN, SIGNAL = 0.81
DFAMLESSLLEAYTSFRSPHCHFYHNIGTDLYFS

SEQ ID NO: 45368 - protein, 34 aa, Homo sapiens
  MAP TO AC018389.3; EXPRESSED IN PLACENTA, SIGNAL = 1.2; EXPRESSED IN FETAL LIVER, SIGNAL = 0.99; EXPRESSED IN BONE MARROW, SIGNAL = 0.98; EXPRESSED IN LUNG, SIGNAL = 1.1; EXPRESSED IN ADULT LIVER, SIGNAL = 1.3; EXPRESSED IN BRAIN, SIGNAL = 0.81; EST_HUMAN HIT: AW629001.1, EVALUE 4.40e+00
ILPCWRAACWKPTLLLEAHTVISTTTLEQIFISA

SEQ ID NO: 45369 - protein, 48 aa, Homo sapiens
  MAP TO AC016576.4; EXPRESSED IN PLACENTA, SIGNAL = 0.61; EXPRESSED IN FETAL LIVER, SIGNAL = 0.5; EXPRESSED IN ADULT LIVER, SIGNAL = 0.67; EXPRESSED IN BRAIN, SIGNAL = 0.55; EXPRESSED IN BONE MARROW, SIGNAL = 0.55; SWISSPROT HIT: Q39575, EVALUE 1.00e-06
IQQPMQLFQQHPAVLSTAEAKPIIRSYNRMAKVLLEFEVLFHRAWLRQ

SEQ ID NO: 45370 - protein, 49 aa, Homo sapiens
  MAP TO AP001439.1; EXPRESSED IN FETAL LIVER, SIGNAL = 0.61; EXPRESSED IN BRAIN, SIGNAL = 0.58; EXPRESSED IN PLACENTA, SIGNAL = 0.66; EXPRESSED IN BONE MARROW, SIGNAL = 0.66
VMKGITILHCSLGSLTVREVISCHVLRHLVLKPGKFLAKYTGSPYLTNQ

SEQ ID NO: 45371 - protein, 75 aa, Homo sapiens
  MAP TO AC013497.4; EXPRESSED IN LUNG, SIGNAL = 1.1; EXPRESSED IN FETAL LIVER, SIGNAL = 1.1; EXPRESSED IN BRAIN, SIGNAL = 0.96; EXPRESSED IN ADULT LIVER, SIGNAL = 1.2; EXPRESSED IN PLACENTA, SIGNAL = 1.1; EXPRESSED IN BONE MARROW, SIGNAL = 0.93; EST_HUMAN HIT: AI565996.1, EVALUE 2.00e-40; SWISSPROT HIT: P98063, EVALUE 1.00e-09
DGCGHTVLGPESGTLTSINYPQTYPNSTVCEWEIRVKMGERVRIKFGDFDIEDSDSCHFNYLRIYNGIGVSRTEI

SEQ ID NO: 45372 - protein, 166 aa, Homo sapiens
  MAP TO AC010876.2; EXPRESSED IN PLACENTA, SIGNAL = 0.58; EXPRESSED IN FETAL LIVER, SIGNAL = 0.53; EXPRESSED IN BONE MARROW, SIGNAL = 0.53; EXPRESSED IN BRAIN, SIGNAL = 0.5; EST_HUMAN HIT: AI906351.1, EVALUE 1.00e-42; SWISSPROT HIT: P14294, EVALUE 2.20e+00
MSNGYSTDENFRYLISCFRARVKMYIQVEPVLDYLTFLPAEVKEQIQRTVATSGNMQAVELLLSTLEKGVWHLGWTREFVEALRRTGSPLAARYMNPELTDLPSPSFENAHDEYLQLLNLLQPTLVDKLLVRDVLDKCMEEELLTIEDRNRVGVCSDGASLLGRFC

SEQ ID NO: 45373 - protein, 100 aa, Homo sapiens
  MAP TO AC010492.4; EXPRESSED IN PLACENTA, SIGNAL = 0.77; EXPRESSED IN ADULT LIVER, SIGNAL = 0.79; EXPRESSED IN FETAL LIVER, SIGNAL = 1.5; EXPRESSED IN BONE MARROW, SIGNAL = 3.7; EXPRESSED IN BRAIN, SIGNAL = 0.81; EXPRESSED IN LUNG, SIGNAL =   1; SWISSPROT HIT: P43630, EVALUE 2.00e-13; EST_HUMAN HIT: AU120189.1, EVALUE 2.00e-27
LIPDIPALSVQPGPKVASGENVTLLCQSWHQIDTFFLTKEGAAHPPLCLKSKYQSYRHQAEFSMSPVTSAQGGTYRCYSAIRSYPYLLSSPSYPQELVVS

SEQ ID NO: 45374 - protein, 60 aa, Homo sapiens
  MAP TO AC010492.4; EXPRESSED IN PLACENTA, SIGNAL = 0.77; EXPRESSED IN ADULT LIVER, SIGNAL = 0.79; EXPRESSED IN FETAL LIVER, SIGNAL = 1.5; EXPRESSED IN BONE MARROW, SIGNAL = 3.7; EXPRESSED IN BRAIN, SIGNAL = 0.81; EXPRESSED IN LUNG, SIGNAL =   1; SWISSPROT HIT: P53781, EVALUE 4.00e-01; EST_HUMAN HIT: AV653757.1, EVALUE 6.00e-13
PRVEPTDATAQSGPTPTCCPALVTPRSSWSQVRALTLSCPSSKAQLRPCPQESSGLGWSR

SEQ ID NO: 45375 - protein, 65 aa, Homo sapiens
  MAP TO AC022045.2; EXPRESSED IN ADULT LIVER, SIGNAL = 0.88; EXPRESSED IN LUNG, SIGNAL = 1.1; EXPRESSED IN BRAIN, SIGNAL = 0.95; EXPRESSED IN BONE MARROW, SIGNAL =   1; EXPRESSED IN PLACENTA, SIGNAL = 0.99; EXPRESSED IN FETAL LIVER, SIGNAL = 0.88; SWISSPROT HIT: Q95223, EVALUE 2.00e-33; EST_HUMAN HIT: AU138564.1, EVALUE 2.00e-32
YVTLTCAFRYGREDLDVLGLTFRKDLFVANVQSFPPAPEDKKPLTRLQERLIKKLGEHAYPFTFE

SEQ ID NO: 45376 - protein, 38 aa, Homo sapiens
  MAP TO AC007957.34; EXPRESSED IN PLACENTA, SIGNAL = 0.85; EXPRESSED IN ADULT LIVER, SIGNAL = 0.63; EXPRESSED IN FETAL LIVER, SIGNAL = 0.9; EXPRESSED IN BRAIN, SIGNAL = 0.64; EXPRESSED IN BONE MARROW, SIGNAL = 0.91
ASEVPPFTVDASEVLLSAQTSLTPSYAHPTDDSQHIPS

SEQ ID NO: 45377 - protein, 31 aa, Homo sapiens
  MAP TO AP000432.4; EXPRESSED IN LUNG, SIGNAL = 1.1; EXPRESSED IN ADULT LIVER, SIGNAL = 0.98; EXPRESSED IN BRAIN, SIGNAL = 0.77; EXPRESSED IN PLACENTA, SIGNAL = 1.3; EXPRESSED IN FETAL LIVER, SIGNAL = 1.3; EXPRESSED IN BONE MARROW, SIGNAL = 0.76; EST_HUMAN HIT: H91423.1, EVALUE 8.00e-12; SWISSPROT HIT: Q14201, EVALUE 6.00e-13
CIRVNKFQRVDPDVLKACENSCILYSDLGLP

SEQ ID NO: 45378 - protein, 30 aa, Homo sapiens
  MAP TO AC010229.4; EXPRESSED IN PLACENTA, SIGNAL = 0.57; EXPRESSED IN ADULT LIVER, SIGNAL = 0.57; EXPRESSED IN FETAL LIVER, SIGNAL = 0.45; EXPRESSED IN BRAIN, SIGNAL = 0.49; EXPRESSED IN BONE MARROW, SIGNAL = 0.5
FEAVSVQDWSSHMKPTLRKYKVLSPILVIS

SEQ ID NO: 45379 - protein, 30 aa, Homo sapiens
  MAP TO AC010229.4; EXPRESSED IN PLACENTA, SIGNAL = 0.57; EXPRESSED IN ADULT LIVER, SIGNAL = 0.57; EXPRESSED IN FETAL LIVER, SIGNAL = 0.45; EXPRESSED IN BRAIN, SIGNAL = 0.49; EXPRESSED IN BONE MARROW, SIGNAL = 0.5
WILRGLGTTLCTSSELASCVSSSLAQKLLQ

SEQ ID NO: 45380 - protein, 34 aa, Homo sapiens
  MAP TO AC006054.2; EXPRESSED IN BONE MARROW, SIGNAL = 0.96; EXPRESSED IN PLACENTA, SIGNAL =   1; EXPRESSED IN ADULT LIVER, SIGNAL = 1.2; EXPRESSED IN BRAIN, SIGNAL = 0.96; EXPRESSED IN LUNG, SIGNAL = 1.1; EXPRESSED IN FETAL LIVER, SIGNAL = 1.1; SWISSPROT HIT: P29747, EVALUE 6.50e+00; EST_HUMAN HIT: AA633789.1, EVALUE 1.20e-02
RTSSKAMKGSMKKLKRKIKNFLNKQKWKCNIPES

SEQ ID NO: 45381 - protein, 40 aa, Homo sapiens
  MAP TO AL161722.2; EXPRESSED IN PLACENTA, SIGNAL = 0.87; EXPRESSED IN ADULT LIVER, SIGNAL = 0.57; EXPRESSED IN FETAL LIVER, SIGNAL = 0.49; EXPRESSED IN BRAIN, SIGNAL = 0.51; EXPRESSED IN BONE MARROW, SIGNAL = 0.54
GKPFPIAPWLFIDPIDLSRSILVVKPVFGKGNGDHKKQEP

SEQ ID NO: 45382 - protein, 49 aa, Homo sapiens
  MAP TO AC009699.6; EXPRESSED IN BONE MARROW, SIGNAL = 0.43; EXPRESSED IN BRAIN, SIGNAL = 0.5; SWISSPROT HIT: P38500, EVALUE 2.10e+00; EST_HUMAN HIT: BF108160.1, EVALUE 8.70e+00
IDMKAASQNGIQCKLLVMLLIDFLIVFFMRIPRRWFHLLLIPRQFFCVI

SEQ ID NO: 45383 - protein, 34 aa, Homo sapiens
  MAP TO AC024972.2; EXPRESSED IN PLACENTA, SIGNAL = 0.68; EXPRESSED IN FETAL LIVER, SIGNAL = 0.52; EXPRESSED IN BONE MARROW, SIGNAL = 0.52; EXPRESSED IN ADULT LIVER, SIGNAL = 0.6; EXPRESSED IN BRAIN, SIGNAL = 0.66; SWISSPROT HIT: Q04609, EVALUE 6.00e-09; EST_HUMAN HIT: AA487579.1, EVALUE 5.00e-14
IFKMSYLEPPPDGYENVTNIVPPYNAFSAQGMPE

SEQ ID NO: 45384 - protein, 33 aa, Homo sapiens; identical to SEQ ID NO: 44988
  MAP TO AC024972.2; EXPRESSED IN PLACENTA, SIGNAL = 0.68; EXPRESSED IN FETAL LIVER, SIGNAL = 0.52; EXPRESSED IN BONE MARROW, SIGNAL = 0.52; EXPRESSED IN ADULT LIVER, SIGNAL = 0.6; EXPRESSED IN BRAIN, SIGNAL = 0.66; EST_HUMAN HIT: AA487579.1, EVALUE 6.00e-14

SEQ ID NO: 45385 - protein, 118 aa, Homo sapiens
  MAP TO AC005481.3; EXPRESSED IN PLACENTA, SIGNAL = 0.47; EXPRESSED IN BONE MARROW, SIGNAL = 0.59; EXPRESSED IN BRAIN, SIGNAL = 0.45; EST_HUMAN HIT: AI133461.1, EVALUE 4.00e-04; SWISSPROT HIT: P36170, EVALUE 7.00e-06
LCTRCTHLRSVSHGPSVQARLCTRCTHLRSVSHGPSVQARLCTHCTHQRSVSHRLSVQARLCTHCTHQRSVSHRLSVQARLCTHCTHQRSVSHRLSVQARLCTRCTHLRSVSHGPSVQ

SEQ ID NO: 45386 - protein, 33 aa, Homo sapiens
  MAP TO AL139824.7; EXPRESSED IN BONE MARROW, SIGNAL = 0.51; EXPRESSED IN ADULT LIVER, SIGNAL = 0.61; EXPRESSED IN PLACENTA, SIGNAL = 0.54; EXPRESSED IN FETAL LIVER, SIGNAL = 0.56; EXPRESSED IN BRAIN, SIGNAL = 0.5
PGPICTQKLLCFIFIVITSTSITTTTTTTSTSL

SEQ ID NO: 45387 - protein, 77 aa, Homo sapiens
  MAP TO AL109930.5; EXPRESSED IN PLACENTA, SIGNAL = 0.66; EXPRESSED IN FETAL LIVER, SIGNAL = 0.6; EXPRESSED IN BONE MARROW, SIGNAL = 0.59; EXPRESSED IN ADULT LIVER, SIGNAL = 0.7; EXPRESSED IN BRAIN, SIGNAL = 0.57; SWISSPROT HIT: P21513, EVALUE 3.70e+00
MGLNPFLDYHREFHGFLPHSQQFPQNFPQRFANIGQNRVLGHPHVLSAVLLNPDVDKLKKWLQPGIIAPHSYQAEWQ

SEQ ID NO: 45388 - protein, 39 aa, Homo sapiens
  MAP TO AL109930.5; EXPRESSED IN PLACENTA, SIGNAL = 0.66; EXPRESSED IN FETAL LIVER, SIGNAL = 0.6; EXPRESSED IN BONE MARROW, SIGNAL = 0.59; EXPRESSED IN ADULT LIVER, SIGNAL = 0.7; EXPRESSED IN BRAIN, SIGNAL = 0.57
WVSIRFWIIIENFMAFSLTPSNSHKIFLNALLTSGKTEC

SEQ ID NO: 45389 - protein, 40 aa, Homo sapiens
  MAP TO AP001427.1; EXPRESSED IN ADULT LIVER, SIGNAL = 0.77; EXPRESSED IN BRAIN, SIGNAL = 0.75; EXPRESSED IN PLACENTA, SIGNAL = 0.55; EXPRESSED IN FETAL LIVER, SIGNAL = 0.71; EXPRESSED IN BONE MARROW, SIGNAL = 0.61; SWISSPROT HIT: O15016, EVALUE 3.70e+00; EST_HUMAN HIT: BF525926.1, EVALUE 2.40e+00
MLLRGCQRNMSRFSPSLHCCIECPHIHSFHGHRRPPRGST

SEQ ID NO: 45390 - protein, 43 aa, Homo sapiens
  MAP TO AL133174.9; EXPRESSED IN PLACENTA, SIGNAL = 0.55; EXPRESSED IN BONE MARROW, SIGNAL = 1.1; EXPRESSED IN ADULT LIVER, SIGNAL = 0.69; EXPRESSED IN FETAL LIVER, SIGNAL = 1.2; EXPRESSED IN BRAIN, SIGNAL = 0.83; SWISSPROT HIT: P55060, EVALUE 2.00e-19; EST_HUMAN HIT: AU139714.1, EVALUE 2.00e-18
LVSNAIQFLASVCERPHYKNLFEDQNTLTSICEKVIVPNMEFR

SEQ ID NO: 45391 - protein, 42 aa, Homo sapiens
  MAP TO AL121673.27; EXPRESSED IN ADULT LIVER, SIGNAL = 0.68; EXPRESSED IN PLACENTA, SIGNAL = 0.75; EXPRESSED IN FETAL LIVER, SIGNAL = 1.1; EXPRESSED IN BRAIN, SIGNAL = 0.68; EXPRESSED IN BONE MARROW, SIGNAL = 0.76; SWISSPROT HIT: Q03567, EVALUE 1.00e-05; EST_HUMAN HIT: BE867793.1, EVALUE 1.00e-19
MPICTVSMSQDFGWNKKEAGIVLSSFFWGYCLTQVVGGHLGD

SEQ ID NO: 45392 - protein, 30 aa, Homo sapiens
  MAP TO AL121673.27; EXPRESSED IN ADULT LIVER, SIGNAL = 0.68; EXPRESSED IN PLACENTA, SIGNAL = 0.75; EXPRESSED IN FETAL LIVER, SIGNAL = 1.1; EXPRESSED IN BRAIN, SIGNAL = 0.68; EXPRESSED IN BONE MARROW, SIGNAL = 0.76; EST_HUMAN HIT: AW501112.1, EVALUE 7.90e-02
PSARHGRGRCCWAHAFCTAPAPACPSAPSP

SEQ ID NO: 45393 - protein, 113 aa, Homo sapiens
  MAP TO AC011599.8; EXPRESSED IN BONE MARROW, SIGNAL = 1.1; EXPRESSED IN PLACENTA, SIGNAL = 0.91; EXPRESSED IN ADULT LIVER, SIGNAL = 1.1; EXPRESSED IN FETAL LIVER, SIGNAL = 0.98; EXPRESSED IN BRAIN, SIGNAL = 0.94; EXPRESSED IN LUNG, SIGNAL = 0.91; EST_HUMAN HIT: BF674631.1, EVALUE 2.00e-06; SWISSPROT HIT: P10676, EVALUE 2.90e+00
LNTPKVGKLWPESQVQPAACFFKIKVYWNRATLIHLCIVNGFFHAMMMKLNSYNRHMTCKTYNINAHMQPFSEINEALLRQSYIGSNYPGKPPACSARHPMQEQNPNMGEDSD

SEQ ID NO: 45394 - protein, 52 aa, Homo sapiens
  MAP TO AL135938.5; EXPRESSED IN ADULT LIVER, SIGNAL = 0.91; EXPRESSED IN BONE MARROW, SIGNAL =   1; EXPRESSED IN PLACENTA, SIGNAL = 0.84; EXPRESSED IN FETAL LIVER, SIGNAL = 1.3; EXPRESSED IN BRAIN, SIGNAL = 0.96; EST_HUMAN HIT: AI707631.1, EVALUE 5.00e-24; SWISSPROT HIT: P08579, EVALUE 4.00e-25
FPGFKEVRLVPGRHDIAFVEFENDGQAGAARDALQGFKITPSHAMKITYAKK

SEQ ID NO: 45395 - protein, 44 aa, Homo sapiens
  MAP TO AL135938.5; EXPRESSED IN ADULT LIVER, SIGNAL = 0.91; EXPRESSED IN BONE MARROW, SIGNAL =   1; EXPRESSED IN PLACENTA, SIGNAL = 0.84; EXPRESSED IN FETAL LIVER, SIGNAL = 1.3; EXPRESSED IN BRAIN, SIGNAL = 0.96; EST_HUMAN HIT: AI970631.1, EVALUE 8.00e-07
SLASRKYVWYQGGMTLLLLNLKMMGRLELPGMLYRDLRSHRPML

SEQ ID NO: 45396 - protein, 22 aa, Homo sapiens
  MAP TO AL121935.12; EXPRESSED IN ADULT LIVER, SIGNAL = 0.75; EXPRESSED IN PLACENTA, SIGNAL = 0.66; EXPRESSED IN FETAL LIVER, SIGNAL = 0.72; EXPRESSED IN BRAIN, SIGNAL = 0.6; EXPRESSED IN BONE MARROW, SIGNAL = 0.8; SWISSPROT HIT: P32049, EVALUE 3.90e+00; EST_HUMAN HIT: AW977384.1, EVALUE 7.00e-05
AMLHVVVEVVHSKTPDGAIRMV

SEQ ID NO: 45397 - protein, 24 aa, Homo sapiens
  MAP TO AL121935.12; EXPRESSED IN ADULT LIVER, SIGNAL = 0.75; EXPRESSED IN PLACENTA, SIGNAL = 0.66; EXPRESSED IN FETAL LIVER, SIGNAL = 0.72; EXPRESSED IN BRAIN, SIGNAL = 0.6; EXPRESSED IN BONE MARROW, SIGNAL = 0.8; EST_HUMAN HIT: AW977384.1, EVALUE 1.00e-06
TMRMAPSGVLLCTTSTTTCNIASG

SEQ ID NO: 45398 - protein, 25 aa, Homo sapiens
  MAP TO AC020760.3; EXPRESSED IN BONE MARROW, SIGNAL = 0.54; EXPRESSED IN PLACENTA, SIGNAL = 0.64; EXPRESSED IN BRAIN, SIGNAL = 1.4; EXPRESSED IN FETAL LIVER, SIGNAL = 0.65; EST_HUMAN HIT: BE044761.1, EVALUE 3.00e-10
WNGIKWNGIEWNVIKWNGMECNGME

SEQ ID NO: 45399 - protein, 45 aa, Homo sapiens
  MAP TO AC009943.4; EXPRESSED IN BONE MARROW, SIGNAL = 0.58; EXPRESSED IN LUNG, SIGNAL = 0.83; EXPRESSED IN BRAIN, SIGNAL = 0.55; EXPRESSED IN PLACENTA, SIGNAL = 0.63; EXPRESSED IN ADULT LIVER, SIGNAL = 0.65; EXPRESSED IN FETAL LIVER, SIGNAL = 0.56; SWISSPROT HIT: Q02817, EVALUE 2.80e-02
KIQIFNASSSYLQVETYFHVKLQIQIVPVMQLYVSMPPNQFTDTV

SEQ ID NO: 45400 - protein, 42 aa, Homo sapiens
  MAP TO AC013726.3; EXPRESSED IN ADULT LIVER, SIGNAL = 0.62; EXPRESSED IN BRAIN, SIGNAL = 0.62; EXPRESSED IN PLACENTA, SIGNAL = 0.59; EXPRESSED IN FETAL LIVER, SIGNAL = 0.59; EXPRESSED IN BONE MARROW, SIGNAL = 0.7; SWISSPROT HIT: Q19124, EVALUE 1.70e-02; EST_HUMAN HIT: BE385946.1, EVALUE 2.00e-16
MELLGKITALDLNPERTELLSCSRDDLLKVIDLRTNAIKQTF

SEQ ID NO: 45401 - protein, 54 aa, Homo sapiens
  MAP TO AC010292.4; EXPRESSED IN BONE MARROW, SIGNAL = 0.97; EXPRESSED IN FETAL LIVER, SIGNAL = 0.99; EXPRESSED IN PLACENTA, SIGNAL = 0.71; EXPRESSED IN ADULT LIVER, SIGNAL = 0.98; EXPRESSED IN BRAIN, SIGNAL = 0.89; EST_HUMAN HIT: H50832.1, EVALUE 3.00e-07
MQSSQAQQWSFRLIHVAIGRLQVLDGCWPEASVPCHMDLTVGQFMIWQLTSLRA

SEQ ID NO: 45402 - protein, 40 aa, Homo sapiens
  MAP TO AC010292.4; EXPRESSED IN BONE MARROW, SIGNAL = 0.97; EXPRESSED IN FETAL LIVER, SIGNAL = 0.99; EXPRESSED IN PLACENTA, SIGNAL = 0.71; EXPRESSED IN ADULT LIVER, SIGNAL = 0.98; EXPRESSED IN BRAIN, SIGNAL = 0.89; EST_HUMAN HIT: AV702428.1, EVALUE 2.00e-03
CSHLRLNSGLSDSFMWPLAGFRSSMAVGQRHQFPATWISL

SEQ ID NO: 45403 - protein, 162 aa, Homo sapiens; identical to SEQ ID NO: 36662
  MAP TO AL109752.13; EXPRESSED IN PLACENTA, SIGNAL = 0.54; EXPRESSED IN FETAL LIVER, SIGNAL = 0.68; EXPRESSED IN BRAIN, SIGNAL = 0.52; EXPRESSED IN BONE MARROW, SIGNAL = 0.55; EST_HUMAN HIT: BF685404.1, EVALUE 1.00e-42; SWISSPROT HIT: Q60698, EVALUE 1.00e-04

SEQ ID NO: 45404 - protein, 39 aa, Homo sapiens; identical to SEQ ID NO: 36663
  MAP TO AL109752.13; EXPRESSED IN PLACENTA, SIGNAL = 0.54; EXPRESSED IN FETAL LIVER, SIGNAL = 0.68; EXPRESSED IN BRAIN, SIGNAL = 0.52; EXPRESSED IN BONE MARROW, SIGNAL = 0.55

SEQ ID NO: 45405 - protein, 19 aa, Homo sapiens
  MAP TO AP000431.3; EXPRESSED IN PLACENTA, SIGNAL = 0.61; EXPRESSED IN ADULT LIVER, SIGNAL = 0.53; EXPRESSED IN BRAIN, SIGNAL = 0.57; EXPRESSED IN BONE MARROW, SIGNAL = 0.52; EXPRESSED IN FETAL LIVER, SIGNAL = 0.63
KSMVIPWKVDNETQWTRAR

SEQ ID NO: 45406 - protein, 24 aa, Homo sapiens
  MAP TO AC007164.3; EXPRESSED IN PLACENTA, SIGNAL =   1; EXPRESSED IN ADULT LIVER, SIGNAL = 0.59; EXPRESSED IN FETAL LIVER, SIGNAL = 0.93; EXPRESSED IN BRAIN, SIGNAL = 0.82; EXPRESSED IN BONE MARROW, SIGNAL = 0.89
TIHFSEEVAFLKVEGSGEPVKGGG

SEQ ID NO: 45407 - protein, 57 aa, Homo sapiens
  MAP TO AL137225.7; EXPRESSED IN BONE MARROW, SIGNAL = 0.69; EXPRESSED IN ADULT LIVER, SIGNAL = 6.7; EXPRESSED IN FETAL LIVER, SIGNAL = 0.66; EXPRESSED IN BRAIN, SIGNAL = 0.75; EXPRESSED IN PLACENTA, SIGNAL = 1.3; SWISSPROT HIT: P45763, EVALUE 6.00e+00
VFQQYPESCPLIIRIQVLNPPSVMLQKDKALVKVLATAEVMVSQPKDLETTICLIDV

SEQ ID NO: 45408 - protein, 17 aa, Homo sapiens
  MAP TO AL137225.7; EXPRESSED IN BONE MARROW, SIGNAL = 0.69; EXPRESSED IN ADULT LIVER, SIGNAL = 6.7; EXPRESSED IN FETAL LIVER, SIGNAL = 0.66; EXPRESSED IN BRAIN, SIGNAL = 0.75; EXPRESSED IN PLACENTA, SIGNAL = 1.3
CSSSTPSPAHLSSGSRC

SEQ ID NO: 45409 - protein, 121 aa, Homo sapiens
  MAP TO AF241728.1; EXPRESSED IN LUNG, SIGNAL = 1.1; EXPRESSED IN PLACENTA, SIGNAL = 0.95; EXPRESSED IN ADULT LIVER, SIGNAL = 1.1; EXPRESSED IN BRAIN, SIGNAL = 0.94; EXPRESSED IN FETAL LIVER, SIGNAL = 1.1; EXPRESSED IN BONE MARROW, SIGNAL = 0.95; EST_HUMAN HIT: AA570056.1, EVALUE 1.80e-01; SWISSPROT HIT: P15272, EVALUE 1.60e-01
GLEKSSLFVQLAEKDASTFLEHQSAENSSLWELVPHVGGLSPFPEQPGHRHKQHEAPQSSYPSARGLGFAFYHDDHVLPLHIPLTSPQPAVASVRLCIGESQGWLLTHLLSLLQNAHLRVG

SEQ ID NO: 45410 - protein, 34 aa, Homo sapiens
  MAP TO AF241728.1; EXPRESSED IN LUNG, SIGNAL = 1.1; EXPRESSED IN PLACENTA, SIGNAL = 0.95; EXPRESSED IN ADULT LIVER, SIGNAL = 1.1; EXPRESSED IN BRAIN, SIGNAL = 0.94; EXPRESSED IN FETAL LIVER, SIGNAL = 1.1; EXPRESSED IN BONE MARROW, SIGNAL = 0.95
AYLSNWRRRMHRLSWSTSLQRTAACGNWFLTLGA

SEQ ID NO: 45411 - protein, 140 aa, Homo sapiens
  MAP TO AL161670.1; EXPRESSED IN PLACENTA, SIGNAL = 1.5; EXPRESSED IN FETAL LIVER, SIGNAL = 0.76; EXPRESSED IN BONE MARROW, SIGNAL = 0.61; EXPRESSED IN ADULT LIVER, SIGNAL = 1.1; EXPRESSED IN BRAIN, SIGNAL =   1; EST_HUMAN HIT: AV701829.1, EVALUE 3.00e-75; SWISSPROT HIT: P31602, EVALUE 2.10e-01
DIIAGFLYTILILAVFYPFVDLIDNFNQTHKYAPFIIIGLHLALGIFSFTLDTWSTSRGDTAEILGSGAGIACGSHVTYNMGLVLDPSLDTLPLAGPPITVTLFGKAILRILIGMVFVLIIRDVMKKITIPLACKIFNIP

SEQ ID NO: 45412 - protein, 74 aa, Homo sapiens
  MAP TO AL121586.28; EXPRESSED IN ADULT LIVER, SIGNAL = 0.66; EXPRESSED IN FETAL LIVER, SIGNAL = 1.1; EXPRESSED IN BRAIN, SIGNAL = 0.52; EXPRESSED IN BONE MARROW, SIGNAL = 0.66; EST_HUMAN HIT: AW362335.1, EVALUE 1.00e-28; SWISSPROT HIT: P50468, EVALUE 3.00e-04
LEEENQSVCSRMEAAEQARNALQVDLAEAEKRREALWEKNTHLEAQLQKAEEAGAELQADLRDIQEEKEEIQKK

SEQ ID NO: 45413 - protein, 63 aa, Homo sapiens
  MAP TO AL121586.28; EXPRESSED IN ADULT LIVER, SIGNAL = 0.66; EXPRESSED IN FETAL LIVER, SIGNAL = 1.1; EXPRESSED IN BRAIN, SIGNAL = 0.52; EXPRESSED IN BONE MARROW, SIGNAL = 0.66; EST_HUMAN HIT: AW362335.1, EVALUE 1.00e-15; SWISSPROT HIT: P07526, EVALUE 4.00e+00
VFDACTPFPFWPVVRGGEPVCVQQNGGRRAGEKCFAGRPGGGREEEGSPVGKEHSPGGSAAES

SEQ ID NO: 45414 - protein, 34 aa, Homo sapiens
  MAP TO AC016498.4; EXPRESSED IN PLACENTA, SIGNAL = 0.5; EXPRESSED IN FETAL LIVER, SIGNAL = 0.65; EXPRESSED IN BRAIN, SIGNAL = 0.62; EXPRESSED IN ADULT LIVER, SIGNAL = 0.74; EXPRESSED IN BONE MARROW, SIGNAL = 0.63
TGHDPSTLLGGLGDSRPISGKALCVFPSHLLQGF

SEQ ID NO: 45415 - protein, 85 aa, Homo sapiens
  MAP TO AC012662.5; EXPRESSED IN BRAIN, SIGNAL = 0.45; EXPRESSED IN FETAL LIVER, SIGNAL = 0.45; EST_HUMAN HIT: BF663308.1, EVALUE 7.00e-14; SWISSPROT HIT: P33750, EVALUE 4.00e-03
  unsure 43
DMTEVVHIKDRKEVIHEMKFSPDGSYLAVGSNDGPVDVYAVAXRYKKIGECSKSLSFITHIDWSLDSKYLQTNDGAGERLFYRMP

SEQ ID NO: 45416 - protein, 27 aa, Homo sapiens
  MAP TO AL158049.2; EXPRESSED IN BRAIN, SIGNAL = 0.48; EXPRESSED IN PLACENTA, SIGNAL = 0.51; EST_HUMAN HIT: BF512807.1, EVALUE 1.00e-10
QQILIVPCIQLSSLRWSCPRGFCWMQC

SEQ ID NO: 45417 - protein, 71 aa, Homo sapiens; identical to SEQ ID NO: 33789
  MAP TO AL138796.2; EXPRESSED IN LUNG, SIGNAL = 1.4; EXPRESSED IN PLACENTA, SIGNAL = 1.1; EXPRESSED IN FETAL LIVER, SIGNAL = 1.6; EXPRESSED IN BRAIN, SIGNAL = 1.5; EXPRESSED IN BONE MARROW, SIGNAL = 2.3; EXPRESSED IN ADULT LIVER, SIGNAL = 1.2; EST_HUMAN HIT: AW160820.1, EVALUE 2.00e-34; SWISSPROT HIT: P13654, EVALUE 1.50e-02

SEQ ID NO: 45418 - protein, 46 aa, Homo sapiens
  MAP TO AC006457.3; EXPRESSED IN PLACENTA, SIGNAL = 0.54; EXPRESSED IN BRAIN, SIGNAL = 0.48; EXPRESSED IN BONE MARROW, SIGNAL = 0.46; EST_HUMAN HIT: BF678448.1, EVALUE 9.00e+00
APAHRRLCFPNLWPLGEEGAAAELGSPFQEHTQGRAPLPGRGGLLR

SEQ ID NO: 45419 - protein, 75 aa, Homo sapiens
  MAP TO AC006457.3; EXPRESSED IN PLACENTA, SIGNAL = 0.54; EXPRESSED IN BRAIN, SIGNAL = 0.48; EXPRESSED IN BONE MARROW, SIGNAL = 0.46; SWISSPROT HIT: Q07851, EVALUE 2.70e+00; EST_HUMAN HIT: BE874782.1, EVALUE 1.60e-01
ADLLPVPPGEPGDPGDRHPRPTPTPSSLCAGSSTPMLSESMAPGRGRGSSRTGQPFSRTHPRPCSSPWPRRTTEG

SEQ ID NO: 45420 - protein, 45 aa, Homo sapiens
  MAP TO AP001436.1; EXPRESSED IN PLACENTA, SIGNAL = 0.68; EXPRESSED IN ADULT LIVER, SIGNAL = 0.67; EXPRESSED IN FETAL LIVER, SIGNAL = 0.87; EXPRESSED IN BRAIN, SIGNAL = 0.72; EXPRESSED IN BONE MARROW, SIGNAL = 0.85
RMQMQIHMQMISSPHGLWPLLPVQEKWMLAALLLQAGAALAASWQ

SEQ ID NO: 45421 - protein, 96 aa, Homo sapiens
  MAP TO AP001424.1; EXPRESSED IN PLACENTA, SIGNAL = 0.59; EXPRESSED IN ADULT LIVER, SIGNAL = 0.64; EXPRESSED IN FETAL LIVER, SIGNAL = 0.75; EXPRESSED IN BRAIN, SIGNAL = 0.69; EXPRESSED IN BONE MARROW, SIGNAL = 0.73; EST_HUMAN HIT: BE271455.1, EVALUE 8.30e+00
GLCPSAWFHFFPQHQTAANIPGQLWGSYKLGAVPENPLSSLLLKPLNGYGLLFYAGNYLSKETPSVFLLSIERHIFVERMLYIGVYGFVGACSHRQ

SEQ ID NO: 45422 - protein, 43 aa, Homo sapiens
  MAP TO AP001424.1; EXPRESSED IN PLACENTA, SIGNAL = 0.59; EXPRESSED IN ADULT LIVER, SIGNAL = 0.64; EXPRESSED IN FETAL LIVER, SIGNAL = 0.75; EXPRESSED IN BRAIN, SIGNAL = 0.69; EXPRESSED IN BONE MARROW, SIGNAL = 0.73; SWISSPROT HIT: P35824, EVALUE 6.30e+00
QGCAQVPGSIFSPNTRQQPISQDSSGAPTSWELFLKTHSALCS

SEQ ID NO: 45423 - protein, 47 aa, Homo sapiens
  MAP TO AC013698.3; EXPRESSED IN ADULT LIVER, SIGNAL =   2; EXPRESSED IN BRAIN, SIGNAL = 0.54; EXPRESSED IN PLACENTA, SIGNAL = 0.58; EXPRESSED IN FETAL LIVER, SIGNAL = 0.82; EXPRESSED IN BONE MARROW, SIGNAL = 0.54; EST_HUMAN HIT: AU118232.1, EVALUE 4.00e-20; SWISSPROT HIT: Q52995, EVALUE 3.00e-03
RMSKHTDAAEEVLLEKKGCTGVITLNRPKFLNALTLNMIRQIYPQLK

SEQ ID NO: 45424 - protein, 22 aa, Homo sapiens
  MAP TO AC013698.3; EXPRESSED IN ADULT LIVER, SIGNAL =   2; EXPRESSED IN BRAIN, SIGNAL = 0.54; EXPRESSED IN PLACENTA, SIGNAL = 0.58; EXPRESSED IN FETAL LIVER, SIGNAL = 0.82; EXPRESSED IN BONE MARROW, SIGNAL = 0.54; EST_HUMAN HIT: R20241.1, EVALUE 1.00e-06
ECPSTQMQQKRCYWKKKVARES

SEQ ID NO: 45425 - protein, 55 aa, Homo sapiens [sequence omitted]

SEQ ID NO: 45426 - protein, 28 aa, Homo sapiens
  MAP TO AC022664.2; EXPRESSED IN PLACENTA, SIGNAL =   1; EXPRESSED IN ADULT LIVER, SIGNAL = 0.96; EXPRESSED IN FETAL LIVER, SIGNAL = 0.95; EXPRESSED IN BRAIN, SIGNAL = 0.91; EXPRESSED IN BONE MARROW, SIGNAL = 0.81; EXPRESSED IN LUNG, SIGNAL = 0.9
IMAEPIINGKDFKRIAKIAEPIRTYPLG

SEQ ID NO: 45427 - protein, 28 aa, Homo sapiens
  MAP TO AC022664.2; EXPRESSED IN PLACENTA, SIGNAL =   1; EXPRESSED IN ADULT LIVER, SIGNAL = 0.96; EXPRESSED IN FETAL LIVER, SIGNAL = 0.95; EXPRESSED IN BRAIN, SIGNAL = 0.91; EXPRESSED IN BONE MARROW, SIGNAL = 0.81; EXPRESSED IN LUNG, SIGNAL = 0.9
ESWLSPSSMARILKGLRKLLSQSGLILW

SEQ ID NO: 45428 - protein, 30 aa, Homo sapiens
  MAP TO AC013764.3; EXPRESSED IN FETAL LIVER, SIGNAL = 0.46; EXPRESSED IN BRAIN, SIGNAL = 0.47; EST_HUMAN HIT: AA398381.1, EVALUE 4.00e-11
RTFRKQMRTKKERNRSLCPLPLAPSLWQPL

SEQ ID NO: 45429 - protein, 43 aa, Homo sapiens
  MAP TO AC022036.3; EXPRESSED IN ADULT LIVER, SIGNAL = 0.56; EXPRESSED IN BRAIN, SIGNAL = 0.45; EXPRESSED IN BONE MARROW, SIGNAL = 0.53; EXPRESSED IN PLACENTA, SIGNAL = 0.6; EXPRESSED IN FETAL LIVER, SIGNAL = 0.49; EST_HUMAN HIT: AW818528.1, EVALUE 4.00e-03; SWISSPROT HIT: P38674, EVALUE 4.80e+00
LVAGKPKIKAPADLVADESMYLIESTFELHPYMVEGANKLSWA

SEQ ID NO: 45430 - protein, 34 aa, Homo sapiens
  MAP TO AL136171.3; EXPRESSED IN PLACENTA, SIGNAL = 0.69; EXPRESSED IN FETAL LIVER, SIGNAL = 0.61; EXPRESSED IN BONE MARROW, SIGNAL = 0.53; EXPRESSED IN ADULT LIVER, SIGNAL = 0.65; EXPRESSED IN BRAIN, SIGNAL = 0.6
VCMSEKFCSTLRKKVNDIETQLPALLEAKMHAIS

SEQ ID NO: 45431 - protein, 36 aa, Homo sapiens
  MAP TO AC013818.3; EXPRESSED IN ADULT LIVER, SIGNAL =   1; EXPRESSED IN BRAIN, SIGNAL = 0.8; EXPRESSED IN PLACENTA, SIGNAL = 0.84; EXPRESSED IN FETAL LIVER, SIGNAL = 0.83; EXPRESSED IN BONE MARROW, SIGNAL = 0.62; SWISSPROT HIT: P05310, EVALUE 8.40e+00; EST_HUMAN HIT: BE867794.1, EVALUE 3.00e-04
MSSHGGSSSKDVGGATHVRTTRFAENSLTIARTVPR

SEQ ID NO: 45432 - protein, 36 aa, Homo sapiens
  MAP TO AC013818.3; EXPRESSED IN ADULT LIVER, SIGNAL =   1; EXPRESSED IN BRAIN, SIGNAL = 0.8; EXPRESSED IN PLACENTA, SIGNAL = 0.84; EXPRESSED IN FETAL LIVER, SIGNAL = 0.83; EXPRESSED IN BONE MARROW, SIGNAL = 0.62; EST_HUMAN HIT: AA653363.1, EVALUE 9.00e-03
CLHMVGAVARMWEGLHMFEQPDLQRIHSLLQGQCQE

SEQ ID NO: 45433 - protein, 77 aa, Homo sapiens
  MAP TO AC009695.4; EXPRESSED IN ADULT LIVER, SIGNAL = 0.66; EXPRESSED IN BRAIN, SIGNAL = 0.58; EXPRESSED IN PLACENTA, SIGNAL = 0.65; EXPRESSED IN FETAL LIVER, SIGNAL = 0.59; EXPRESSED IN BONE MARROW, SIGNAL = 0.5; EST_HUMAN HIT: BF038076.1, EVALUE 1.20e-01; SWISSPROT HIT: Q90980, EVALUE 1.30e-01
FQEAPRYVAEDVEKKSKKEENMDPRKQGSRQENGKAKSSDDRKGESQMVALQRAQRAVPDGTGSMEHHRTIAIGGLV

SEQ ID NO: 45434 - protein, 48 aa, Homo sapiens
  MAP TO AC021786.2; EXPRESSED IN LUNG, SIGNAL =   1; EXPRESSED IN ADULT LIVER, SIGNAL = 1.2; EXPRESSED IN FETAL LIVER, SIGNAL = 1.1; EXPRESSED IN BRAIN, SIGNAL = 0.96; EXPRESSED IN BONE MARROW, SIGNAL =   1; EXPRESSED IN PLACENTA, SIGNAL = 1.2; EST_HUMAN HIT: AI970099.1, EVALUE 3.00e+00
NRTCWNEENQGQGLHFYCLPLYHQLHLLPERVGEILDHSGDVHGHEFK

SEQ ID NO: 45435 - protein, 40 aa, Homo sapiens
  MAP TO AC018529.4; EXPRESSED IN ADULT LIVER, SIGNAL = 0.7; EXPRESSED IN BRAIN, SIGNAL = 0.53; EXPRESSED IN BONE MARROW, SIGNAL = 0.95; EXPRESSED IN PLACENTA, SIGNAL = 0.51; EXPRESSED IN FETAL LIVER, SIGNAL = 0.68
KNEDMNRMVTSSEGILGPSRLLSEVTNRSQKRVWQRASSR

SEQ ID NO: 45436 - protein, 44 aa, Homo sapiens
  MAP TO AC011260.4; EXPRESSED IN PLACENTA, SIGNAL = 0.63; EXPRESSED IN ADULT LIVER, SIGNAL = 0.7; EXPRESSED IN BRAIN, SIGNAL = 0.59; EXPRESSED IN BONE MARROW, SIGNAL = 0.53; EXPRESSED IN FETAL LIVER, SIGNAL = 0.6
NVKDVIYFDFQTVEFEKCMGVLHTLFSQPPTAKNSKVEDVNHER

SEQ ID NO: 45437 - protein, 27 aa, Homo sapiens
  MAP TO AL136315.3; EXPRESSED IN PLACENTA, SIGNAL = 0.94; EXPRESSED IN ADULT LIVER, SIGNAL = 0.98; EXPRESSED IN BRAIN, SIGNAL = 0.94; EXPRESSED IN LUNG, SIGNAL = 0.86; EXPRESSED IN BONE MARROW, SIGNAL = 0.95; EXPRESSED IN FETAL LIVER, SIGNAL = 1.2
PLPSRRPQCLLLLSTCSCVLVIQLPLI

SEQ ID NO: 45438 - protein, 86 aa, Homo sapiens
  MAP TO AC012571.3; EXPRESSED IN PLACENTA, SIGNAL = 0.48; EXPRESSED IN ADULT LIVER, SIGNAL = 0.7; EXPRESSED IN BRAIN, SIGNAL = 0.46; EXPRESSED IN BONE MARROW, SIGNAL = 0.43; EXPRESSED IN FETAL LIVER, SIGNAL = 0.52; EST_HUMAN HIT: BF354411.1, EVALUE 3.00e-12; SWISSPROT HIT: P98073, EVALUE 5.00e-10
NKDPTQWIATFGATITPPAVKRNVRKIILHENYHRETNENDIALVQLSTGVEFSNIVQRVCLPDSSIKLPPKTSVFVTGFGSIVDD

SEQ ID NO: 45439 - protein, 38 aa, Homo sapiens
  MAP TO AL161788.2; EXPRESSED IN LUNG, SIGNAL = 1.3; EXPRESSED IN PLACENTA, SIGNAL = 1.6; EXPRESSED IN FETAL LIVER, SIGNAL = 1.1; EXPRESSED IN ADULT LIVER, SIGNAL = 1.3; EXPRESSED IN BRAIN, SIGNAL = 1.4; EXPRESSED IN BONE MARROW, SIGNAL = 1.1; SWISSPROT HIT: P46541, EVALUE 3.70e+00
MTHKLDKESNTGTVAFGEPCISQESWLQDRACNQYNRI

SEQ ID NO: 45440 - protein, 70 aa, Homo sapiens
  MAP TO AC018516.3; EXPRESSED IN FETAL LIVER, SIGNAL = 0.55; EXPRESSED IN BRAIN, SIGNAL = 0.67; EXPRESSED IN BONE MARROW, SIGNAL = 0.55; EXPRESSED IN ADULT LIVER, SIGNAL = 0.53; EST_HUMAN HIT: BF675508.1, EVALUE 3.70e-01; SWISSPROT HIT: Q07157, EVALUE 8.70e-01
MSTIGSFEGFQAVSLKQEGDDQPSETDHLSMEEEDPMPRQISRQSSVTESTLYPNPYHQPYISRKYFATR

SEQ ID NO: 45441 - protein, 49 aa, Homo sapiens
  MAP TO AL122058.19; EXPRESSED IN LUNG, SIGNAL = 1.1; EXPRESSED IN FETAL LIVER, SIGNAL = 1.3; EXPRESSED IN BONE MARROW, SIGNAL = 0.81; EXPRESSED IN ADULT LIVER, SIGNAL = 1.1; EXPRESSED IN PLACENTA, SIGNAL = 1.2; EXPRESSED IN BRAIN, SIGNAL = 0.77; SWISSPROT HIT: P18075, EVALUE 7.00e-24; EST_HUMAN HIT: BE540742.1, EVALUE 9.00e-23
ESDLFLLDSRTLWASEEGWLVFDITATSNHWVVNPRHNLGLQLSVETLD

SEQ ID NO: 45442 - protein, 49 aa, Homo sapiens
  MAP TO AL122058.19; EXPRESSED IN LUNG, SIGNAL = 1.1; EXPRESSED IN FETAL LIVER, SIGNAL = 1.3; EXPRESSED IN BONE MARROW, SIGNAL = 0.81; EXPRESSED IN ADULT LIVER, SIGNAL = 1.1; EXPRESSED IN PLACENTA, SIGNAL = 1.2; EXPRESSED IN BRAIN, SIGNAL = 0.77; EST_HUMAN HIT: BE744273.1, EVALUE 4.00e-17; SWISSPROT HIT: P03286, EVALUE 4.20e-01
WLTRSPCLSSSLAGNRISSCSTAVPSGPRRRAGWCLTSQPPATTGWSIR

SEQ ID NO: 45443 - protein, 27 aa, Homo sapiens
  MAP TO AC015897.3; EXPRESSED IN ADULT LIVER, SIGNAL = 0.94; EXPRESSED IN PLACENTA, SIGNAL = 0.82; EXPRESSED IN BRAIN, SIGNAL = 1.1; EXPRESSED IN BONE MARROW, SIGNAL = 0.94; EXPRESSED IN LUNG, SIGNAL = 1.1; EXPRESSED IN FETAL LIVER, SIGNAL = 0.84; EST_HUMAN HIT: BF362607.1, EVALUE 1.10e-01
ALLQWALTKNRLCRNLGKKRALRKERN

SEQ ID NO: 45444 - protein, 83 aa, Homo sapiens
  MAP TO AL121586.28; EXPRESSED IN PLACENTA, SIGNAL = 0.52; EXPRESSED IN ADULT LIVER, SIGNAL = 0.68; EXPRESSED IN FETAL LIVER, SIGNAL = 0.72; EXPRESSED IN BRAIN, SIGNAL = 0.69; EXPRESSED IN BONE MARROW, SIGNAL = 0.76; EST_HUMAN HIT: BE783272.1, EVALUE 5.00e-30; SWISSPROT HIT: P24686, EVALUE 8.80e+00
DLMELKAEHVRLSGSLLTCCLRLTVGAQSREPNGSGRMDGREPAQLLLLLAKTQELEKEAHERSQELIQLKSQGDLEKAELQD

SEQ ID NO: 45445 - protein, 37 aa, Homo sapiens
  MAP TO AL121586.28; EXPRESSED IN PLACENTA, SIGNAL = 0.52; EXPRESSED IN ADULT LIVER, SIGNAL = 0.68; EXPRESSED IN FETAL LIVER, SIGNAL = 0.72; EXPRESSED IN BRAIN, SIGNAL = 0.69; EXPRESSED IN BONE MARROW, SIGNAL = 0.76; EST_HUMAN HIT: BE783272.1, EVALUE 3.00e-08
CGSTVSGTQRIWKNGWAGAGPAAAATSQDPGAGEGSP

SEQ ID NO: 45446 - protein, 62 aa, Homo sapiens
  MAP TO AC015873.2; EXPRESSED IN PLACENTA, SIGNAL = 0.51; EXPRESSED IN FETAL LIVER, SIGNAL = 0.48; EXPRESSED IN BRAIN, SIGNAL = 0.59; EXPRESSED IN BONE MARROW, SIGNAL = 0.56; EST_HUMAN HIT: AI130738.1, EVALUE 3.00e-10
SPQPAPACRKPFRECCPWPTCRPPTPTCRPHGALARPRGARWHPMVPRRMGVAAARVQASNC

SEQ ID NO: 45447 - protein, 44 aa, Homo sapiens
  MAP TO AL157773.3; EXPRESSED IN ADULT LIVER, SIGNAL = 0.57; EXPRESSED IN PLACENTA, SIGNAL = 0.53; EXPRESSED IN BRAIN, SIGNAL = 0.57; EXPRESSED IN FETAL LIVER, SIGNAL = 1.3; EXPRESSED IN BONE MARROW, SIGNAL = 0.93; EST_HUMAN HIT: AV683050.1, EVALUE 5.00e-14; SWISSPROT HIT: P48506, EVALUE 7.00e-22
FKDKNTPSPFIETFTEDDEASRASKPDHIYMDAMGFGMGNCCLQ

SEQ ID NO: 45448 - protein, 28 aa, Homo sapiens
  MAP TO AC015496.3; EXPRESSED IN PLACENTA, SIGNAL = 0.98; EXPRESSED IN ADULT LIVER, SIGNAL = 0.87; EXPRESSED IN FETAL LIVER, SIGNAL = 1.3; EXPRESSED IN BRAIN, SIGNAL = 0.92; EXPRESSED IN BONE MARROW, SIGNAL = 0.77; EXPRESSED IN LUNG, SIGNAL = 0.97
EKIKQNSKATTNQKNPLPTTTTKTIQRS

SEQ ID NO: 45449 - protein, 135 aa, Homo sapiens
  MAP TO AL161422.3; EXPRESSED IN FETAL LIVER, SIGNAL = 1.1; EXPRESSED IN BRAIN, SIGNAL = 0.54; EXPRESSED IN BONE MARROW, SIGNAL = 0.52; EXPRESSED IN PLACENTA, SIGNAL = 0.63; EXPRESSED IN ADULT LIVER, SIGNAL = 0.82; SWISSPROT HIT: Q09289, EVALUE 5.90e+00; EST_HUMAN HIT: W56629.1, EVALUE 4.00e-39
NAGPAGEMVPTFFGSLTQSICGEFSDAWPLMQNPMGGDNISFCDSYPELTGEDIHSLNPELESSTSLDSNSSQDLVGGAVPVQSHSENFTAATDLSRYNNTLVESASTQDALTMRSQLDQESGAVIHPATQTSLQ

SEQ ID NO: 45450 - protein, 29 aa, Homo sapiens
  MAP TO AL161422.3; EXPRESSED IN FETAL LIVER, SIGNAL = 1.1; EXPRESSED IN BRAIN, SIGNAL = 0.54; EXPRESSED IN BONE MARROW, SIGNAL = 0.52; EXPRESSED IN PLACENTA, SIGNAL = 0.63; EXPRESSED IN ADULT LIVER, SIGNAL = 0.82
TQAQPGRWCRLSSDPSRSPSVASFQMPGL

SEQ ID NO: 45451 - protein, 53 aa, Homo sapiens
  MAP TO AC022860.3; EXPRESSED IN LUNG, SIGNAL = 0.89; EXPRESSED IN FETAL LIVER, SIGNAL = 0.91; EXPRESSED IN BONE MARROW, SIGNAL = 0.86; EXPRESSED IN PLACENTA, SIGNAL = 0.79; EXPRESSED IN ADULT LIVER, SIGNAL = 1.1; EXPRESSED IN BRAIN, SIGNAL = 0.9; SWISSPROT HIT: P45963, EVALUE 4.70e+00; EST_HUMAN HIT: BE812334.1, EVALUE 5.00e-08
ARWRSVSWSYLSLIFMCLPVFMQNITLTCVPWQMTMTCIFYLAFFTKIKPRNW

SEQ ID NO: 45452 - protein, 24 aa, Homo sapiens
  MAP TO AC022843.3; EXPRESSED IN PLACENTA, SIGNAL = 0.61; EXPRESSED IN FETAL LIVER, SIGNAL = 0.7; EXPRESSED IN ADULT LIVER, SIGNAL = 0.79; EXPRESSED IN BRAIN, SIGNAL = 0.86; EXPRESSED IN BONE MARROW, SIGNAL = 0.68
LTVLMLVTSWTFQEPLLPSATVMV

SEQ ID NO: 45453 - protein, 31 aa, Homo sapiens
  MAP TO AC013591.3; EXPRESSED IN PLACENTA, SIGNAL = 1.2; EXPRESSED IN ADULT LIVER, SIGNAL = 1.2; EXPRESSED IN FETAL LIVER, SIGNAL =   1; EXPRESSED IN BRAIN, SIGNAL = 1.4; EXPRESSED IN BONE MARROW, SIGNAL =   1; EXPRESSED IN LUNG, SIGNAL = 1.1; SWISSPROT HIT: P48982, EVALUE 2.00e-03; EST_HUMAN HIT: R84341.1, EVALUE 2.00e-07
YRQAGPVIAVQVENEYGSFNKDKTYMPYLHK

SEQ ID NO: 45454 - protein, 30 aa, Homo sapiens
  MAP TO AC013591.3; EXPRESSED IN PLACENTA, SIGNAL = 1.2; EXPRESSED IN ADULT LIVER, SIGNAL = 1.2; EXPRESSED IN FETAL LIVER, SIGNAL =   1; EXPRESSED IN BRAIN, SIGNAL = 1.4; EXPRESSED IN BONE MARROW, SIGNAL =   1; EXPRESSED IN LUNG, SIGNAL = 1.1; EST_HUMAN HIT: BE313750.1, EVALUE 4.50e+00
TARQALSSRCKWRMSMAHSIRIKHTCRIST

SEQ ID NO: 45455 - protein, 101 aa, Homo sapiens
  MAP TO AC018993.3; EXPRESSED IN ADULT LIVER, SIGNAL = 1.1; EXPRESSED IN PLACENTA, SIGNAL =   1; EXPRESSED IN FETAL LIVER, SIGNAL =   1; EXPRESSED IN BRAIN, SIGNAL = 1.8; EXPRESSED IN LUNG, SIGNAL = 1.2; EXPRESSED IN BONE MARROW, SIGNAL =   1; EST_HUMAN HIT: BF529228.1, EVALUE 2.00e-17
RQLTIFNSQATIIIGGKEQGQPFQGQLSGLYYNGLKVLNMAAENDANIAIVGNVRLVGEVPSSMTTESTATAMQSEMSTSIMETTTTLATSTARRGKPPTK

SEQ ID NO: 45456 - protein, 47 aa, Homo sapiens
  MAP TO AL121884.5; EXPRESSED IN PLACENTA, SIGNAL = 0.83; EXPRESSED IN ADULT LIVER, SIGNAL = 0.62; EXPRESSED IN FETAL LIVER, SIGNAL = 0.85; EXPRESSED IN BRAIN, SIGNAL = 0.77; EXPRESSED IN BONE MARROW, SIGNAL = 0.85; SWISSPROT HIT: Q04652, EVALUE 4.80e-02; EST_HUMAN HIT: AU125721.1, EVALUE 7.00e-21
MNATRSEEQFHVINHAEQTLRKMENYLKEKQLCDVLLIAGHLRIPAH

SEQ ID NO: 45457 - protein, 55 aa, Homo sapiens
  MAP TO AC025749.2; EXPRESSED IN BRAIN, SIGNAL = 0.6; SWISSPROT HIT: P22612, EVALUE 9.00e-16; EST_HUMAN HIT: AU119707.1, EVALUE 3.00e-27
VCGTPEYIAPEVIFRQGYGKPVDWWAMGVVLYEFLVGCVPFFGDTPEELFGQVVS

SEQ ID NO: 45458 - protein, 25 aa, Homo sapiens
  MAP TO AL161756.1; EXPRESSED IN BRAIN, SIGNAL = 0.52; EXPRESSED IN PLACENTA, SIGNAL = 0.55; EXPRESSED IN BONE MARROW, SIGNAL = 0.46; SWISSPROT HIT: P17941, EVALUE 8.70e+00
RTEDLQQEIQMLTQQMEQLYHLYEQ

SEQ ID NO: 45459 - protein, 27 aa, Homo sapiens
  MAP TO AL161756.1; EXPRESSED IN BRAIN, SIGNAL = 0.52; EXPRESSED IN PLACENTA, SIGNAL = 0.55; EXPRESSED IN BONE MARROW, SIGNAL = 0.46
EQKIFSRKFRCLLSKWNSCIIFMNSCL

SEQ ID NO: 45460 - protein, 28 aa, Homo sapiens
  MAP TO AC008164.3; EXPRESSED IN BRAIN, SIGNAL = 0.59; EXPRESSED IN BONE MARROW, SIGNAL = 0.55; EXPRESSED IN PLACENTA, SIGNAL = 0.56; EXPRESSED IN ADULT LIVER, SIGNAL = 0.61; EXPRESSED IN FETAL LIVER, SIGNAL = 0.62
VSLDPKLMTLGTYPTLMRTKTTPSGRMT

SEQ ID NO: 45461 - protein, 28 aa, Homo sapiens
  MAP TO AC008164.3; EXPRESSED IN BRAIN, SIGNAL = 0.59; EXPRESSED IN BONE MARROW, SIGNAL = 0.55; EXPRESSED IN PLACENTA, SIGNAL = 0.56; EXPRESSED IN ADULT LIVER, SIGNAL = 0.61; EXPRESSED IN FETAL LIVER, SIGNAL = 0.62
GIFGPQTHDAGNLPNTYENKDYTQWEND

SEQ ID NO: 45462 - protein, 37 aa, Homo sapiens
  MAP TO AC010503.3; EXPRESSED IN LUNG, SIGNAL = 0.85; EXPRESSED IN PLACENTA, SIGNAL = 0.86; EXPRESSED IN FETAL LIVER, SIGNAL = 0.86; EXPRESSED IN ADULT LIVER, SIGNAL = 0.93; EXPRESSED IN BRAIN, SIGNAL =   1; EXPRESSED IN BONE MARROW, SIGNAL = 1.1; EST_HUMAN HIT: BE394596.1, EVALUE 1.00e-03; SWISSPROT HIT: P34886, EVALUE 8.40e+00
RNLTELVVAVTDENIVGLFAALLAERRVLLTASKLST

SEQ ID NO: 45463 - protein, 62 aa, Homo sapiens
  MAP TO AC021811.2; EXPRESSED IN ADULT LIVER, SIGNAL = 0.54; EXPRESSED IN BRAIN, SIGNAL = 0.51; EXPRESSED IN PLACENTA, SIGNAL = 0.54; EXPRESSED IN FETAL LIVER, SIGNAL = 0.56; EXPRESSED IN BONE MARROW, SIGNAL = 0.47; SWISSPROT HIT: O14248, EVALUE 4.50e+00
AELCHGLPSYSVFIKTKGYFGSYLTTQTRRGSGNADMETSDEKVKQAVAKMTLIILVELCKE

SEQ ID NO: 45464 - protein, 44 aa, Homo sapiens
  MAP TO AC021811.2; EXPRESSED IN ADULT LIVER, SIGNAL = 0.54; EXPRESSED IN BRAIN, SIGNAL = 0.51; EXPRESSED IN PLACENTA, SIGNAL = 0.54; EXPRESSED IN FETAL LIVER, SIGNAL = 0.56; EXPRESSED IN BONE MARROW, SIGNAL = 0.47
MLSSAMACLPTQCSLKPKDTLAAILLHRQGEVVGMLIWKPRMRK

SEQ ID NO: 45465 - protein, 52 aa, Homo sapiens
  MAP TO AL161940.3; EXPRESSED IN BONE MARROW, SIGNAL = 0.92; EXPRESSED IN ADULT LIVER, SIGNAL = 0.82; EXPRESSED IN BRAIN, SIGNAL =   1; EXPRESSED IN PLACENTA, SIGNAL = 0.86; EXPRESSED IN FETAL LIVER, SIGNAL = 0.72; EST_HUMAN HIT: AA854462.1, EVALUE 3.80e-02
GFTKEQQLEFSITGIMKTPRGPELSPILLCKVVYEVFCTVYMLLKNKSFFKN

SEQ ID NO: 45466 - protein, 35 aa, Homo sapiens
  MAP TO AC025324.2; EXPRESSED IN ADULT LIVER, SIGNAL = 0.68; EXPRESSED IN BRAIN, SIGNAL = 0.88; EXPRESSED IN LUNG, SIGNAL = 0.92; EXPRESSED IN PLACENTA, SIGNAL = 0.66; EXPRESSED IN BONE MARROW, SIGNAL = 0.57; EXPRESSED IN FETAL LIVER, SIGNAL = 0.6; SWISSPROT HIT: P57389, EVALUE 8.40e+00
FDGGEKYCPKAHTFIFAYIIFNKLPSTPIFNPPQK

SEQ ID NO: 45467 - protein, 36 aa, Homo sapiens
  MAP TO AC025324.2; EXPRESSED IN ADULT LIVER, SIGNAL = 0.68; EXPRESSED IN BRAIN, SIGNAL = 0.88; EXPRESSED IN LUNG, SIGNAL = 0.92; EXPRESSED IN PLACENTA, SIGNAL = 0.66; EXPRESSED IN BONE MARROW, SIGNAL = 0.57; EXPRESSED IN FETAL LIVER, SIGNAL = 0.6
VLMEGRSIVPKLILLFLLISSSINFLQHPFLTLHRN

SEQ ID NO: 45468 - protein, 34 aa, Homo sapiens
  MAP TO AC010477.4; EXPRESSED IN BONE MARROW, SIGNAL = 1.1; EXPRESSED IN LUNG, SIGNAL = 1.1; EXPRESSED IN PLACENTA, SIGNAL = 1.3; EXPRESSED IN ADULT LIVER, SIGNAL = 1.1; EXPRESSED IN BRAIN, SIGNAL = 1.2; EXPRESSED IN FETAL LIVER, SIGNAL = 1.1; EST_HUMAN HIT: AV654810.1, EVALUE 1.00e-04
PCKNTMRRQQSATQKRALTRTCLCWNPNLRIPAS

SEQ ID NO: 45469 - protein, 43 aa, Homo sapiens
  MAP TO AL157773.3; EXPRESSED IN LUNG, SIGNAL =   1; EXPRESSED IN PLACENTA, SIGNAL = 0.99; EXPRESSED IN FETAL LIVER, SIGNAL = 1.2; EXPRESSED IN ADULT LIVER, SIGNAL = 1.1; EXPRESSED IN BRAIN, SIGNAL = 0.97; EXPRESSED IN BONE MARROW, SIGNAL =   1; EST_HUMAN HIT: BF529663.1, EVALUE 2.00e-18; SWISSPROT HIT: P48506, EVALUE 1.00e-19
NNNYRISKSRYDSIDSYLSKCGEKYNDIDLTIDKEIYEQLLQE

SEQ ID NO: 45470 - protein, 35 aa, Homo sapiens
  MAP TO AL138682.5; EXPRESSED IN BRAIN, SIGNAL = 0.62
MPFTYDISIFLALSTKTILKNQFRGNKFLNFSAEQ

SEQ ID NO: 45471 - protein, 30 aa, Homo sapiens
  MAP TO AC019214.2; EXPRESSED IN PLACENTA, SIGNAL = 0.69; EXPRESSED IN BRAIN, SIGNAL = 0.68; EXPRESSED IN BONE MARROW, SIGNAL = 0.86; EXPRESSED IN ADULT LIVER, SIGNAL = 0.64; EXPRESSED IN FETAL LIVER, SIGNAL = 0.69; EST_HUMAN HIT: BE263134.1, EVALUE 8.00e-08
DLRAKAVELEHETFRNAKVANLYKASVLKK

SEQ ID NO: 45472 - protein, 28 aa, Homo sapiens
  MAP TO AC019214.2; EXPRESSED IN PLACENTA, SIGNAL = 0.69; EXPRESSED IN BRAIN, SIGNAL = 0.68; EXPRESSED IN BONE MARROW, SIGNAL = 0.86; EXPRESSED IN ADULT LIVER, SIGNAL = 0.64; EXPRESSED IN FETAL LIVER, SIGNAL = 0.69; EST_HUMAN HIT: BE263134.1, EVALUE 1.00e-10
LTSGPRPWSWNMRHSGTPRWPTSTRPAC

SEQ ID NO: 45473 - protein, 44 aa, Homo sapiens
  MAP TO AC019295.3; EXPRESSED IN BRAIN, SIGNAL = 0.6; EXPRESSED IN BONE MARROW, SIGNAL = 0.43; EXPRESSED IN PLACENTA, SIGNAL = 0.67; EXPRESSED IN ADULT LIVER, SIGNAL = 0.55; EXPRESSED IN FETAL LIVER, SIGNAL = 0.66; SWISSPROT HIT: P17072, EVALUE 1.20e+00
NTINRIELKEKSKYSYIHSESNILQYIRESGSIKTAKQTRSQIT

SEQ ID NO: 45474 - protein, 58 aa, Homo sapiens
  MAP TO AL160413.5; EXPRESSED IN PLACENTA, SIGNAL = 0.78; EXPRESSED IN FETAL LIVER, SIGNAL = 0.6; EXPRESSED IN ADULT LIVER, SIGNAL = 0.77; EXPRESSED IN BRAIN, SIGNAL = 0.75; EXPRESSED IN BONE MARROW, SIGNAL = 0.7; SWISSPROT HIT: P12053, EVALUE 1.20e+00
MLFTQLGLQAAFINNLSGYYLMFNNTTKKFAFGRIGDLNSKIYIMNNFQASPKHKGTL

SEQ ID NO: 45475 - protein, 21 aa, Homo sapiens
  MAP TO AL160413.5; EXPRESSED IN PLACENTA, SIGNAL = 0.78; EXPRESSED IN FETAL LIVER, SIGNAL = 0.6; EXPRESSED IN ADULT LIVER, SIGNAL = 0.77; EXPRESSED IN BRAIN, SIGNAL = 0.75; EXPRESSED IN BONE MARROW, SIGNAL = 0.7
QCCSHSWVCRQHSSTICQGII

SEQ ID NO: 45476 - protein, 42 aa, Homo sapiens
  MAP TO AC010397.3; EXPRESSED IN BONE MARROW, SIGNAL = 0.62; EXPRESSED IN ADULT LIVER, SIGNAL = 0.73; EXPRESSED IN BRAIN, SIGNAL = 0.52; EXPRESSED IN PLACENTA, SIGNAL = 0.52; EXPRESSED IN FETAL LIVER, SIGNAL = 0.89; EST_HUMAN HIT: AV714767.1, EVALUE 6.00e-18
EYGITKAEKLEIAKGYCTPLVRKIRSDLQRTQDDDTVNKLHP

SEQ ID NO: 45477 - protein, 75 aa, Homo sapiens
  MAP TO AC022204.3; EXPRESSED IN PLACENTA, SIGNAL = 0.69; EXPRESSED IN BONE MARROW, SIGNAL = 0.71; EXPRESSED IN FETAL LIVER, SIGNAL = 0.57; EXPRESSED IN BRAIN, SIGNAL = 0.59; SWISSPROT HIT: P43680, EVALUE 1.50e+00; EST_HUMAN HIT: AV730377.1, EVALUE 2.00e-04
HPALGWSLKPMMRMPVRNGKREDTQRYKRESHVKRVETGIILSQTKQLLTPSEAGRSKAGFSPRTFRRSTPLLTS

SEQ ID NO: 45478 - protein, 71 aa, Homo sapiens
  MAP TO AC019221.3; EXPRESSED IN PLACENTA, SIGNAL = 0.6; EXPRESSED IN ADULT LIVER, SIGNAL = 0.65; EXPRESSED IN FETAL LIVER, SIGNAL = 0.54; EXPRESSED IN BRAIN, SIGNAL = 0.53; EXPRESSED IN BONE MARROW, SIGNAL = 0.65; SWISSPROT HIT: P57405, EVALUE 1.40e+00; EST_HUMAN HIT: AW999266.1, EVALUE 9.40e-02
VGKSDQPGSSRVPLAPRLWLPNTIFYKQEPGHLRIMAGYISRSGNKMSLKHLTITESSEAAIQDHWNHQRD

SEQ ID NO: 45479 - protein, 34 aa, Homo sapiens
  MAP TO AC019221.3; EXPRESSED IN PLACENTA, SIGNAL = 0.6; EXPRESSED IN ADULT LIVER, SIGNAL = 0.65; EXPRESSED IN FETAL LIVER, SIGNAL = 0.54; EXPRESSED IN BRAIN, SIGNAL = 0.53; EXPRESSED IN BONE MARROW, SIGNAL = 0.65; EST_HUMAN HIT: AW999266.1, EVALUE 2.60e+00
LERVTNLVAAEYPWHPDYGCQIPFSTNRNQGILE

SEQ ID NO: 45480 - protein, 29 aa, Homo sapiens
  MAP TO AL139187.4; EXPRESSED IN BONE MARROW, SIGNAL = 0.71; EXPRESSED IN PLACENTA, SIGNAL = 1.2; EXPRESSED IN ADULT LIVER, SIGNAL = 0.74; EXPRESSED IN BRAIN, SIGNAL = 0.79; EXPRESSED IN FETAL LIVER, SIGNAL = 0.59; EST_HUMAN HIT: H55721.1, EVALUE 2.00e+00
DSDGTVSSCRTSPGRPQHRPTSAARRPAS

SEQ ID NO: 45481 - protein, 26 aa, Homo sapiens
  MAP TO AC021880.2; EXPRESSED IN ADULT LIVER, SIGNAL = 0.61; EXPRESSED IN BRAIN, SIGNAL = 0.5; EXPRESSED IN BONE MARROW, SIGNAL = 0.78; EXPRESSED IN PLACENTA, SIGNAL = 0.53; EXPRESSED IN FETAL LIVER, SIGNAL = 0.51
DDVNRLRLSLTCLPSCLPWGAYNCIP

SEQ ID NO: 45482 - protein, 26 aa, Homo sapiens
  MAP TO AC011824.4; EXPRESSED IN BONE MARROW, SIGNAL = 0.84; EXPRESSED IN PLACENTA, SIGNAL = 0.87; EXPRESSED IN ADULT LIVER, SIGNAL = 0.82; EXPRESSED IN FETAL LIVER, SIGNAL = 1.2; EXPRESSED IN BRAIN, SIGNAL = 0.75
GNECSVTEKREHRYDEKGDSHFRNEN

SEQ ID NO: 45483 - protein, 25 aa, Homo sapiens
  MAP TO AC011824.4; EXPRESSED IN BONE MARROW, SIGNAL = 0.84; EXPRESSED IN PLACENTA, SIGNAL = 0.87; EXPRESSED IN ADULT LIVER, SIGNAL = 0.82; EXPRESSED IN FETAL LIVER, SIGNAL = 1.2; EXPRESSED IN BRAIN, SIGNAL = 0.75
VMNAVLQRKGSIVMTKREILISEMR

SEQ ID NO: 45484 - protein, 52 aa, Homo sapiens
  MAP TO AC023296.2; EXPRESSED IN PLACENTA, SIGNAL = 0.64; EXPRESSED IN BRAIN, SIGNAL = 0.61; EXPRESSED IN BONE MARROW, SIGNAL = 0.55; EXPRESSED IN ADULT LIVER, SIGNAL = 0.64; EXPRESSED IN FETAL LIVER, SIGNAL = 0.55; EST_HUMAN HIT: H22841.1, EVALUE 6.00e-26; SWISSPROT HIT: P26644, EVALUE 1.00e-07
TLANGIQFGTDFTFNKTVSYQCNPGYVMEAVTSATIRCTKDGRWNPSKPVCK

SEQ ID NO: 45485 - protein, 33 aa, Homo sapiens
  MAP TO AC010338.3; EXPRESSED IN PLACENTA, SIGNAL = 0.63; EXPRESSED IN FETAL LIVER, SIGNAL = 0.55; EXPRESSED IN ADULT LIVER, SIGNAL = 0.64; EXPRESSED IN BRAIN, SIGNAL = 0.76; EXPRESSED IN BONE MARROW, SIGNAL = 0.67; EST_HUMAN HIT: AW071990.1, EVALUE 7.60e+00; SWISSPROT HIT: P13729, EVALUE 1.50e-01
NSCCPTTSCKTSPKTITRQKSSSFSKPKIKACG

SEQ ID NO: 45486 - protein, 165 aa, Homo sapiens
  MAP TO AC024196.2; EXPRESSED IN BRAIN, SIGNAL = 0.45; SWISSPROT HIT: P48669, EVALUE 4.00e-19; EST_HUMAN HIT: AW262317.1, EVALUE 2.00e-17
SVNSTFPTMSRQLNIKSSGDKGNFSVHSAVVPRKAVGSLASYCAAGRGAGAGFGSRSLYSLGGNRRISFNVAGGGVRAGGYGFRPGSGYGGGRASGFAGSMFGSVALGPACLSVCPPGGIHQVTVNKSLLAPLNVELDPEIQKVRAQEREQIKVLNDKFASFIDK

SEQ ID NO: 45487 - protein, 32 aa, Homo sapiens
  MAP TO AC024196.2; EXPRESSED IN BRAIN, SIGNAL = 0.45; EST_HUMAN HIT: AU121127.1, EVALUE 1.50e-02
SLSTRASWPPSTWSWTLRSRRCAPRSGNRSRC

SEQ ID NO: 45488 - protein, 49 aa, Homo sapiens
  MAP TO AC023114.3; EXPRESSED IN ADULT LIVER, SIGNAL = 1.3; EXPRESSED IN FETAL LIVER, SIGNAL = 1.2; EXPRESSED IN BONE MARROW, SIGNAL =   1; EXPRESSED IN LUNG, SIGNAL = 1.1; EXPRESSED IN PLACENTA, SIGNAL = 1.2; EXPRESSED IN BRAIN, SIGNAL = 1.8; SWISSPROT HIT: Q03185, EVALUE 3.60e+00
QLETQKKKDGLDVSQVNGCLGKSLCVADANGVGEGEREDIGYLMAGRFV

SEQ ID NO: 45489 - protein, 26 aa, Homo sapiens
  MAP TO AC026236.4; EXPRESSED IN PLACENTA, SIGNAL = 0.48; EXPRESSED IN ADULT LIVER, SIGNAL = 0.51; EXPRESSED IN FETAL LIVER, SIGNAL = 0.47; EXPRESSED IN BRAIN, SIGNAL = 0.44; EXPRESSED IN BONE MARROW, SIGNAL = 0.47
QDNPLCRAEDRLEMMHIKPTAQSEFG

SEQ ID NO: 45490 - protein, 26 aa, Homo sapiens
  MAP TO AC026236.4; EXPRESSED IN PLACENTA, SIGNAL = 0.48; EXPRESSED IN ADULT LIVER, SIGNAL = 0.51; EXPRESSED IN FETAL LIVER, SIGNAL = 0.47; EXPRESSED IN BRAIN, SIGNAL = 0.44; EXPRESSED IN BONE MARROW, SIGNAL = 0.47
LQIQTVLWALCASFLTCPQPCKVDCP

SEQ ID NO: 45491 - protein, 64 aa, Homo sapiens
  MAP TO AC008474.4; EXPRESSED IN FETAL LIVER, SIGNAL = 0.8; EXPRESSED IN PLACENTA, SIGNAL = 0.61; EXPRESSED IN ADULT LIVER, SIGNAL = 0.68; EXPRESSED IN BONE MARROW, SIGNAL = 0.72; EXPRESSED IN BRAIN, SIGNAL = 0.7; SWISSPROT HIT: P54924, EVALUE 7.70e+00; EST_HUMAN HIT: AW880876.1, EVALUE 2.00e-10
KMLAKQEAQMNLMKQAVEVRVGRSGWEAHPVARSHPEWGLLIPQIYVHHEIYNLIFKYVGTMEA

SEQ ID NO: 45492 - protein, 56 aa, Homo sapiens
  MAP TO AC010290.4; EXPRESSED IN PLACENTA, SIGNAL = 0.52; EXPRESSED IN BONE MARROW, SIGNAL = 0.62; EXPRESSED IN ADULT LIVER, SIGNAL = 0.53; EXPRESSED IN BRAIN, SIGNAL = 0.65; EXPRESSED IN FETAL LIVER, SIGNAL = 0.51; SWISSPROT HIT: P45107, EVALUE 2.70e+00
VHFVPDTGTVAQIVYTDDQVRPPQQVVYTADGASYTSVDGPEHTLVYIHPVEAAQA

SEQ ID NO: 45493 - protein, 56 aa, Homo sapiens
  MAP TO AC010290.4; EXPRESSED IN PLACENTA, SIGNAL = 0.52; EXPRESSED IN BONE MARROW, SIGNAL = 0.62; EXPRESSED IN ADULT LIVER, SIGNAL = 0.53; EXPRESSED IN BRAIN, SIGNAL = 0.65; EXPRESSED IN FETAL LIVER, SIGNAL = 0.51; EST_HUMAN HIT: BE512877.1, EVALUE 5.50e-01; SWISSPROT HIT: P43578, EVALUE 7.90e+00
CTLFRTQEQWLRLSIPMTRFAPHSRWCTRQMVPPTHQWMVQSTRWCTSTRWKLHRH

SEQ ID NO: 45494 - protein, 59 aa, Homo sapiens
  MAP TO AC025119.2; EXPRESSED IN BONE MARROW, SIGNAL = 0.69; EXPRESSED IN PLACENTA, SIGNAL = 0.86; EXPRESSED IN ADULT LIVER, SIGNAL = 0.81; EXPRESSED IN FETAL LIVER, SIGNAL = 0.87; EXPRESSED IN BRAIN, SIGNAL = 0.73; EST_HUMAN HIT: BE909854.1, EVALUE 4.00e-30; SWISSPROT HIT: P30408, EVALUE 5.00e-12
MGSRKCGGCLSCLLIPLALWSIIVNILLYFPNGQTSYASSNKLTNYVWYFEGICFSGIM

SEQ ID NO: 45495 - protein, 75 aa, Homo sapiens
  MAP TO AC022939.2; EXPRESSED IN ADULT LIVER, SIGNAL = 0.73; EXPRESSED IN BRAIN, SIGNAL = 0.7; EXPRESSED IN BONE MARROW, SIGNAL = 0.66; EXPRESSED IN PLACENTA, SIGNAL = 0.67; EXPRESSED IN FETAL LIVER, SIGNAL = 0.51; EST_HUMAN HIT: AI910393.1, EVALUE 8.00e-22
GVSKNGAKTAEEGGGGERGAKSRQGGSDKRERGTEGRGEILAVFFRSEIILDNFLFFSCKEMTLSEPFLEASKYH

SEQ ID NO: 45496 - protein, 19 aa, Homo sapiens
  MAP TO AC022939.2; EXPRESSED IN ADULT LIVER, SIGNAL = 0.73; EXPRESSED IN BRAIN, SIGNAL = 0.7; EXPRESSED IN BONE MARROW, SIGNAL = 0.66; EXPRESSED IN PLACENTA, SIGNAL = 0.67; EXPRESSED IN FETAL LIVER, SIGNAL = 0.51
CFQKRSQNSRRRRRRRKGS

SEQ ID NO: 45497 - protein, 44 aa, Homo sapiens
  MAP TO AC021115.3; EXPRESSED IN LUNG, SIGNAL = 0.97; EXPRESSED IN ADULT LIVER, SIGNAL = 0.85; EXPRESSED IN FETAL LIVER, SIGNAL = 0.69; EXPRESSED IN BRAIN, SIGNAL = 0.85; EXPRESSED IN PLACENTA, SIGNAL = 0.92; EXPRESSED IN BONE MARROW, SIGNAL = 0.68; EST_HUMAN HIT: AW971497.1, EVALUE 2.00e-23; SWISSPROT HIT: P24052, EVALUE 9.50e-01
MVDNNLRITNWNRKLGCKCQYKHIVDWCGCSPNDFKPQDFHRFQ

SEQ ID NO: 45498 - protein, 59 aa, Homo sapiens
  MAP TO AC021115.3; EXPRESSED IN LUNG, SIGNAL = 0.97; EXPRESSED IN ADULT LIVER, SIGNAL = 0.85; EXPRESSED IN FETAL LIVER, SIGNAL = 0.69; EXPRESSED IN BRAIN, SIGNAL = 0.85; EXPRESSED IN PLACENTA, SIGNAL = 0.92; EXPRESSED IN BONE MARROW, SIGNAL = 0.68
PSSIRSWRTAPTATPWWTTTCASPTGIASWAASASTSTSWTGAAAPPMTSSRRTSTASR

SEQ ID NO: 45499 - protein, 34 aa, Homo sapiens
  MAP TO AC015649.5; EXPRESSED IN PLACENTA, SIGNAL = 0.79; EXPRESSED IN FETAL LIVER, SIGNAL = 1.4; EXPRESSED IN ADULT LIVER, SIGNAL = 0.78; EXPRESSED IN BRAIN, SIGNAL = 0.67; EXPRESSED IN BONE MARROW, SIGNAL = 1.1; EST_HUMAN HIT: F00928.1, EVALUE 5.00e-03; SWISSPROT HIT: Q02357, EVALUE 1.00e-13
ADAATSFLRAARSGNLDKALDHLRNGVDINTCNQ

SEQ ID NO: 45500 - protein, 65 aa, Homo sapiens
  MAP TO AL109930.5; EXPRESSED IN BONE MARROW, SIGNAL = 1.5; EXPRESSED IN PLACENTA, SIGNAL =   1; EXPRESSED IN ADULT LIVER, SIGNAL = 1.4; EXPRESSED IN BRAIN, SIGNAL = 1.6; EXPRESSED IN LUNG, SIGNAL = 1.3; EXPRESSED IN FETAL LIVER, SIGNAL = 1.2; EST_HUMAN HIT: R10887.1, EVALUE 5.00e-28; SWISSPROT HIT: Q17298, EVALUE 3.40e+00
KRSISRSCNGQHTSKLPLCQTPCGDSLLIASFSPHHCPMRKNVLFNFILQMRKLRPIRRSYSLKP

SEQ ID NO: 45501 - protein, 64 aa, Homo sapiens
  MAP TO AC008739.5; EXPRESSED IN PLACENTA, SIGNAL = 0.56; EXPRESSED IN ADULT LIVER, SIGNAL = 0.58; EXPRESSED IN FETAL LIVER, SIGNAL = 0.78; EXPRESSED IN BONE MARROW, SIGNAL = 0.69; EXPRESSED IN BRAIN, SIGNAL = 0.77
KKKTEAEESKKAAAAGEGEEEEEEEEEKKEEEEEKEEEEEKKEEEKEKKKEKKKKKRKKKKRKK

SEQ ID NO: 45502 - protein, 49 aa, Homo sapiens
  MAP TO AC007325.51; EXPRESSED IN LUNG, SIGNAL = 1.1; EXPRESSED IN FETAL LIVER, SIGNAL = 1.1; EXPRESSED IN BRAIN, SIGNAL =   1; EXPRESSED IN PLACENTA, SIGNAL = 0.99; EXPRESSED IN BONE MARROW, SIGNAL = 0.97; EXPRESSED IN ADULT LIVER, SIGNAL = 2.6; EST_HUMAN HIT: H72018.1, EVALUE 2.00e-13; SWISSPROT HIT: P19440, EVALUE 9.00e-20
GIVTAEDLNNYCAELIEHPLNISLGDAVLYMPSARLSGPVLALILNILK

SEQ ID NO: 45503 - protein, 52 aa, Homo sapiens
  MAP TO AL157392.2; EXPRESSED IN LUNG, SIGNAL = 0.85; EXPRESSED IN PLACENTA, SIGNAL = 0.71; EXPRESSED IN FETAL LIVER, SIGNAL = 2.8; EXPRESSED IN BRAIN, SIGNAL = 2.3; EXPRESSED IN BONE MARROW, SIGNAL = 0.76; EXPRESSED IN ADULT LIVER, SIGNAL = 0.92; EXPRESSED IN HELA, SIGNAL = 3.1; EST_HUMAN HIT: BE250433.1, EVALUE 2.00e-24; SWISSPROT HIT: P33411, EVALUE 8.10e-02
ANDAYLQMAIGNAPWPIGVTMVGIHARTGREKIFSKHVAHVLNDETQRKYIQ

SEQ ID NO: 45504 - protein, 41 aa, Homo sapiens
  MAP TO AL157392.2; EXPRESSED IN LUNG, SIGNAL = 0.85; EXPRESSED IN PLACENTA, SIGNAL = 0.71; EXPRESSED IN FETAL LIVER, SIGNAL = 2.8; EXPRESSED IN BRAIN, SIGNAL = 2.3; EXPRESSED IN BONE MARROW, SIGNAL = 0.76; EXPRESSED IN ADULT LIVER, SIGNAL = 0.92; EXPRESSED IN HELA, SIGNAL = 3.1; EST_HUMAN HIT: BE250433.1, EVALUE 1.00e-17; SWISSPROT HIT: P27641, EVALUE 4.80e+00
QMMLIFRWPLEMRLGPSVSLWLVSMPELAEKRFFPSMLHMF

SEQ ID NO: 45505 - protein, 54 aa, Homo sapiens [sequence omitted]

SEQ ID NO: 45506 - protein, 19 aa, Homo sapiens
  MAP TO AL136308.4; EXPRESSED IN PLACENTA, SIGNAL =   1; EXPRESSED IN ADULT LIVER, SIGNAL = 0.56; EXPRESSED IN FETAL LIVER, SIGNAL = 0.84; EXPRESSED IN BONE MARROW, SIGNAL = 0.95; EXPRESSED IN BRAIN, SIGNAL = 1.1
TMTSPPPPPPPPSSSSSSF

SEQ ID NO: 45507 - protein, 69 aa, Homo sapiens
  MAP TO AC025221.2; EXPRESSED IN PLACENTA, SIGNAL = 0.52; EXPRESSED IN FETAL LIVER, SIGNAL = 0.58; EXPRESSED IN BONE MARROW, SIGNAL = 0.64; EXPRESSED IN ADULT LIVER, SIGNAL = 0.77; EXPRESSED IN BRAIN, SIGNAL = 0.6; EST_HUMAN HIT: BF382029.1, EVALUE 1.00e-36; SWISSPROT HIT: P35573, EVALUE 1.00e-37
YELQFRLGPTLQGKAVTVYTNYPFPGETFNREKFRSLDWENPTEREDDSDKYCKLNLQQSGSFQYYFLQ

SEQ ID NO: 45508 - protein, 72 aa, Homo sapiens
  MAP TO AL139187.4; EXPRESSED IN PLACENTA, SIGNAL =   1; EXPRESSED IN ADULT LIVER, SIGNAL = 0.8; EXPRESSED IN FETAL LIVER, SIGNAL = 0.69; EXPRESSED IN LUNG, SIGNAL = 0.86; EXPRESSED IN BRAIN, SIGNAL = 0.79; EXPRESSED IN BONE MARROW, SIGNAL = 0.67; EST_HUMAN HIT: W31834.1, EVALUE 5.00e-37; SWISSPROT HIT: P02534, EVALUE 1.20e+00
VGDGNPLKLWKASVEVEAPPSVVLNRVLRERHLWDEDFVQWKVVETLDRQTEIYQYVLNSMAPHPSRDFVVL

SEQ ID NO: 45509 - protein, 123 aa, Homo sapiens
  MAP TO AC026412.1; EXPRESSED IN LUNG, SIGNAL = 0.93; EXPRESSED IN ADULT LIVER, SIGNAL = 0.76; EXPRESSED IN BRAIN, SIGNAL = 0.75; EXPRESSED IN BONE MARROW, SIGNAL = 0.75; EXPRESSED IN PLACENTA, SIGNAL = 0.81; EXPRESSED IN FETAL LIVER, SIGNAL = 0.62; EST_HUMAN HIT: BE910319.1, EVALUE 7.00e-02; SWISSPROT HIT: P29060, EVALUE 2.00e+00
MWEVILADGKGGELAAKVDSQAGRPETRKRPLCYGTGGWCFWRQCTNSEGPGRAVLLGASLCNLAFWVPWDGGAEPGLSTHVASCHSPGVQVMCSLHTGAQGPVAFLDTPAPILGLVSSAQSA

SEQ ID NO: 45510 - protein, 30 aa, Homo sapiens
  MAP TO AC010721.2; EXPRESSED IN PLACENTA, SIGNAL = 0.82; EXPRESSED IN ADULT LIVER, SIGNAL = 0.66; EXPRESSED IN FETAL LIVER, SIGNAL = 0.61; EXPRESSED IN BRAIN, SIGNAL = 0.63; EXPRESSED IN BONE MARROW, SIGNAL = 0.59; EST_HUMAN HIT: BF672312.1, EVALUE 8.00e-04
LTNNFTVVLSERGPDPDPKRGFLDLTQGRI

SEQ ID NO: 45511 - protein, 25 aa, Homo sapiens
  MAP TO AL137225.7; EXPRESSED IN PLACENTA, SIGNAL = 0.81; EXPRESSED IN ADULT LIVER, SIGNAL = 0.94; EXPRESSED IN FETAL LIVER, SIGNAL = 0.76; EXPRESSED IN BONE MARROW, SIGNAL = 0.69; EXPRESSED IN BRAIN, SIGNAL = 0.59
VLQVGLPLPDFLAMNYNLAELDIVE

SEQ ID NO: 45512 - protein, 29 aa, Homo sapiens
  MAP TO AC010363.3; EXPRESSED IN PLACENTA, SIGNAL = 0.71; EXPRESSED IN FETAL LIVER, SIGNAL = 0.69; EXPRESSED IN ADULT LIVER, SIGNAL = 0.76; EXPRESSED IN BONE MARROW, SIGNAL = 0.84; EXPRESSED IN LUNG, SIGNAL = 0.87; EXPRESSED IN BRAIN, SIGNAL = 0.77
ALYWILKSTGEEAVFRDPQDKDGAWEAEQ

SEQ ID NO: 45513 - protein, 60 aa, Homo sapiens
  MAP TO AL137225.7; EXPRESSED IN ADULT LIVER, SIGNAL = 0.81; EXPRESSED IN PLACENTA, SIGNAL = 0.83; EXPRESSED IN FETAL LIVER, SIGNAL =   1; EXPRESSED IN BRAIN, SIGNAL = 0.76; EXPRESSED IN BONE MARROW, SIGNAL = 0.78; EST_HUMAN HIT: BE969873.1, EVALUE 2.70e+00; SWISSPROT HIT: P24604, EVALUE 5.30e-01
PIVKSVAGDIIDFPKSRAPAKVPPKKDHTSQVMVPLYLFNTTFGLLQTNGALDMDITPEL

SEQ ID NO: 45514 - protein, 110 aa, Homo sapiens
  MAP TO AC015529.3; EXPRESSED IN BONE MARROW, SIGNAL = 0.61; EXPRESSED IN FETAL LIVER, SIGNAL = 0.91; EXPRESSED IN PLACENTA, SIGNAL = 0.66; EXPRESSED IN BRAIN, SIGNAL = 0.46; EST_HUMAN HIT: AW341697.1, EVALUE 4.70e+00; SWISSPROT HIT: Q13201, EVALUE 2.00e-58
VSDQKNAPAAESVSNNVTEYMSTLHENIKKQSLMMLQMFEDLHIQESKINNLTVSLEMEKESLRGECEDMLSKCRNDFKFQLKDTEENLHVLNQTLAEVLFPMDNKMDKM

SEQ ID NO: 45515 - protein, 100 aa, Homo sapiens
  MAP TO AC010492.4; EXPRESSED IN FETAL LIVER, SIGNAL = 0.74; EXPRESSED IN PLACENTA, SIGNAL = 0.52; EXPRESSED IN BRAIN, SIGNAL = 0.51; EXPRESSED IN BONE MARROW, SIGNAL = 1.7; EXPRESSED IN LUNG, SIGNAL = 0.97; EST_HUMAN HIT: AW403428.1, EVALUE 4.00e-22; SWISSPROT HIT: Q64281, EVALUE 2.00e-17
AYSKPTLSALPSPVVASGGNMTLRCGSQKGYHHFVLMKEGEHQLPRTLDSQQLHSRGFQALFPVGPVTPSHRWRFTCYYYYTNTPWVWSHPSDPLEILPS

SEQ ID NO: 45516 - protein, 76 aa, Homo sapiens
  MAP TO AL133316.2; EXPRESSED IN PLACENTA, SIGNAL = 0.57; EXPRESSED IN ADULT LIVER, SIGNAL = 0.51; EXPRESSED IN FETAL LIVER, SIGNAL = 0.52; EXPRESSED IN BRAIN, SIGNAL = 0.87; EXPRESSED IN BONE MARROW, SIGNAL = 0.44; EST_HUMAN HIT: BE501446.1, EVALUE 9.00e-32; SWISSPROT HIT: P51513, EVALUE 3.00e-39
GAWVQLSQKPDGINLQERVVTVSGEPEQNRKAVELIIQKIQEDPQSGSCLNISYANVTGPVANSNPTGSPYANTAE

SEQ ID NO: 45517 - protein, 26 aa, Homo sapiens
  MAP TO AL133284.7; EXPRESSED IN PLACENTA, SIGNAL = 1.1; EXPRESSED IN ADULT LIVER, SIGNAL = 1.2; EXPRESSED IN FETAL LIVER, SIGNAL = 1.2; EXPRESSED IN BRAIN, SIGNAL = 1.2; EXPRESSED IN BONE MARROW, SIGNAL = 1.2; EXPRESSED IN LUNG, SIGNAL = 1.1
NSSYIQEAGVEQWPDAAVDNEKRKED

SEQ ID NO: 45518 - protein, 27 aa, Homo sapiens
  MAP TO AL133284.7; EXPRESSED IN PLACENTA, SIGNAL = 1.1; EXPRESSED IN ADULT LIVER, SIGNAL = 1.2; EXPRESSED IN FETAL LIVER, SIGNAL = 1.2; EXPRESSED IN BRAIN, SIGNAL = 1.2; EXPRESSED IN BONE MARROW, SIGNAL = 1.2; EXPRESSED IN LUNG, SIGNAL = 1.1
GIHPISRRPVWSSGQMQLWTMKRGRRT

SEQ ID NO: 45519 - protein, 40 aa, Homo sapiens
  MAP TO AL139186.3; EXPRESSED IN ADULT LIVER, SIGNAL = 0.8; EXPRESSED IN BRAIN, SIGNAL = 0.61; EXPRESSED IN PLACENTA, SIGNAL = 0.8; EXPRESSED IN FETAL LIVER, SIGNAL = 0.67; EXPRESSED IN BONE MARROW, SIGNAL = 0.64
MNHCPAYEGQDGLTEAYSSLGLAEVANNSGKLDQRDAGNQ

SEQ ID NO: 45520 - protein, 45 aa, Homo sapiens
  MAP TO AL161646.3; EXPRESSED IN ADULT LIVER, SIGNAL = 0.51; EXPRESSED IN FETAL LIVER, SIGNAL = 0.5; EXPRESSED IN PLACENTA, SIGNAL = 0.56; EXPRESSED IN BRAIN, SIGNAL = 0.62; EXPRESSED IN BONE MARROW, SIGNAL = 0.65
IAQCAENIAVNKDIVFVLTNLQASGAKASERTRKDIYILYIAINA

SEQ ID NO: 45521 - protein, 114 aa, Homo sapiens
  MAP TO AL161747.1; EXPRESSED IN PLACENTA, SIGNAL = 0.91; EXPRESSED IN FETAL LIVER, SIGNAL = 0.83; EXPRESSED IN BONE MARROW, SIGNAL = 0.82; EXPRESSED IN ADULT LIVER, SIGNAL = 0.99; EXPRESSED IN BRAIN, SIGNAL = 0.54; EST_HUMAN HIT: BE206710.1, EVALUE 1.00e-13
KVLSASEVAALSSPASSAPHSGGKTGMEENRRLEHQKKQEKANRIVAEAIARARARGEQNIPRVLNEDELPSVRPEEEGEKKRRKKSAGERLKEEKPKKSKTSGASKTKGKSKL

SEQ ID NO: 45522 - protein, 67 aa, Homo sapiens
  MAP TO AC019042.3; EXPRESSED IN PLACENTA, SIGNAL = 0.65; EXPRESSED IN FETAL LIVER, SIGNAL = 0.57; EXPRESSED IN BONE MARROW, SIGNAL = 0.48; EXPRESSED IN ADULT LIVER, SIGNAL = 0.65; EXPRESSED IN BRAIN, SIGNAL = 0.53; EST_HUMAN HIT: AA416550.1, EVALUE 2.00e-04; SWISSPROT HIT: O35375, EVALUE 5.00e-06
LQFLAFDTEASHDILRVWDGPPENDMLLKEISGSLIPEGIHSTLNIVTIQFDTDFYISKSGFAIQFS

SEQ ID NO: 45523 - protein, 27 aa, Homo sapiens
  MAP TO AC019042.3; EXPRESSED IN PLACENTA, SIGNAL = 0.65; EXPRESSED IN FETAL LIVER, SIGNAL = 0.57; EXPRESSED IN BONE MARROW, SIGNAL = 0.48; EXPRESSED IN ADULT LIVER, SIGNAL = 0.65; EXPRESSED IN BRAIN, SIGNAL = 0.53
CSFLLLIRKHHMIYSESGTVHQKMICF

SEQ ID NO: 45524 - protein, 79 aa, Homo sapiens; identical to SEQ ID NO: 42279
  MAP TO AL139296.2; EXPRESSED IN PLACENTA, SIGNAL = 0.54; EXPRESSED IN ADULT LIVER, SIGNAL = 0.74; EXPRESSED IN BONE MARROW, SIGNAL = 0.55; EXPRESSED IN BRAIN, SIGNAL = 0.97; EST_HUMAN HIT: AI268012.1, EVALUE 4.20e+00

SEQ ID NO: 45525 - protein, 21 aa, Homo sapiens
  MAP TO AC024972.2; EXPRESSED IN PLACENTA, SIGNAL = 0.51; EXPRESSED IN BRAIN, SIGNAL = 0.7; EST_HUMAN HIT: AA984050.1, EVALUE 6.00e-03
PGSSPNLHIQILQKECFRTAL

SEQ ID NO: 45526 - protein, 28 aa, Homo sapiens
  MAP TO AC013764.3; EXPRESSED IN LUNG, SIGNAL = 0.92; EXPRESSED IN PLACENTA, SIGNAL = 0.93; EXPRESSED IN FETAL LIVER, SIGNAL = 0.81; EXPRESSED IN BONE MARROW, SIGNAL = 0.7; EXPRESSED IN ADULT LIVER, SIGNAL = 0.92; EXPRESSED IN BRAIN, SIGNAL = 0.63
LHLHADHSPVFTTSAAQIFLPSPALHQH

SEQ ID NO: 45527 - protein, 55 aa, Homo sapiens
  MAP TO AC010458.2; EXPRESSED IN BRAIN, SIGNAL = 0.68; EXPRESSED IN FETAL LIVER, SIGNAL = 0.65; EXPRESSED IN PLACENTA, SIGNAL = 1.2; EXPRESSED IN ADULT LIVER, SIGNAL = 0.6; EXPRESSED IN BONE MARROW, SIGNAL = 1.1; EST_HUMAN HIT: W22993.1, EVALUE 5.00e-09; SWISSPROT HIT: P14533, EVALUE 3.00e-09
FDTNGDGEITLVELQQAMQRLLGERLTPREISEVVREADVNGDGTVDFEGDIDGA

SEQ ID NO: 45528 - protein, 55 aa, Homo sapiens
  MAP TO AC010458.2; EXPRESSED IN BRAIN, SIGNAL = 0.68; EXPRESSED IN FETAL LIVER, SIGNAL = 0.65; EXPRESSED IN PLACENTA, SIGNAL = 1.2; EXPRESSED IN ADULT LIVER, SIGNAL = 0.6; EXPRESSED IN BONE MARROW, SIGNAL = 1.1; EST_HUMAN HIT: W22993.1, EVALUE 1.60e+00
LTRMEMGRSPWWSYSRPCRDSWGSGSPPGRSLRLSGRLMLMETAQLTLKVTLTGR

SEQ ID NO: 45529 - protein, 37 aa, Homo sapiens
  MAP TO AC019221.3; EXPRESSED IN LUNG, SIGNAL = 1.1; EXPRESSED IN BRAIN, SIGNAL = 0.85; EXPRESSED IN BONE MARROW, SIGNAL = 1.1; EXPRESSED IN PLACENTA, SIGNAL = 0.9; EXPRESSED IN ADULT LIVER, SIGNAL = 0.89; EXPRESSED IN FETAL LIVER, SIGNAL = 0.86; EST_HUMAN HIT: AW052032.1, EVALUE 1.00e-08; SWISSPROT HIT: Q16760, EVALUE 3.00e-15
TIIKEGMLTKQNNSFQRSKRRYFKLRGRTLYYAKTAK

SEQ ID NO: 45530 - protein, 43 aa, Homo sapiens
  MAP TO AL139187.4; EXPRESSED IN FETAL LIVER, SIGNAL = 0.85; EXPRESSED IN PLACENTA, SIGNAL =   1; EXPRESSED IN ADULT LIVER, SIGNAL =   1; EXPRESSED IN BONE MARROW, SIGNAL = 1.1; EXPRESSED IN LUNG, SIGNAL = 0.94; EXPRESSED IN BRAIN, SIGNAL =   1; EST_HUMAN HIT: R06385.1, EVALUE 8.10e-01
EGAREQASARSGLAAPAADTGATSVQGLHPDQVCHLEGNAATP

SEQ ID NO: 45531 - protein, 54 aa, Homo sapiens
  MAP TO AC026428.1; EXPRESSED IN BONE MARROW, SIGNAL = 0.46; EXPRESSED IN BRAIN, SIGNAL = 0.46; EXPRESSED IN PLACENTA, SIGNAL = 0.49; EXPRESSED IN FETAL LIVER, SIGNAL = 0.46
KKKIKMKTKKTKKRRKKKKKKKNKKKKKKKKKKQNHHSKSLLSQAIIVFPVPSR

SEQ ID NO: 45532 - protein, 84 aa, Homo sapiens
  MAP TO AL133344.19; EXPRESSED IN ADULT LIVER, SIGNAL = 0.76; EXPRESSED IN BONE MARROW, SIGNAL = 0.58; EXPRESSED IN BRAIN, SIGNAL = 0.53; EXPRESSED IN PLACENTA, SIGNAL = 0.71; EXPRESSED IN FETAL LIVER, SIGNAL = 0.48; EST_HUMAN HIT: H12041.1, EVALUE 8.00e-15; SWISSPROT HIT: Q9UKL4, EVALUE 3.20e+00
VVEHVEPLRPYESLDTLKQFLQYHGKILCFFCLWDDSVSMFGDRRELILHYFLCDDTIEIKELLPHSSGRDALKMFLRRSKLPK

SEQ ID NO: 45533 - protein, 71 aa, Homo sapiens
  MAP TO AL157911.2; EXPRESSED IN LUNG, SIGNAL = 0.88; EXPRESSED IN PLACENTA, SIGNAL = 0.88; EXPRESSED IN ADULT LIVER, SIGNAL = 0.98; EXPRESSED IN FETAL LIVER, SIGNAL = 0.94; EXPRESSED IN BRAIN, SIGNAL = 0.81; EXPRESSED IN BONE MARROW, SIGNAL = 0.8; EST_HUMAN HIT: AA628710.1, EVALUE 8.00e-05; SWISSPROT HIT: Q01129, EVALUE 1.00e-03
ISKMTKLTRLSINNNLLTGWEEHTFDNMLHLHSLSLENNRITSLSGLQKSFTLVELYISNNYIAVNQEMHN

SEQ ID NO: 45534 - protein, 47 aa, Homo sapiens
  MAP TO AC012629.4; EXPRESSED IN PLACENTA, SIGNAL = 0.68; EXPRESSED IN ADULT LIVER, SIGNAL = 0.89; EXPRESSED IN BRAIN, SIGNAL = 0.79; EXPRESSED IN FETAL LIVER, SIGNAL = 0.83; EXPRESSED IN BONE MARROW, SIGNAL = 0.83
NRAHTFLNSELSVLCAGMQVVLLAGSGSRLVETLMKFVECHNVLTHF

SEQ ID NO: 45535 - protein, 34 aa, Homo sapiens
  MAP TO AC012629.4; EXPRESSED IN PLACENTA, SIGNAL = 0.68; EXPRESSED IN ADULT LIVER, SIGNAL = 0.89; EXPRESSED IN BRAIN, SIGNAL = 0.79; EXPRESSED IN FETAL LIVER, SIGNAL = 0.83; EXPRESSED IN BONE MARROW, SIGNAL = 0.83; SWISSPROT HIT: O08461, EVALUE 8.50e+00
QTGPTPSSTLSSLYCAQGCRWSSWPVQAADWWKH

SEQ ID NO: 45536 - protein, 33 aa, Homo sapiens
  MAP TO AL121935.12; EXPRESSED IN LUNG, SIGNAL =   1; EXPRESSED IN ADULT LIVER, SIGNAL = 1.1; EXPRESSED IN BRAIN, SIGNAL = 0.99; EXPRESSED IN BONE MARROW, SIGNAL = 0.96; EXPRESSED IN PLACENTA, SIGNAL =   1; EXPRESSED IN FETAL LIVER, SIGNAL = 0.96; EST_HUMAN HIT: AA977912.1, EVALUE 1.20e-02
RSSSVLGSSEGGFLSRVQAEEFASSSPDSAERQ

SEQ ID NO: 45537 - protein, 21 aa, Homo sapiens
  MAP TO AL160281.2; EXPRESSED IN LUNG, SIGNAL = 0.95; EXPRESSED IN ADULT LIVER, SIGNAL = 0.84; EXPRESSED IN BONE MARROW, SIGNAL = 1.8; EXPRESSED IN BRAIN, SIGNAL = 0.77; EXPRESSED IN PLACENTA, SIGNAL = 0.95; EXPRESSED IN FETAL LIVER, SIGNAL = 1.4; EST_HUMAN HIT: AI094497.1, EVALUE 2.00e-05
QTLHTSLIFGRRRCCRTPRIS

SEQ ID NO: 45538 - protein, 44 aa, Homo sapiens
  MAP TO AL139195.2; EXPRESSED IN ADULT LIVER, SIGNAL = 0.63; EXPRESSED IN FETAL LIVER, SIGNAL = 0.55; EXPRESSED IN BRAIN, SIGNAL = 0.75; EXPRESSED IN PLACENTA, SIGNAL = 0.56; EXPRESSED IN BONE MARROW, SIGNAL = 0.71; EST_HUMAN HIT: BE891724.1, EVALUE 5.00e-19
ACVKVCAYVRKQVEKIKNSMDGKNVDTVLMELGVRFHRLIYEHL

SEQ ID NO: 45539 - protein, 116 aa, Homo sapiens
  MAP TO AC010290.4; EXPRESSED IN BONE MARROW, SIGNAL = 0.45; EXPRESSED IN BRAIN, SIGNAL = 0.48; EST_HUMAN HIT: BF333514.1, EVALUE 4.00e-28; SWISSPROT HIT: P39413, EVALUE 6.00e-20
NAALQHLFIRKSFRPFKCLQCGKAFREKDKLDQHLRFHGREGNCPLTCDLCNKGFISSTSLESHMKLHSDQKTYSCIFCPESFDRLDLLKDHVAIHINDGYFTCPTCKKRFPDFIQ

SEQ ID NO: 45540 - protein, 45 aa, Homo sapiens
  MAP TO AC010290.4; EXPRESSED IN BONE MARROW, SIGNAL = 0.45; EXPRESSED IN BRAIN, SIGNAL = 0.48; SWISSPROT HIT: P91875, EVALUE 8.20e+00
MQLFSICLFGSPSGLLNACSVGRPSGKRTNWTSTYASMGGRGTAH

SEQ ID NO: 45541 - protein, 40 aa, Homo sapiens
  MAP TO AC026405.1; EXPRESSED IN LUNG, SIGNAL = 0.87; EXPRESSED IN BRAIN, SIGNAL = 0.74; EXPRESSED IN PLACENTA, SIGNAL = 0.79; EXPRESSED IN ADULT LIVER, SIGNAL = 0.89; EXPRESSED IN FETAL LIVER, SIGNAL = 0.76; EXPRESSED IN BONE MARROW, SIGNAL = 0.79
GNPERVSLIIIQHVLQENISIIIIITIITCYHKPGTVLGT

SEQ ID NO: 45542 - protein, 38 aa, Homo sapiens
  MAP TO AC026405.1; EXPRESSED IN LUNG, SIGNAL = 0.87; EXPRESSED IN BRAIN, SIGNAL = 0.74; EXPRESSED IN PLACENTA, SIGNAL = 0.79; EXPRESSED IN ADULT LIVER, SIGNAL = 0.89; EXPRESSED IN FETAL LIVER, SIGNAL = 0.76; EXPRESSED IN BONE MARROW, SIGNAL = 0.79
RETLKGCPSSSSNMFYKKTSASSLSSPSSLVTISQALC

SEQ ID NO: 45543 - protein, 42 aa, Homo sapiens
  MAP TO AC021288.3; EXPRESSED IN PLACENTA, SIGNAL =   1; EXPRESSED IN ADULT LIVER, SIGNAL = 1.2; EXPRESSED IN FETAL LIVER, SIGNAL = 0.82; EXPRESSED IN BRAIN, SIGNAL = 0.89; EXPRESSED IN BONE MARROW, SIGNAL = 0.97; EXPRESSED IN LUNG, SIGNAL = 0.98
EEEETEVIEEDKNNKEEEKARNKPKIIVKCGNEIGFYAKYST

SEQ ID NO: 45544 - protein, 25 aa, Homo sapiens
  MAP TO AL158175.6; EXPRESSED IN PLACENTA, SIGNAL =   1; EXPRESSED IN ADULT LIVER, SIGNAL = 1.1; EXPRESSED IN FETAL LIVER, SIGNAL = 1.1; EXPRESSED IN BONE MARROW, SIGNAL = 0.99; EXPRESSED IN LUNG, SIGNAL = 1.1; EXPRESSED IN BRAIN, SIGNAL = 0.93
NGMFVLLKVKKVNVLRPEGEMASRA

SEQ ID NO: 45545 - protein, 31 aa, Homo sapiens
  MAP TO AC025746.2; EXPRESSED IN PLACENTA, SIGNAL = 0.68; EXPRESSED IN ADULT LIVER, SIGNAL = 0.63; EXPRESSED IN BRAIN, SIGNAL = 0.51; EXPRESSED IN BONE MARROW, SIGNAL = 0.72; EXPRESSED IN FETAL LIVER, SIGNAL = 0.82; EST_HUMAN HIT: BE466348.1, EVALUE 4.00e-01
MVIETIILALGILIVTRVSFLLGPHSNRARN

SEQ ID NO: 45546 - protein, 88 aa, Homo sapiens
  MAP TO U82670.2; EXPRESSED IN PLACENTA, SIGNAL = 0.54; EXPRESSED IN FETAL LIVER, SIGNAL = 0.5; EXPRESSED IN BRAIN, SIGNAL = 0.47; EST_HUMAN HIT: BE871942.1, EVALUE 7.60e-02; SWISSPROT HIT: P52507, EVALUE 1.80e+00
MGVAPTPGALRRDRSQAGRAIAPTPSALFRVGSRVGTGIALPAGALHRDRSPVRRAVAPTPGTLHCDGSRKCTATGSTPGALPGDRSG

SEQ ID NO: 45547 - protein, 48 aa, Homo sapiens
  MAP TO AC019040.3; EXPRESSED IN LUNG, SIGNAL = 0.85; EXPRESSED IN PLACENTA, SIGNAL = 0.94; EXPRESSED IN ADULT LIVER, SIGNAL = 0.77; EXPRESSED IN BRAIN, SIGNAL = 0.75; EXPRESSED IN FETAL LIVER, SIGNAL = 0.87; EXPRESSED IN BONE MARROW, SIGNAL = 0.93
NLIFGIIVPEFSHRLCNNMLGFLKAVMILSIVFHGRLSEHKSQLGVQK

SEQ ID NO: 45548 - protein, 34 aa, Homo sapiens
  MAP TO AL161646.3; EXPRESSED IN BRAIN, SIGNAL = 0.64; EXPRESSED IN PLACENTA, SIGNAL = 0.82; EXPRESSED IN ADULT LIVER, SIGNAL = 0.72; EXPRESSED IN FETAL LIVER, SIGNAL = 0.65; EXPRESSED IN BONE MARROW, SIGNAL = 0.65; SWISSPROT HIT: Q10003, EVALUE 4.90e+00; EST_HUMAN HIT: BE067295.1, EVALUE 1.20e-02
NEQNEEDMEAFSDEEKLTGFFSRLTLNEWLQEIL

SEQ ID NO: 45549 - protein, 23 aa, Homo sapiens
  MAP TO AC011930.3; EXPRESSED IN PLACENTA, SIGNAL = 0.71; EXPRESSED IN FETAL LIVER, SIGNAL = 0.88; EXPRESSED IN BONE MARROW, SIGNAL = 0.73; EXPRESSED IN ADULT LIVER, SIGNAL = 0.85; EXPRESSED IN BRAIN, SIGNAL = 0.67
TFTFKISVWTNLSFFFLKVECLH

SEQ ID NO: 45550 - protein, 39 aa, Homo sapiens
  MAP TO AL161634.1; EXPRESSED IN FETAL LIVER, SIGNAL = 0.5; EXPRESSED IN BONE MARROW, SIGNAL = 0.56; EXPRESSED IN ADULT LIVER, SIGNAL = 0.51; EXPRESSED IN BRAIN, SIGNAL = 0.49
ICTSHNSLLEYLWEGDKQFTKLHRINPGIQMQLARDVSK

SEQ ID NO: 45551 - protein, 34 aa, Homo sapiens
  MAP TO AL161634.1; EXPRESSED IN FETAL LIVER, SIGNAL = 0.5; EXPRESSED IN BONE MARROW, SIGNAL = 0.56; EXPRESSED IN ADULT LIVER, SIGNAL = 0.51; EXPRESSED IN BRAIN, SIGNAL = 0.49; EST_HUMAN HIT: BF340366.1, EVALUE 7.50e+00
LLTSLASCICIPGLILCNFVNCLSPSQRYSRREL

SEQ ID NO: 45552 - protein, 45 aa, Homo sapiens
  MAP TO AC018730.3; EXPRESSED IN BONE MARROW, SIGNAL = 0.98; EXPRESSED IN ADULT LIVER, SIGNAL = 1.2; EXPRESSED IN LUNG, SIGNAL =   1; EXPRESSED IN PLACENTA, SIGNAL = 1.1; EXPRESSED IN BRAIN, SIGNAL = 0.94; EXPRESSED IN FETAL LIVER, SIGNAL = 0.82; EST_HUMAN HIT: AI521759.1, EVALUE 7.00e-04; SWISSPROT HIT: Q99865, EVALUE 9.40e-01
ACGSAGAEAETLDFQPHTSDNPGTSAEPGGTVSGLCVPGAGDTPA

SEQ ID NO: 45553 - protein, 45 aa, Homo sapiens
  MAP TO AC018730.3; EXPRESSED IN BONE MARROW, SIGNAL = 0.98; EXPRESSED IN ADULT LIVER, SIGNAL = 1.2; EXPRESSED IN LUNG, SIGNAL =   1; EXPRESSED IN PLACENTA, SIGNAL = 1.1; EXPRESSED IN BRAIN, SIGNAL = 0.94; EXPRESSED IN FETAL LIVER, SIGNAL = 0.82; EST_HUMAN HIT: AI521759.1, EVALUE 6.00e-03; SWISSPROT HIT: Q10564, EVALUE 2.10e+00
PVGAQGQRPRRWTSSPTPLTTRARLRSPGEQSAGSASRELGTRLQ

SEQ ID NO: 45554 - protein, 38 aa, Homo sapiens
  MAP TO AL157392.2; EXPRESSED IN BONE MARROW, SIGNAL =   1; EXPRESSED IN PLACENTA, SIGNAL = 0.96; EXPRESSED IN ADULT LIVER, SIGNAL = 0.83; EXPRESSED IN FETAL LIVER, SIGNAL = 0.74; EXPRESSED IN BRAIN, SIGNAL = 0.88; EST_HUMAN HIT: BF574717.1, EVALUE 1.00e-14; SWISSPROT HIT: P08442, EVALUE 7.40e-01
VIRRLRERGEPIRLFGETDYDAFQRLRKIEILTPEVNK

SEQ ID NO: 45555 - protein, 74 aa, Homo sapiens
  MAP TO AC010458.2; EXPRESSED IN LUNG, SIGNAL = 1.1; EXPRESSED IN PLACENTA, SIGNAL =   1; EXPRESSED IN FETAL LIVER, SIGNAL = 0.9; EXPRESSED IN BRAIN, SIGNAL = 1.2; EXPRESSED IN BONE MARROW, SIGNAL = 0.79; EXPRESSED IN ADULT LIVER, SIGNAL = 1.2; EST_HUMAN HIT: AW583858.1, EVALUE 5.00e-20
GKGKQEDHRSFGTEDPRSLHPRRFRLKELSSDYTAKRREPKPPHRIPEPKPPHRIPEHKLHRACAHAPDPGSGK

SEQ ID NO: 45556 - protein, 26 aa, Homo sapiens
  MAP TO AC010458.2; EXPRESSED IN LUNG, SIGNAL = 1.1; EXPRESSED IN PLACENTA, SIGNAL =   1; EXPRESSED IN FETAL LIVER, SIGNAL = 0.9; EXPRESSED IN BRAIN, SIGNAL = 1.2; EXPRESSED IN BONE MARROW, SIGNAL = 0.79; EXPRESSED IN ADULT LIVER, SIGNAL = 1.2; EST_HUMAN HIT: AU122508.1, EVALUE 2.00e-07
GEKESRRTTEALAPRIPAVFTRGDSG

SEQ ID NO: 45557 - protein, 74 aa, Homo sapiens
  MAP TO AL139421.2; EXPRESSED IN BRAIN, SIGNAL = 0.77; EXPRESSED IN LUNG, SIGNAL = 0.9; EXPRESSED IN PLACENTA, SIGNAL = 0.94; EXPRESSED IN ADULT LIVER, SIGNAL = 0.79; EXPRESSED IN FETAL LIVER, SIGNAL = 0.72; EXPRESSED IN BONE MARROW, SIGNAL = 0.77; EST_HUMAN HIT: AW752870.1, EVALUE 6.10e-01; SWISSPROT HIT: P50532, EVALUE 1.50e-02
ESVKDQNQHTMNKQYEKERQRLVTGIEELRTKLIQIEAENSDLKVNMAHRTSQFQLIQEELLEKASNSSKLESE

SEQ ID NO: 45558 - protein, 29 aa, Homo sapiens
  MAP TO AF241726.1; EXPRESSED IN PLACENTA, SIGNAL = 0.68; EXPRESSED IN FETAL LIVER, SIGNAL = 0.77; EXPRESSED IN BRAIN, SIGNAL = 0.56; EXPRESSED IN BONE MARROW, SIGNAL = 0.6; SWISSPROT HIT: P00480, EVALUE 3.00e-10; EST_HUMAN HIT: AV647923.1, EVALUE 4.00e-05
AKEASIPIINGLSDLYHPIQILADYLTLQ

SEQ ID NO: 45559 - protein, 124 aa, Homo sapiens
  MAP TO AC007325.51; EXPRESSED IN BONE MARROW, SIGNAL = 3.6; EXPRESSED IN PLACENTA, SIGNAL = 1.5; EXPRESSED IN ADULT LIVER, SIGNAL = 1.5; EXPRESSED IN FETAL LIVER, SIGNAL =   2; EXPRESSED IN LUNG, SIGNAL = 1.3; EXPRESSED IN BRAIN, SIGNAL = 1.6; EST_HUMAN HIT: AL042278.1, EVALUE 1.00e-42; SWISSPROT HIT: P52591, EVALUE 2.00e-05
RALKESGAGMPEQDKDPRVQENPGDQRRVPEVTGDAPSAFRPLRDNGGLSPFVPGPGPLQTDLHAQRSEIRYNQTSQTSWTSSCTNRNAISSSYSSTGGLPGLKRRRGPASSHCQLTLSSSKTV

SEQ ID NO: 45560 - protein, 25 aa, Homo sapiens
  MAP TO AL050342.42; EXPRESSED IN ADULT LIVER, SIGNAL = 0.69; EXPRESSED IN BRAIN, SIGNAL = 0.56; EXPRESSED IN PLACENTA, SIGNAL = 0.63; EXPRESSED IN FETAL LIVER, SIGNAL = 0.55; EXPRESSED IN BONE MARROW, SIGNAL = 0.57
GLAYSRGSGMWPEFLKGKSPVLLIP

SEQ ID NO: 45561 - protein, 66 aa, Homo sapiens
  MAP TO AL161668.1; EXPRESSED IN ADULT LIVER, SIGNAL = 1.3; EXPRESSED IN BRAIN, SIGNAL = 1.2; EXPRESSED IN BONE MARROW, SIGNAL = 1.1; EXPRESSED IN LUNG, SIGNAL = 1.2; EXPRESSED IN PLACENTA, SIGNAL = 1.1; EXPRESSED IN FETAL LIVER, SIGNAL = 0.93; EST_HUMAN HIT: AA134727.1, EVALUE 5.70e+00; SWISSPROT HIT: P53351, EVALUE 1.50e+00
EPEPVEDCVQSTLAALYPPFEATAPTLLGQVFQVVERTYREDALRYTLDFLVPAKHLLAKVQQEAC

SEQ ID NO: 45562 - protein, 43 aa, Homo sapiens
  MAP TO AL161668.1; EXPRESSED IN ADULT LIVER, SIGNAL = 1.3; EXPRESSED IN BRAIN, SIGNAL = 1.2; EXPRESSED IN BONE MARROW, SIGNAL = 1.1; EXPRESSED IN LUNG, SIGNAL = 1.2; EXPRESSED IN PLACENTA, SIGNAL = 1.1; EXPRESSED IN FETAL LIVER, SIGNAL = 0.93; EST_HUMAN HIT: BE871675.1, EVALUE 3.60e-01; SWISSPROT HIT: P27919, EVALUE 6.30e+00
SLSQWRTVCRALSPPCIHPLRQQPPPCWARCSRWWRGLIGRTH

SEQ ID NO: 45563 - protein, 28 aa, Homo sapiens
  MAP TO AL161788.2; EXPRESSED IN LUNG, SIGNAL = 2.3; EXPRESSED IN PLACENTA, SIGNAL = 2.7; EXPRESSED IN FETAL LIVER, SIGNAL = 2.5; EXPRESSED IN ADULT LIVER, SIGNAL =   2; EXPRESSED IN HELA, SIGNAL = 2.4; EXPRESSED IN BRAIN, SIGNAL = 2.8; EXPRESSED IN BONE MARROW, SIGNAL = 2.3; EST_HUMAN HIT: AW084041.1, EVALUE 1.00e-01; SWISSPROT HIT: P40600, EVALUE 1.70e+00
WLKTDAADRLGSPLHHHGCRSSVTLTVE

SEQ ID NO: 45564 - protein, 168 aa, Homo sapiens
  MAP TO AC022470.3; EXPRESSED IN PLACENTA, SIGNAL = 0.57; EXPRESSED IN FETAL LIVER, SIGNAL = 0.71; EXPRESSED IN BONE MARROW, SIGNAL = 0.71; EXPRESSED IN BRAIN, SIGNAL = 1.5; EST_HUMAN HIT: AL041084.2, EVALUE 4.00e-75; SWISSPROT HIT: Q10010, EVALUE 3.40e-01
VVFFCQPEGCLSVRQRRMSLRDDTSFVFTLTDKDTGVTRYGICVNFYRSFQKRISKEKGEGGAGSRGKEGTHATCASEEGGTESSESGSSLQPLSADSTPDVNQSPRGKRRAKAGSRSRNSTLTSLCVLSHYPFFSTFRECLYTLKRLVDCCSERLLGKKLGIPRGVQ

SEQ ID NO: 45565 - protein, 77 aa, Homo sapiens
  MAP TO AL122008.9; EXPRESSED IN LUNG, SIGNAL = 0.93; EXPRESSED IN PLACENTA, SIGNAL = 0.86; EXPRESSED IN FETAL LIVER, SIGNAL = 0.66; EXPRESSED IN BONE MARROW, SIGNAL = 0.76; EXPRESSED IN ADULT LIVER, SIGNAL = 0.87; EXPRESSED IN BRAIN, SIGNAL =   1; EST_HUMAN HIT: AI298932.1, EVALUE 6.00e-25
IDHYTSQIVFNGVRVIAIIIIGLGFLLLLLPEEWDVWLIKLLTRLKVRKKEEPAEGAADLSSGPQSKNRRARPSFAR

SEQ ID NO: 45566 - protein, 70 aa, Homo sapiens
  MAP TO AC016498.4; EXPRESSED IN ADULT LIVER, SIGNAL = 0.93; EXPRESSED IN BRAIN, SIGNAL = 0.61; EXPRESSED IN BONE MARROW, SIGNAL = 0.67; EXPRESSED IN PLACENTA, SIGNAL = 0.77; EXPRESSED IN FETAL LIVER, SIGNAL = 0.72; SWISSPROT HIT: Q61467, EVALUE 4.10e+00; EST_HUMAN HIT: BF346708.1, EVALUE 4.00e-01
GCGPGRNRSGRRVRSCLTLVKISLFCSSPGCNCGNTLLRSLPGPAHVQPLVFVVLHKCPIKSRFQRVNCH

SEQ ID NO: 45567 - protein, 40 aa, Homo sapiens
  MAP TO AC022997.3; EXPRESSED IN PLACENTA, SIGNAL = 0.98; EXPRESSED IN FETAL LIVER, SIGNAL =   1; EXPRESSED IN BONE MARROW, SIGNAL = 0.93; EXPRESSED IN LUNG, SIGNAL =   1; EXPRESSED IN ADULT LIVER, SIGNAL = 1.4; EXPRESSED IN BRAIN, SIGNAL = 0.66
CSDGLGVLVQGTFQPQGNTDTCTCQVSAVEGKGEGLMQLA

SEQ ID NO: 45568 - protein, 36 aa, Homo sapiens
  MAP TO AC022997.3; EXPRESSED IN PLACENTA, SIGNAL = 0.98; EXPRESSED IN FETAL LIVER, SIGNAL =   1; EXPRESSED IN BONE MARROW, SIGNAL = 0.93; EXPRESSED IN LUNG, SIGNAL =   1; EXPRESSED IN ADULT LIVER, SIGNAL = 1.4; EXPRESSED IN BRAIN, SIGNAL = 0.66; EST_HUMAN HIT: BF529426.1, EVALUE 3.30e+00; SWISSPROT HIT: P46331, EVALUE 3.70e+00
AAVMGWEFLSRAHSSRRAILTLAPAKFQQWKEKERA

SEQ ID NO: 45569 - protein, 62 aa, Homo sapiens
  MAP TO AL133279.2; EXPRESSED IN PLACENTA, SIGNAL = 0.68; EXPRESSED IN FETAL LIVER, SIGNAL = 0.65; EXPRESSED IN ADULT LIVER, SIGNAL = 0.85; EXPRESSED IN BRAIN, SIGNAL = 0.72; EXPRESSED IN BONE MARROW, SIGNAL = 0.61; EST_HUMAN HIT: AA464375.1, EVALUE 8.00e-04
KKQVSQTKIRVISTILFILAGCIVFVTIPAVIFKYIEGWTALESIYFVVVTLTTVGFGDFVA

SEQ ID NO: 45570 - protein, 30 aa, Homo sapiens
  MAP TO AC016080.3; EXPRESSED IN LUNG, SIGNAL = 0.88; EXPRESSED IN ADULT LIVER, SIGNAL = 0.68; EXPRESSED IN BRAIN, SIGNAL = 0.59; EXPRESSED IN PLACENTA, SIGNAL = 0.76; EXPRESSED IN FETAL LIVER, SIGNAL = 0.75; EXPRESSED IN BONE MARROW, SIGNAL = 0.86
FKFKKNYTQADSSNINSMYMAMLTSILSMK

SEQ ID NO: 45571 - protein, 46 aa, Homo sapiens
  MAP TO AL133355.12; EXPRESSED IN PLACENTA, SIGNAL = 0.68; EXPRESSED IN FETAL LIVER, SIGNAL = 0.45; EXPRESSED IN BONE MARROW, SIGNAL = 0.52; EXPRESSED IN BRAIN, SIGNAL = 0.54
SPVQLYPPLGHNNFSLKQVLTAHLHHSIVHAARPQSLLLPILPPWP

SEQ ID NO: 45572 - protein, 25 aa, Homo sapiens
  MAP TO AC019184.2; EXPRESSED IN PLACENTA, SIGNAL = 0.72; EXPRESSED IN FETAL LIVER, SIGNAL = 0.51; EXPRESSED IN BRAIN, SIGNAL = 0.5; EXPRESSED IN ADULT LIVER, SIGNAL = 0.64; EXPRESSED IN BONE MARROW, SIGNAL = 0.66; SWISSPROT HIT: P46309, EVALUE 1.00e+00
HKKGMLEKFHLEEVFEGDKCYGLKE

SEQ ID NO: 45573 - protein, 23 aa, Homo sapiens
  MAP TO AC019184.2; EXPRESSED IN PLACENTA, SIGNAL = 0.72; EXPRESSED IN FETAL LIVER, SIGNAL = 0.51; EXPRESSED IN BRAIN, SIGNAL = 0.5; EXPRESSED IN ADULT LIVER, SIGNAL = 0.64; EXPRESSED IN BONE MARROW, SIGNAL = 0.66
NTRRVCWKNSIWKRSLKEISVTA

SEQ ID NO: 45574 - protein, 71 aa, Homo sapiens
  MAP TO AL138796.2; EXPRESSED IN BONE MARROW, SIGNAL = 1.1; EXPRESSED IN LUNG, SIGNAL = 0.93; EXPRESSED IN ADULT LIVER, SIGNAL = 1.2; EXPRESSED IN BRAIN, SIGNAL = 1.1; EXPRESSED IN PLACENTA, SIGNAL = 0.96; EXPRESSED IN FETAL LIVER, SIGNAL =   1; SWISSPROT HIT: P40560, EVALUE 1.60e+00; EST_HUMAN HIT: AU133274.1, EVALUE 6.00e-22
DSTQLLPGLKRFLLSACKSCYWRRIASSSALPVCIGRITMTLARRSRRGMGRLTCPSYPMRDTLHCSRRTS

SEQ ID NO: 45575 - protein, 69 aa, Homo sapiens
  MAP TO AC022882.3; EXPRESSED IN LUNG, SIGNAL = 0.87; EXPRESSED IN PLACENTA, SIGNAL = 0.64; EXPRESSED IN ADULT LIVER, SIGNAL = 0.76; EXPRESSED IN FETAL LIVER, SIGNAL = 0.81; EXPRESSED IN BRAIN, SIGNAL = 0.68; EXPRESSED IN BONE MARROW, SIGNAL = 0.66; SWISSPROT HIT: Q9Z985, EVALUE 1.00e+01; EST_HUMAN HIT: AW573021.1, EVALUE 1.00e-03
QGIQHGDNQGVKYGSHFISVKGMTGLGLHVHEKQSPIEHYDHCQVGSTGRKSLLSASRIHPENGYKDEQ

SEQ ID NO: 45576 - protein, 30 aa, Homo sapiens
  MAP TO AL136365.3; EXPRESSED IN BONE MARROW, SIGNAL = 1.2; EXPRESSED IN LUNG, SIGNAL =   1; EXPRESSED IN PLACENTA, SIGNAL = 0.96; EXPRESSED IN ADULT LIVER, SIGNAL = 1.2; EXPRESSED IN FETAL LIVER, SIGNAL =   1; EXPRESSED IN BRAIN, SIGNAL = 0.93
GYDKSQEERKEGQDSQEGSSFCVHREDAYL

SEQ ID NO: 45577 - protein, 37 aa, Homo sapiens
  MAP TO AC011260.4; EXPRESSED IN PLACENTA, SIGNAL = 0.96; EXPRESSED IN ADULT LIVER, SIGNAL = 1.1; EXPRESSED IN BRAIN, SIGNAL = 0.81; EXPRESSED IN BONE MARROW, SIGNAL = 0.94; EXPRESSED IN LUNG, SIGNAL =   1; EXPRESSED IN FETAL LIVER, SIGNAL = 0.99
FISLCPKKMLDMILIFLNLLRLVLCPIVENVHGLMRR

SEQ ID NO: 45578 - protein, 26 aa, Homo sapiens
  MAP TO AC018560.3; EXPRESSED IN ADULT LIVER, SIGNAL = 0.52; EXPRESSED IN PLACENTA, SIGNAL = 0.56; EXPRESSED IN FETAL LIVER, SIGNAL = 0.54; EXPRESSED IN BRAIN, SIGNAL = 0.57; EXPRESSED IN BONE MARROW, SIGNAL = 0.52; EST_HUMAN HIT: T72327.1, EVALUE 5.40e-01
MRSLYVAQDGFNLLGSSNAPKQLKLK

SEQ ID NO: 45579 - protein, 34 aa, Homo sapiens
  MAP TO AP001433.1; EXPRESSED IN BONE MARROW, SIGNAL = 1.1; EXPRESSED IN LUNG, SIGNAL = 1.1; EXPRESSED IN PLACENTA, SIGNAL =   1; EXPRESSED IN ADULT LIVER, SIGNAL = 1.4; EXPRESSED IN FETAL LIVER, SIGNAL = 2.1; EXPRESSED IN BRAIN, SIGNAL = 1.1; EST_HUMAN HIT: BF525803.1, EVALUE 1.10e+00
CWRQLWWCWAGCGLMVSSVGWGRGVGWWGWRHAS

SEQ ID NO: 45580 - protein, 47 aa, Homo sapiens
  MAP TO AC018684.2; EXPRESSED IN ADULT LIVER, SIGNAL = 0.6; EXPRESSED IN BRAIN, SIGNAL = 0.49; EXPRESSED IN BONE MARROW, SIGNAL = 0.57; EXPRESSED IN PLACENTA, SIGNAL = 0.6; EXPRESSED IN FETAL LIVER, SIGNAL = 0.48; EST_HUMAN HIT: AW451251.1, EVALUE 1.20e-01
MNTQIQETQIVSNKMYPKKYTSTDIILKLSKSKTENFESSKIKAACH

SEQ ID NO: 45581 - protein, 29 aa, Homo sapiens [sequence omitted]

SEQ ID NO: 45582 - protein, 55 aa, Homo sapiens
  MAP TO AC015474.3; EXPRESSED IN LUNG, SIGNAL = 0.95; EXPRESSED IN ADULT LIVER, SIGNAL = 0.78; EXPRESSED IN FETAL LIVER, SIGNAL = 0.67; EXPRESSED IN BRAIN, SIGNAL = 0.58; EXPRESSED IN BONE MARROW, SIGNAL = 0.74; EXPRESSED IN PLACENTA, SIGNAL = 0.76; EST_HUMAN HIT: BE551991.1, EVALUE 4.00e-23; SWISSPROT HIT: O94788, EVALUE 3.00e-26
IDKKQYNKILELIQSGVAEGAKLECGGKGLGRKGFFIEPTVFSNVTDDMRIAKEE

SEQ ID NO: 45583 - protein, 54 aa, Homo sapiens
  MAP TO AC015474.3; EXPRESSED IN LUNG, SIGNAL = 0.95; EXPRESSED IN ADULT LIVER, SIGNAL = 0.78; EXPRESSED IN FETAL LIVER, SIGNAL = 0.67; EXPRESSED IN BRAIN, SIGNAL = 0.58; EXPRESSED IN BONE MARROW, SIGNAL = 0.74; EXPRESSED IN PLACENTA, SIGNAL = 0.76; EST_HUMAN HIT: BE551991.1, EVALUE 4.00e-18; SWISSPROT HIT: P00787, EVALUE 1.60e+00
LIRNSTTRSWNSSRVVWLRAPSWNVEAKDWAERGFSLSPQCFPTSLMICGLPRR

SEQ ID NO: 45584 - protein, 36 aa, Homo sapiens; identical to SEQ ID NO: 38205
  MAP TO AP001426.1; EXPRESSED IN BONE MARROW, SIGNAL = 0.73; EXPRESSED IN ADULT LIVER, SIGNAL = 0.52; EXPRESSED IN BRAIN, SIGNAL = 0.45; EXPRESSED IN FETAL LIVER, SIGNAL = 0.55; SWISSPROT HIT: Q90837, EVALUE 7.00e-16; EST_HUMAN HIT: BE828013.1, EVALUE 1.00e-14

SEQ ID NO: 45585 - protein, 51 aa, Homo sapiens
  MAP TO AC008958.3; EXPRESSED IN BRAIN, SIGNAL = 0.48; EXPRESSED IN BONE MARROW, SIGNAL = 0.52; EXPRESSED IN PLACENTA, SIGNAL = 0.49; EXPRESSED IN FETAL LIVER, SIGNAL = 0.64; SWISSPROT HIT: Q57984, EVALUE 1.60e+00; EST_HUMAN HIT: AW207853.1, EVALUE 3.80e+00
WQPSYENEQNLIYDKTDTLNGRIKEGNQIFKDTIEPIDQLIVKPDHSSYES

SEQ ID NO: 45586 - protein, 41 aa, Homo sapiens
  MAP TO AP001537.1; EXPRESSED IN LUNG, SIGNAL = 0.96; EXPRESSED IN ADULT LIVER, SIGNAL = 1.3; EXPRESSED IN FETAL LIVER, SIGNAL = 0.9; EXPRESSED IN BRAIN, SIGNAL = 1.1; EXPRESSED IN BONE MARROW, SIGNAL = 0.98; EXPRESSED IN PLACENTA, SIGNAL = 1.2
MTHTFFKTFCKGRHMVTGSMTFRESMKLGSMTQGTDIPEGK

SEQ ID NO: 45587 - protein, 105 aa, Homo sapiens
  MAP TO AC013332.4; EXPRESSED IN PLACENTA, SIGNAL = 0.49; EXPRESSED IN BRAIN, SIGNAL = 0.52; EXPRESSED IN BONE MARROW, SIGNAL = 0.53; SWISSPROT HIT: P08071, EVALUE 3.40e+00
CRREGLGWTSRSLRIPRGCHGIFRDTEVAGWDMELGVTPLILLELPLHDSFITQQSKQHFNWQLSDTEVREKKAQHTVEHDVELFRKIWSLSTFRPTTTVKRQLS

SEQ ID NO: 45588 - protein, 27 aa, Homo sapiens
  MAP TO AF241727.1; EXPRESSED IN BONE MARROW, SIGNAL = 0.65; EXPRESSED IN PLACENTA, SIGNAL = 0.57; EXPRESSED IN ADULT LIVER, SIGNAL = 0.66; EXPRESSED IN BRAIN, SIGNAL = 0.55; EXPRESSED IN FETAL LIVER, SIGNAL = 0.65; SWISSPROT HIT: P37699, EVALUE 5.00e+00
NTLLEANYNELHTIQGQQISSRHTAVN

SEQ ID NO: 45589 - protein, 25 aa, Homo sapiens
  MAP TO AF241727.1; EXPRESSED IN BONE MARROW, SIGNAL = 0.65; EXPRESSED IN PLACENTA, SIGNAL = 0.57; EXPRESSED IN ADULT LIVER, SIGNAL = 0.66; EXPRESSED IN BRAIN, SIGNAL = 0.55; EXPRESSED IN FETAL LIVER, SIGNAL = 0.65
THFWKPITMSFTRFKVSKSAADTLQ

SEQ ID NO: 45590 - protein, 18 aa, Homo sapiens
  MAP TO AL161777.1; EXPRESSED IN PLACENTA, SIGNAL = 0.65; EXPRESSED IN BONE MARROW, SIGNAL = 0.43; EXPRESSED IN ADULT LIVER, SIGNAL = 0.54; EXPRESSED IN BRAIN, SIGNAL = 0.44
WPCLAWDVSTNRKKYSIM

SEQ ID NO: 45591 - protein, 70 aa, Homo sapiens
  MAP TO AC011957.2; EXPRESSED IN ADULT LIVER, SIGNAL = 0.71; EXPRESSED IN PLACENTA, SIGNAL = 0.74; EXPRESSED IN FETAL LIVER, SIGNAL = 0.63; EXPRESSED IN BRAIN, SIGNAL = 2.9; EXPRESSED IN BONE MARROW, SIGNAL = 0.64; SWISSPROT HIT: P33485, EVALUE 6.70e+00; EST_HUMAN HIT: AI341249.1, EVALUE 1.00e-15
SSVGCPSSSPSSTTPTSHPSEAWTPAVSAPASAPPPAPATDMCHPPSESWSRACKGGRPGPGASPVTEPH

SEQ ID NO: 45592 - protein, 117 aa, Homo sapiens
  MAP TO AC018511.3; EXPRESSED IN PLACENTA, SIGNAL = 0.49; EXPRESSED IN BONE MARROW, SIGNAL = 0.62; EXPRESSED IN FETAL LIVER, SIGNAL = 0.54; EXPRESSED IN BRAIN, SIGNAL = 0.71; EST_HUMAN HIT: BE720017.1, EVALUE 5.00e-24; SWISSPROT HIT: P51281, EVALUE 9.20e+00
AERLMEQASCWEKEEQEILSTRANSRQSPAKVQSKNKYLHSPESRPVTGERGQLLELSKESSEEEEEEEDEEEEEEEEEEEEDEEEEEEEEEEEEEENIQSSPPRLTKPQSVAIKRK

SEQ ID NO: 45593 - protein, 42 aa, Homo sapiens
  MAP TO AL122058.19; EXPRESSED IN PLACENTA, SIGNAL = 0.7; EXPRESSED IN FETAL LIVER, SIGNAL = 0.64; EXPRESSED IN BRAIN, SIGNAL = 0.52; EXPRESSED IN ADULT LIVER, SIGNAL = 0.71; EXPRESSED IN BONE MARROW, SIGNAL = 0.6; EST_HUMAN HIT: BF680976.1, EVALUE 4.10e+00
HTGNRPVMLASIGRLTDPEKPTQGRRTRVRNRQEPRQVRGHS

SEQ ID NO: 45594 - protein, 28 aa, Homo sapiens
  MAP TO AC021000.3; EXPRESSED IN ADULT LIVER, SIGNAL = 0.54; EXPRESSED IN FETAL LIVER, SIGNAL = 0.58; EXPRESSED IN BRAIN, SIGNAL = 0.65; EXPRESSED IN BONE MARROW, SIGNAL = 0.52; EXPRESSED IN PLACENTA, SIGNAL = 0.54
LFLTLSDVFLKLNNDHVFLKTHRNVLRR

SEQ ID NO: 45595 - protein, 37 aa, Homo sapiens
  MAP TO AC025324.2; EXPRESSED IN PLACENTA, SIGNAL = 0.88; EXPRESSED IN ADULT LIVER, SIGNAL = 0.89; EXPRESSED IN FETAL LIVER, SIGNAL = 0.73; EXPRESSED IN BONE MARROW, SIGNAL = 0.76; EXPRESSED IN BRAIN, SIGNAL = 0.51; EST_HUMAN HIT: BF209274.1, EVALUE 1.90e+00; SWISSPROT HIT: P78363, EVALUE 6.40e+00
VSSWLTVKGIPRTPVGKWGQVGTGWTPPSCRCSTRTR

SEQ ID NO: 45596 - protein, 54 aa, Homo sapiens
  MAP TO AC018780.3; EXPRESSED IN PLACENTA, SIGNAL = 0.6; EXPRESSED IN BONE MARROW, SIGNAL = 0.99; EXPRESSED IN ADULT LIVER, SIGNAL = 1.3; EXPRESSED IN FETAL LIVER, SIGNAL = 0.89; EXPRESSED IN BRAIN, SIGNAL = 1.3; EST_HUMAN HIT: D20772.1, EVALUE 2.00e-24; SWISSPROT HIT: Q07286, EVALUE 1.60e+00
LILEQRCGKGKWRNALLSVSFSVPQLQMQKVSLDSTPLNVNHDKMDIWKLTPKL

SEQ ID NO: 45597 - protein, 45 aa, Homo sapiens
  MAP TO AC009155.3; EXPRESSED IN ADULT LIVER, SIGNAL = 0.68; EXPRESSED IN BRAIN, SIGNAL = 0.89; EXPRESSED IN PLACENTA, SIGNAL = 0.71; EXPRESSED IN FETAL LIVER, SIGNAL = 0.62; EXPRESSED IN BONE MARROW, SIGNAL = 0.56; EST_HUMAN HIT: AV724632.1, EVALUE 1.00e-19; SWISSPROT HIT: P54707, EVALUE 8.20e+00
VDARSDRTGEVIFKDNFSSAIAGVVEGDYRMDGHIQLICCSVDGE

SEQ ID NO: 45598 - protein, 67 aa, Homo sapiens
  MAP TO AF240628.1; EXPRESSED IN BRAIN, SIGNAL = 0.86; EXPRESSED IN LUNG, SIGNAL = 5.5; EXPRESSED IN PLACENTA, SIGNAL = 6.6; EXPRESSED IN ADULT LIVER, SIGNAL = 3.3; EXPRESSED IN HELA, SIGNAL = 9.7; EXPRESSED IN FETAL LIVER, SIGNAL = 8.2; EXPRESSED IN BONE MARROW, SIGNAL = 1.2; EST_HUMAN HIT: AA307774.1, EVALUE 3.00e-24; SWISSPROT HIT: P05784, EVALUE 4.00e-26
IDNARIAANDFRVTYESELAMHQSVESNIHGLHKIADDTNVTQLQLETEMEALKEELLFMKKNHEVE

SEQ ID NO: 45599 - protein, 76 aa, Homo sapiens
  MAP TO AF240628.1; EXPRESSED IN BRAIN, SIGNAL = 0.86; EXPRESSED IN LUNG, SIGNAL = 5.5; EXPRESSED IN PLACENTA, SIGNAL = 6.6; EXPRESSED IN ADULT LIVER, SIGNAL = 3.3; EXPRESSED IN HELA, SIGNAL = 9.7; EXPRESSED IN FETAL LIVER, SIGNAL = 8.2; EXPRESSED IN BONE MARROW, SIGNAL = 1.2; EST_HUMAN HIT: AA307393.1, EVALUE 4.00e-28; SWISSPROT HIT: Q64375, EVALUE 7.10e+00
VLISSQILWIVPASFCRSTMPVLLLMTLESRMSQSWPCTSLWRATSMGSTRSLMTPMSLNCSWRQRWKLSRRSCSS

SEQ ID NO: 45600 - protein, 65 aa, Homo sapiens
  MAP TO AC022860.3; EXPRESSED IN LUNG, SIGNAL = 0.87; EXPRESSED IN PLACENTA, SIGNAL = 0.84; EXPRESSED IN ADULT LIVER, SIGNAL = 0.95; EXPRESSED IN BRAIN, SIGNAL = 1.2; EXPRESSED IN BONE MARROW, SIGNAL = 0.81; EXPRESSED IN FETAL LIVER, SIGNAL = 1.2; EST_HUMAN HIT: BF027504.1, EVALUE 2.00e-06; SWISSPROT HIT: Q04616, EVALUE 5.90e+00
APMPGARRGRALVGPHVLGGKRNTGVDAAVQATCRDRLPRESPLGLPERCAAMVGGRGDARHRLG

SEQ ID NO: 45601 - protein, 36 aa, Homo sapiens
  MAP TO AC016282.3; EXPRESSED IN PLACENTA, SIGNAL = 1.1; EXPRESSED IN FETAL LIVER, SIGNAL = 1.1; EXPRESSED IN LUNG, SIGNAL = 1.1; EXPRESSED IN ADULT LIVER, SIGNAL = 0.89; EXPRESSED IN BRAIN, SIGNAL = 0.96; EXPRESSED IN BONE MARROW, SIGNAL =   1; SWISSPROT HIT: Q02418, EVALUE 8.40e+00
GPFCTVITSAIDEIVPPHLHKQNVLLVFEIFANLMI

SEQ ID NO: 45602 - protein, 32 aa, Homo sapiens
  MAP TO AC022843.3; EXPRESSED IN ADULT LIVER, SIGNAL = 0.86; EXPRESSED IN PLACENTA, SIGNAL = 0.84; EXPRESSED IN FETAL LIVER, SIGNAL = 0.84; EXPRESSED IN BRAIN, SIGNAL = 1.3; EXPRESSED IN BONE MARROW, SIGNAL = 0.73; SWISSPROT HIT: Q24311, EVALUE 5.00e+00
VRNGLLMIKTPTDDLLSEKCMETMVLKHISFH

SEQ ID NO: 45603 - protein, 34 aa, Homo sapiens
  MAP TO AC013785.4; EXPRESSED IN PLACENTA, SIGNAL = 0.74; EXPRESSED IN ADULT LIVER, SIGNAL = 0.61; EXPRESSED IN FETAL LIVER, SIGNAL = 0.77; EXPRESSED IN BRAIN, SIGNAL = 0.7; EXPRESSED IN BONE MARROW, SIGNAL = 0.68
LTGRQSFIHSASKQASTMSLDATWTTITKEIDKS

SEQ ID NO: 45604 - protein, 18 aa, Homo sapiens
  MAP TO AC021468.2; EXPRESSED IN LUNG, SIGNAL =   1; EXPRESSED IN PLACENTA, SIGNAL = 0.84; EXPRESSED IN ADULT LIVER, SIGNAL = 0.75; EXPRESSED IN FETAL LIVER, SIGNAL = 0.92; EXPRESSED IN BRAIN, SIGNAL = 1.1; EXPRESSED IN BONE MARROW, SIGNAL = 0.75
ASPPPPASPPCARARTGL

SEQ ID NO: 45605 - protein, 41 aa, Homo sapiens
  MAP TO AC021782.2; EXPRESSED IN ADULT LIVER, SIGNAL = 0.55; EXPRESSED IN BRAIN, SIGNAL = 0.59; EXPRESSED IN PLACENTA, SIGNAL = 0.5; EXPRESSED IN FETAL LIVER, SIGNAL = 0.48; EST_HUMAN HIT: T06397.1, EVALUE 9.00e-15; SWISSPROT HIT: P50851, EVALUE 9.00e-10
QLHDFWRLDYWEDDLRRRRRFVRNAFGSTHAEALLKAAIEY

SEQ ID NO: 45606 - protein, 34 aa, Homo sapiens
  MAP TO AC021782.2; EXPRESSED IN ADULT LIVER, SIGNAL = 0.55; EXPRESSED IN BRAIN, SIGNAL = 0.59; EXPRESSED IN PLACENTA, SIGNAL = 0.5; EXPRESSED IN FETAL LIVER, SIGNAL = 0.48; SWISSPROT HIT: P30010, EVALUE 6.50e+00; EST_HUMAN HIT: T06397.1, EVALUE 4.00e-14
NCMISGVWITGKMIFVEGDDLFAMHLAPLMLKHC

SEQ ID NO: 45607 - protein, 48 aa, Homo sapiens
  MAP TO AC022050.2; EXPRESSED IN LUNG, SIGNAL = 1.4; EXPRESSED IN PLACENTA, SIGNAL = 1.2; EXPRESSED IN ADULT LIVER, SIGNAL = 1.4; EXPRESSED IN FETAL LIVER, SIGNAL = 1.2; EXPRESSED IN BRAIN, SIGNAL = 1.2; EXPRESSED IN BONE MARROW, SIGNAL = 1.1; EST_HUMAN HIT: BE049488.1, EVALUE 3.00e+00; SWISSPROT HIT: O32155, EVALUE 8.10e+00
EAVFSLIDVNVNHKDLQTLCQLMVRAPVFLQIFMPVFQYCSFMIPEKS

SEQ ID NO: 45608 - protein, 46 aa, Homo sapiens
  MAP TO AC009155.3; EXPRESSED IN ADULT LIVER, SIGNAL = 0.65; EXPRESSED IN FETAL LIVER, SIGNAL = 0.62; EXPRESSED IN BRAIN, SIGNAL = 0.98; EST_HUMAN HIT: AL138321.1, EVALUE 5.00e-11; SWISSPROT HIT: P45891, EVALUE 8.20e+00
RGYLPGTAEMRGNLMDTSAEQDLIRELSQKKQNLLLELRNYEENAK

SEQ ID NO: 45609 - protein, 79 aa, Homo sapiens
  MAP TO AC013644.3; EXPRESSED IN PLACENTA, SIGNAL = 0.89; EXPRESSED IN ADULT LIVER, SIGNAL = 1.1; EXPRESSED IN FETAL LIVER, SIGNAL = 1.2; EXPRESSED IN BRAIN, SIGNAL = 1.3; EXPRESSED IN LUNG, SIGNAL =   1; EXPRESSED IN BONE MARROW, SIGNAL = 1.1; EST_HUMAN HIT: BE792457.1, EVALUE 2.50e-01; SWISSPROT HIT: P34133, EVALUE 3.10e-01
TPGCAKYIIPMQGNFTSTIALPPPPHSVPAQCSPSPMTVSFPSMRLQMSFPGIILMKGNEKTLTIFINYILGFYKNKFI

SEQ ID NO: 45610 - protein, 59 aa, Homo sapiens [sequence omitted]

SEQ ID NO: 45611 - protein, 37 aa, Homo sapiens
  MAP TO AC013332.4; EXPRESSED IN FETAL LIVER, SIGNAL = 0.53; EXPRESSED IN BRAIN, SIGNAL = 0.51; EXPRESSED IN BONE MARROW, SIGNAL = 0.48
GMGRASASPSRTSRSVWPALVLPLPRCSAAGCSLRVA

SEQ ID NO: 45612 - protein, 31 aa, Homo sapiens
  MAP TO AC013332.4; EXPRESSED IN FETAL LIVER, SIGNAL = 0.53; EXPRESSED IN BRAIN, SIGNAL = 0.51; EXPRESSED IN BONE MARROW, SIGNAL = 0.48; EST_HUMAN HIT: BE910713.1, EVALUE 7.70e+00; SWISSPROT HIT: Q02432, EVALUE 5.00e+00
CNSQGTACSRTSWQGEDKSWPDTSGSSGRRC

SEQ ID NO: 45613 - protein, 53 aa, Homo sapiens
  MAP TO AC008616.2; EXPRESSED IN PLACENTA, SIGNAL = 0.47; EXPRESSED IN BONE MARROW, SIGNAL = 0.5; EXPRESSED IN ADULT LIVER, SIGNAL = 0.53; EXPRESSED IN FETAL LIVER, SIGNAL = 0.55; EXPRESSED IN BRAIN, SIGNAL = 0.47; SWISSPROT HIT: P28320, EVALUE 3.00e-06; EST_HUMAN HIT: BF309922.1, EVALUE 1.00e-23
MLPRRCKTCGEYIYKGKKFNARKETVQNEVYLGLPIFRFYIKCTRCLAEITFK

SEQ ID NO: 45614 - protein, 48 aa, Homo sapiens
  MAP TO AC008616.2; EXPRESSED IN PLACENTA, SIGNAL = 0.47; EXPRESSED IN BONE MARROW, SIGNAL = 0.5; EXPRESSED IN ADULT LIVER, SIGNAL = 0.53; EXPRESSED IN FETAL LIVER, SIGNAL = 0.55; EXPRESSED IN BRAIN, SIGNAL = 0.47; SWISSPROT HIT: P26545, EVALUE 8.10e+00; EST_HUMAN HIT: BE894066.1, EVALUE 1.00e-21
VRRAENTSTRGRNSMLGRRRCRTRSTWACPSSAFTSSARAAWQRSPSR

SEQ ID NO: 45615 - protein, 43 aa, Homo sapiens
  MAP TO AC008506.4; EXPRESSED IN ADULT LIVER, SIGNAL = 0.61; EXPRESSED IN BRAIN, SIGNAL = 0.47; EXPRESSED IN FETAL LIVER, SIGNAL = 0.55; EXPRESSED IN BONE MARROW, SIGNAL = 0.51; EST_HUMAN HIT: AW137078.1, EVALUE 5.00e-05; SWISSPROT HIT: P11369, EVALUE 3.00e-05
QAIDPDSFHGEFYLMLKEKGISIIYKIFQKVKKENTVSSSFYE

SEQ ID NO: 45616 - protein, 64 aa, Homo sapiens
  MAP TO AC007956.5; EXPRESSED IN LUNG, SIGNAL = 1.1; EXPRESSED IN PLACENTA, SIGNAL = 0.6; EXPRESSED IN ADULT LIVER, SIGNAL = 0.87; EXPRESSED IN BRAIN, SIGNAL = 1.2; EXPRESSED IN BONE MARROW, SIGNAL = 1.2; EXPRESSED IN FETAL LIVER, SIGNAL = 1.3; EST_HUMAN HIT: BE835643.1, EVALUE 1.50e+00; SWISSPROT HIT: P49750, EVALUE 2.30e-01
HAGQRDRYDRERDREPYFDRQSNVIADHRDFKRDRETHRDRDRDRGVIDYDRDRFDRERRPRDD

SEQ ID NO: 45617 - protein, 130 aa, Homo sapiens
  MAP TO AC011815.2; EXPRESSED IN PLACENTA, SIGNAL = 0.94; EXPRESSED IN ADULT LIVER, SIGNAL = 1.1; EXPRESSED IN BRAIN, SIGNAL = 0.97; EXPRESSED IN BONE MARROW, SIGNAL = 0.75; EXPRESSED IN LUNG, SIGNAL = 1.1; EXPRESSED IN FETAL LIVER, SIGNAL = 0.79; EST_HUMAN HIT: AW964113.1, EVALUE 4.00e-56; SWISSPROT HIT: P28160, EVALUE 1.30e+00
GRMVAGKVLMAKQEIVECVASAAMISPGKLPGETHSQRIAEEALGGLDNSKKQKGNAAGNKISQLPSQDRHFSLATFNRRIPTEHSVLESHESEGSFSMNSNDITQQSVDIGKSSMSALTVGRPFARAQS

SEQ ID NO: 45618 - protein, 62 aa, Homo sapiens
  MAP TO AC016948.4; EXPRESSED IN FETAL LIVER, SIGNAL = 0.5; EXPRESSED IN BONE MARROW, SIGNAL = 0.46; EXPRESSED IN BRAIN, SIGNAL = 0.49; SWISSPROT HIT: O95843, EVALUE 3.00e-32; EST_HUMAN HIT: AA364442.1, EVALUE 1.00e-30
MGNGKSIAGDQKAVPTQETHVWYRTFMMEYPSGLQTLHEFKTLLGLQGLNQKANKHIDQVYN

SEQ ID NO: 45619 - protein, 60 aa, Homo sapiens [sequence omitted]

SEQ ID NO: 45620 - protein, 54 aa, Homo sapiens
  MAP TO AL162471.1; EXPRESSED IN PLACENTA, SIGNAL = 0.54; EXPRESSED IN FETAL LIVER, SIGNAL = 0.47; EXPRESSED IN BRAIN, SIGNAL = 0.51; EXPRESSED IN BONE MARROW, SIGNAL = 0.43; SWISSPROT HIT: Q14142, EVALUE 5.40e-01; EST_HUMAN HIT: AI344951.1, EVALUE 3.30e-01
ILVDNGEETLQDINNLTDKLRERDEKMQHVSTWLRGSLEGLRLLVEQESPMDLL

SEQ ID NO: 45621 - protein, 25 aa, Homo sapiens
  MAP TO AC008166.2; EXPRESSED IN LUNG, SIGNAL = 1.1; EXPRESSED IN PLACENTA, SIGNAL = 0.88; EXPRESSED IN ADULT LIVER, SIGNAL = 1.1; EXPRESSED IN BRAIN, SIGNAL = 0.94; EXPRESSED IN BONE MARROW, SIGNAL = 0.91; EXPRESSED IN FETAL LIVER, SIGNAL =   1
LEGEEGWGEEGGEQGEEGERKVGGE

SEQ ID NO: 45622 - protein, 32 aa, Homo sapiens
  MAP TO AC011218.4; EXPRESSED IN ADULT LIVER, SIGNAL = 0.6; EXPRESSED IN BRAIN, SIGNAL = 0.65; EXPRESSED IN BONE MARROW, SIGNAL = 0.66; EXPRESSED IN PLACENTA, SIGNAL = 0.81; EXPRESSED IN FETAL LIVER, SIGNAL = 0.63; EST_HUMAN HIT: AU150427.1, EVALUE 2.30e-01
LKLQWAQPAPLFNIRQGPNEGDNQQGSYWEAL

SEQ ID NO: 45623 - protein, 37 aa, Homo sapiens
  MAP TO AL121747.19; EXPRESSED IN LUNG, SIGNAL = 0.87; EXPRESSED IN PLACENTA, SIGNAL =   1; EXPRESSED IN ADULT LIVER, SIGNAL = 0.75; EXPRESSED IN FETAL LIVER, SIGNAL =   1; EXPRESSED IN BRAIN, SIGNAL = 0.87; EXPRESSED IN BONE MARROW, SIGNAL = 0.84; SWISSPROT HIT: P33674, EVALUE 5.00e-15; EST_HUMAN HIT: BE868831.1, EVALUE 6.00e-14
ISSVPTPSPLGPLAGSPVIAAANPLGMPVPAAAGAQQ

SEQ ID NO: 45624 - protein, 22 aa, Homo sapiens
  MAP TO AL121747.19; EXPRESSED IN LUNG, SIGNAL = 0.87; EXPRESSED IN PLACENTA, SIGNAL =   1; EXPRESSED IN ADULT LIVER, SIGNAL = 0.75; EXPRESSED IN FETAL LIVER, SIGNAL =   1; EXPRESSED IN BRAIN, SIGNAL = 0.87; EXPRESSED IN BONE MARROW, SIGNAL = 0.84; EST_HUMAN HIT: AI024440.1, EVALUE 1.00e-06
LLLSASGSWNRHPKGVGSSNHW

SEQ ID NO: 45625 - protein, 68 aa, Homo sapiens
  MAP TO AC019126.3; EXPRESSED IN PLACENTA, SIGNAL =   1; EXPRESSED IN FETAL LIVER, SIGNAL = 0.81; EXPRESSED IN BRAIN, SIGNAL = 0.81; EXPRESSED IN BONE MARROW, SIGNAL = 0.77; EXPRESSED IN ADULT LIVER, SIGNAL = 0.97; EST_HUMAN HIT: AU154589.1, EVALUE 7.00e-20
ELGSDEDDIDEDGQEYLEILAKQAGEDGDDEDWEEDDAEETALEGYSTIIDDEDNPVDEYQIFKAIFQ

SEQ ID NO: 45626 - protein, 69 aa, Homo sapiens
  MAP TO AC019126.3; EXPRESSED IN PLACENTA, SIGNAL =   1; EXPRESSED IN FETAL LIVER, SIGNAL = 0.81; EXPRESSED IN BRAIN, SIGNAL = 0.81; EXPRESSED IN BONE MARROW, SIGNAL = 0.77; EXPRESSED IN ADULT LIVER, SIGNAL = 0.97; EST_HUMAN HIT: AU154589.1, EVALUE 1.00e-23
RNWGVMKMILMKMGKNIWRFWLSRLVKMEMMKIGKKMMLKRLLWKAIPQSLMMKITLLMSIRYLKLSFK

SEQ ID NO: 45627 - protein, 154 aa, Homo sapiens
  MAP TO AL161668.1; EXPRESSED IN PLACENTA, SIGNAL = 0.64; EXPRESSED IN FETAL LIVER, SIGNAL = 0.53; EXPRESSED IN BONE MARROW, SIGNAL = 0.61; EXPRESSED IN ADULT LIVER, SIGNAL = 0.58; EXPRESSED IN BRAIN, SIGNAL = 0.68; SWISSPROT HIT: P81649, EVALUE 2.00e-42; EST_HUMAN HIT: AW406516.1, EVALUE 2.00e-38
MAPARAGCCPLLLLLLGLWVAEVLVRAKPKDMTSSQWFKTQHVQPSPQACNSAMSIINKYTERCKDLNTFLHEPFSSVAITCQTPNIACKNSCKNCHQSHGPMSLTMGELTSGKYPNCRYKEKHLNTPYIVACDPPQQGDPGYPLVPVHLDKVV

SEQ ID NO: 45628 - protein, 25 aa, Homo sapiens
  MAP TO AL161668.1; EXPRESSED IN PLACENTA, SIGNAL = 0.64; EXPRESSED IN FETAL LIVER, SIGNAL = 0.53; EXPRESSED IN BONE MARROW, SIGNAL = 0.61; EXPRESSED IN ADULT LIVER, SIGNAL = 0.58; EXPRESSED IN BRAIN, SIGNAL = 0.68
DLCHPQPQKQQQQGAASCSGRCHLS

SEQ ID NO: 45629 - protein, 33 aa, Homo sapiens; identical to SEQ ID NO: 45386
  MAP TO AL117383.18; EXPRESSED IN BONE MARROW, SIGNAL = 0.68; EXPRESSED IN ADULT LIVER, SIGNAL = 0.71; EXPRESSED IN FETAL LIVER, SIGNAL = 0.57; EXPRESSED IN BRAIN, SIGNAL = 0.69; EXPRESSED IN PLACENTA, SIGNAL = 0.75

SEQ ID NO: 45630 - protein, 65 aa, Homo sapiens
  MAP TO AC022555.2; EXPRESSED IN ADULT LIVER, SIGNAL = 1.3; EXPRESSED IN BRAIN, SIGNAL = 1.1; EXPRESSED IN LUNG, SIGNAL = 1.2; EXPRESSED IN PLACENTA, SIGNAL = 1.2; EXPRESSED IN FETAL LIVER, SIGNAL = 0.84; EXPRESSED IN BONE MARROW, SIGNAL = 0.68; EST_HUMAN HIT: AU147524.1, EVALUE 4.00e-24; SWISSPROT HIT: P36853, EVALUE 8.90e-01
DIKPQFIRPLVFGGMNLTRDELEWKLSQSGEINTDLEENPKKPTEDVLLSLVWCSVLMKRDSDSK

SEQ ID NO: 45631 - protein, 53 aa, Homo sapiens
  MAP TO AL109930.5; EXPRESSED IN PLACENTA, SIGNAL = 0.51; EXPRESSED IN BRAIN, SIGNAL = 0.5; EXPRESSED IN ADULT LIVER, SIGNAL = 0.51; EXPRESSED IN FETAL LIVER, SIGNAL = 0.49; EXPRESSED IN BONE MARROW, SIGNAL = 0.47; SWISSPROT HIT: P25962, EVALUE 9.20e-01
MTLNWNDVFITQRRHKVLLKHTQLVTDMSPDHRPQTPSTSVSPKVGGNAGGRQ

SEQ ID NO: 45632 - protein, 57 aa, Homo sapiens
  MAP TO AC021976.3; EXPRESSED IN LUNG, SIGNAL = 1.8; EXPRESSED IN PLACENTA, SIGNAL = 1.8; EXPRESSED IN ADULT LIVER, SIGNAL = 1.3; EXPRESSED IN FETAL LIVER, SIGNAL = 1.6; EXPRESSED IN BRAIN, SIGNAL = 1.9; EXPRESSED IN BONE MARROW, SIGNAL = 1.6; SWISSPROT HIT: P42841, EVALUE 4.00e-08; EST_HUMAN HIT: N57723.1, EVALUE 1.00e-29
VFLWNMDKYTMIRKLEGHHHDVVACDFSPDGALLATASYDTRVYIWDPHNGDILMEF

SEQ ID NO: 45633 - protein, 42 aa, Homo sapiens
  MAP TO AC008688.4; EXPRESSED IN LUNG, SIGNAL = 0.95; EXPRESSED IN BRAIN, SIGNAL = 0.8; EXPRESSED IN BONE MARROW, SIGNAL = 0.69; EXPRESSED IN ADULT LIVER, SIGNAL = 0.8; EXPRESSED IN PLACENTA, SIGNAL = 0.86; EXPRESSED IN FETAL LIVER, SIGNAL = 0.8
MYNEDHYDREEKEKGKDDQRNDQIFSGWIYLSRMLGWILELQ

SEQ ID NO: 45634 - protein, 45 aa, Homo sapiens
  MAP TO AC013698.3; EXPRESSED IN PLACENTA, SIGNAL = 0.73; EXPRESSED IN ADULT LIVER, SIGNAL = 0.98; EXPRESSED IN FETAL LIVER, SIGNAL = 0.92; EXPRESSED IN BRAIN, SIGNAL =   1; EXPRESSED IN LUNG, SIGNAL = 0.9; EXPRESSED IN BONE MARROW, SIGNAL = 0.75; SWISSPROT HIT: P49441, EVALUE 4.00e-07; EST_HUMAN HIT: AA280804.1, EVALUE 6.00e-06
LLIEEKKEGEKNKKFAVDFKTLADVLVQEVIKQNMENKVRKVIAK

SEQ ID NO: 45635 - protein, 48 aa, Homo sapiens
  MAP TO AC013698.3; EXPRESSED IN PLACENTA, SIGNAL = 0.73; EXPRESSED IN ADULT LIVER, SIGNAL = 0.98; EXPRESSED IN FETAL LIVER, SIGNAL = 0.92; EXPRESSED IN BRAIN, SIGNAL =   1; EXPRESSED IN LUNG, SIGNAL = 0.9; EXPRESSED IN BONE MARROW, SIGNAL = 0.75; SWISSPROT HIT: P22174, EVALUE 1.60e+00; EST_HUMAN HIT: AW166431.1, EVALUE 2.00e-21
GGCQFHQQLQLKSKVQKCQISSGSCSVSLRRLLTLPGRADSRKPSSSC

SEQ ID NO: 45636 - protein, 77 aa, Homo sapiens
  MAP TO AC022045.2; EXPRESSED IN ADULT LIVER, SIGNAL = 0.96; EXPRESSED IN FETAL LIVER, SIGNAL = 1.2; EXPRESSED IN BONE MARROW, SIGNAL = 0.79; EXPRESSED IN LUNG, SIGNAL = 1.3; EXPRESSED IN PLACENTA, SIGNAL =   1; EXPRESSED IN BRAIN, SIGNAL = 0.97; SWISSPROT HIT: O94956, EVALUE 1.00e-40; EST_HUMAN HIT: AI668650.1, EVALUE 3.00e-27
DMPQDFKASLCLPTTSAPASAPSNGNCSSYTETQHLSVVGIMFVAQTLLGVGGVPIQPFGISYIDDFAHNSNSPLYL

SEQ ID NO: 45637 - protein, 36 aa, Homo sapiens
  MAP TO AC022045.2; EXPRESSED IN ADULT LIVER, SIGNAL = 0.96; EXPRESSED IN FETAL LIVER, SIGNAL = 1.2; EXPRESSED IN BONE MARROW, SIGNAL = 0.79; EXPRESSED IN LUNG, SIGNAL = 1.3; EXPRESSED IN PLACENTA, SIGNAL =   1; EXPRESSED IN BRAIN, SIGNAL = 0.97
RICHRTSRLPCACPQPRPQPRPPPMATAQATQKPSI

SEQ ID NO: 45638 - protein, 87 aa, Homo sapiens; identical to SEQ ID NO: 41358
  MAP TO AL139117.3; EXPRESSED IN FETAL LIVER, SIGNAL = 0.57; EXPRESSED IN BONE MARROW, SIGNAL = 0.76; EXPRESSED IN PLACENTA, SIGNAL = 0.72; EXPRESSED IN ADULT LIVER, SIGNAL = 0.72; EXPRESSED IN BRAIN, SIGNAL = 0.74; SWISSPROT HIT: P43630, EVALUE 1.00e-35; EST_HUMAN HIT: AW951147.1, EVALUE 1.00e-34

SEQ ID NO: 45639 - protein, 55 aa, Homo sapiens
  MAP TO AC016648.3; EXPRESSED IN ADULT LIVER, SIGNAL = 0.73; EXPRESSED IN BRAIN, SIGNAL = 0.56; EXPRESSED IN BONE MARROW, SIGNAL = 0.57; EXPRESSED IN PLACENTA, SIGNAL = 0.81; EXPRESSED IN FETAL LIVER, SIGNAL = 0.51; EST_HUMAN HIT: AA584086.1, EVALUE 2.80e+00; SWISSPROT HIT: P19623, EVALUE 3.50e+00
ILHFSSGTKAPRGGWAKESGLNWKEKELSIQFHPLSHLILTLDVLEGMAFSYITK

SEQ ID NO: 45640 - protein, 20 aa, Homo sapiens
  MAP TO AC016648.3; EXPRESSED IN ADULT LIVER, SIGNAL = 0.73; EXPRESSED IN BRAIN, SIGNAL = 0.56; EXPRESSED IN BONE MARROW, SIGNAL = 0.57; EXPRESSED IN PLACENTA, SIGNAL = 0.81; EXPRESSED IN FETAL LIVER, SIGNAL = 0.51
FFTSPLVPKPQGEDGQRRVV

SEQ ID NO: 45641 - protein, 73 aa, Homo sapiens
  MAP TO AC007321.2; EXPRESSED IN LUNG, SIGNAL = 1.1; EXPRESSED IN BONE MARROW, SIGNAL = 0.82; EXPRESSED IN PLACENTA, SIGNAL = 1.2; EXPRESSED IN ADULT LIVER, SIGNAL = 0.9; EXPRESSED IN FETAL LIVER, SIGNAL = 0.75; EXPRESSED IN BRAIN, SIGNAL = 0.91; SWISSPROT HIT: P30657, EVALUE 3.30e+00; EST_HUMAN HIT: BF129261.1, EVALUE 5.30e+00
INFQPPSTEYSLISTRFTPTPATIKKLLSTTNNISRSSLKLITAQMDNSVKPISHQISDIEHVDRSLSTNLSL

SEQ ID NO: 45642 - protein, 28 aa, Homo sapiens
  MAP TO AL161445.2; EXPRESSED IN BONE MARROW, SIGNAL = 0.43; EXPRESSED IN PLACENTA, SIGNAL = 0.47; EXPRESSED IN BRAIN, SIGNAL = 0.48
MQSQVSVHPPVGNAKADERSSAGEECKA

SEQ ID NO: 45643 - protein, 51 aa, Homo sapiens
  MAP TO AC016498.4; EXPRESSED IN LUNG, SIGNAL = 0.95; EXPRESSED IN PLACENTA, SIGNAL = 0.81; EXPRESSED IN ADULT LIVER, SIGNAL = 1.2; EXPRESSED IN BONE MARROW, SIGNAL = 1.1; EXPRESSED IN BRAIN, SIGNAL = 1.6; EXPRESSED IN HELA, SIGNAL = 2.9; EXPRESSED IN FETAL LIVER, SIGNAL = 1.2; EST_HUMAN HIT: BE962816.2, EVALUE 6.00e-22; SWISSPROT HIT: P38126, EVALUE 4.00e-06
HSNVVILTTSNITEKIDVAFVDRADIKQYIGPPSAAAIFKIYLSCLEELMK

SEQ ID NO: 45644 - protein, 75 aa, Homo sapiens
  MAP TO AC016549.4; EXPRESSED IN PLACENTA, SIGNAL = 0.61; EXPRESSED IN ADULT LIVER, SIGNAL = 0.53; EXPRESSED IN BRAIN, SIGNAL = 0.55; SWISSPROT HIT: O75962, EVALUE 3.00e-21; EST_HUMAN HIT: AI149796.1, EVALUE 4.00e-21
NVYVNINRIMSVANRLVESGHYASQQIRQIASQLEQEWKAFAAALDEREHLAGHVLHFPPEGRKGQCLEPPAHEV

SEQ ID NO: 45645 - protein, 44 aa, Homo sapiens
  MAP TO AC013698.3; EXPRESSED IN ADULT LIVER, SIGNAL = 0.67; EXPRESSED IN BRAIN, SIGNAL = 0.58; EXPRESSED IN BONE MARROW, SIGNAL = 0.55; EXPRESSED IN PLACENTA, SIGNAL = 0.62; EST_HUMAN HIT: BF195479.1, EVALUE 8.00e-20
LFCTEQSCFQRQPPLARPGRKKFLSPLIKQINCVCSKAFLLRRK

SEQ ID NO: 45646 - protein, 39 aa, Homo sapiens [sequence omitted]

SEQ ID NO: 45647 - protein, 32 aa, Homo sapiens [sequence omitted]

SEQ ID NO: 45648 - protein, 90 aa, Homo sapiens
  MAP TO AC018386.3; EXPRESSED IN ADULT LIVER, SIGNAL =   1; EXPRESSED IN FETAL LIVER, SIGNAL = 0.73; EXPRESSED IN BRAIN, SIGNAL = 0.86; EXPRESSED IN BONE MARROW, SIGNAL = 0.82; EXPRESSED IN LUNG, SIGNAL = 0.97; EXPRESSED IN PLACENTA, SIGNAL = 1.1; SWISSPROT HIT: P47579, EVALUE 9.70e-01; EST_HUMAN HIT: AV731382.1, EVALUE 2.00e-10
NYTIEDATVATEKAVKAIKPKTINSYWKNCVQMLCMTLRTYNRDNQTNHERDSGYGKNDVLEGGSRYESWRILELIDSTQEELMEGDLME

SEQ ID NO: 45649 - protein, 38 aa, Homo sapiens
  MAP TO AC019159.3; EXPRESSED IN ADULT LIVER, SIGNAL = 0.64; EXPRESSED IN BRAIN, SIGNAL = 0.5; EXPRESSED IN BONE MARROW, SIGNAL = 0.44; EXPRESSED IN PLACENTA, SIGNAL = 0.62
ASHSVRAVPFRHTWPRVPVNSDQEEVVRNVSLCICVLT

SEQ ID NO: 45650 - protein, 36 aa, Homo sapiens
  MAP TO AC011111.3; EXPRESSED IN LUNG, SIGNAL = 0.84; EXPRESSED IN ADULT LIVER, SIGNAL = 0.99; EXPRESSED IN BONE MARROW, SIGNAL = 0.88; EXPRESSED IN BRAIN, SIGNAL =   1; EXPRESSED IN PLACENTA, SIGNAL = 0.76; EXPRESSED IN FETAL LIVER, SIGNAL = 0.88; EST_HUMAN HIT: BE881961.1, EVALUE 1.00e-13
EEAPPDGAVAEYRREKQKYEALRKQQSKKGTSREDQ

SEQ ID NO: 45651 - protein, 21 aa, Homo sapiens
  MAP TO AC011111.3; EXPRESSED IN LUNG, SIGNAL = 0.84; EXPRESSED IN ADULT LIVER, SIGNAL = 0.99; EXPRESSED IN BONE MARROW, SIGNAL = 0.88; EXPRESSED IN BRAIN, SIGNAL =   1; EXPRESSED IN PLACENTA, SIGNAL = 0.76; EXPRESSED IN FETAL LIVER, SIGNAL = 0.88; EST_HUMAN HIT: R23642.1, EVALUE 4.00e-04
KKPLQMVLLPNTEEKSKSMKL

SEQ ID NO: 45652 - protein, 42 aa, Homo sapiens
  MAP TO AC008474.4; EXPRESSED IN PLACENTA, SIGNAL = 0.58; EXPRESSED IN FETAL LIVER, SIGNAL = 0.54; EXPRESSED IN BONE MARROW, SIGNAL = 0.64; EXPRESSED IN ADULT LIVER, SIGNAL = 0.56; EXPRESSED IN BRAIN, SIGNAL = 0.7
GLLPTLVVDGICTFQLKNRGLPQAAFPRDAGNMRLDSQCQSN

SEQ ID NO: 45653 - protein, 37 aa, Homo sapiens
  MAP TO AL161634.1; EXPRESSED IN PLACENTA, SIGNAL = 0.53; EXPRESSED IN BRAIN, SIGNAL = 0.47; EXPRESSED IN BONE MARROW, SIGNAL = 0.46; EST_HUMAN HIT: BE901975.1, EVALUE 4.90e-01
PRGQPWHGAAHNTPPQHEAAKRLPGGFLMIEELKNRK

SEQ ID NO: 45654 - protein, 28 aa, Homo sapiens
  MAP TO AL161634.1; EXPRESSED IN PLACENTA, SIGNAL = 0.53; EXPRESSED IN BRAIN, SIGNAL = 0.47; EXPRESSED IN BONE MARROW, SIGNAL = 0.46
HVDSHGMELPTTPLLSMKQLKDCQVDSS

SEQ ID NO: 45655 - protein, 51 aa, Homo sapiens
  MAP TO AC018578.3; EXPRESSED IN LUNG, SIGNAL = 0.93; EXPRESSED IN ADULT LIVER, SIGNAL = 1.2; EXPRESSED IN FETAL LIVER, SIGNAL = 0.83; EXPRESSED IN BRAIN, SIGNAL = 0.85; EXPRESSED IN PLACENTA, SIGNAL = 0.95; EXPRESSED IN BONE MARROW, SIGNAL = 0.86; SWISSPROT HIT: P75065, EVALUE 6.10e+00; EST_HUMAN HIT: AW886769.1, EVALUE 9.00e-04
YLKSWKGKMTMRNLISNHLERWSATLIKMKIDRGARILWLNPHLRTQGQMY

SEQ ID NO: 45656 - protein, 32 aa, Homo sapiens
  MAP TO AC013597.3; EXPRESSED IN PLACENTA, SIGNAL = 0.84; EXPRESSED IN ADULT LIVER, SIGNAL = 1.1; EXPRESSED IN FETAL LIVER, SIGNAL = 0.75; EXPRESSED IN BRAIN, SIGNAL = 0.85; EXPRESSED IN LUNG, SIGNAL = 0.83; EXPRESSED IN BONE MARROW, SIGNAL = 0.76
VEDRRQQKLKQGEQPGDVAFLVKADAGLCQSF

SEQ ID NO: 45657 - protein, 32 aa, Homo sapiens
  MAP TO AC013597.3; EXPRESSED IN PLACENTA, SIGNAL = 0.84; EXPRESSED IN ADULT LIVER, SIGNAL = 1.1; EXPRESSED IN FETAL LIVER, SIGNAL = 0.75; EXPRESSED IN BRAIN, SIGNAL = 0.85; EXPRESSED IN LUNG, SIGNAL = 0.83; EXPRESSED IN BONE MARROW, SIGNAL = 0.76
KLWHKPASAFTRNATSPGCSPCFSFCCLLSST

SEQ ID NO: 45658 - protein, 109 aa, Homo sapiens
  MAP TO AL158849.5; EXPRESSED IN ADULT LIVER, SIGNAL = 0.67; EXPRESSED IN FETAL LIVER, SIGNAL = 0.54; EXPRESSED IN BRAIN, SIGNAL = 0.62; EXPRESSED IN BONE MARROW, SIGNAL = 0.61; EST_HUMAN HIT: BE964823.2, EVALUE 3.70e+00; SWISSPROT HIT: O14286, EVALUE 3.40e+00
MFFSFCEKNVDYETFKALNDACLVYDSRLVIDTNFHTNDIAIRAAGSLTKFSNRYYSNEWTHSNFSSKEIGFQLAAAMLHLFDPTLEPVTEPPANLDRLIPMYKGAKIQ

SEQ ID NO: 45659 - protein, 29 aa, Homo sapiens
  MAP TO AL158849.5; EXPRESSED IN ADULT LIVER, SIGNAL = 0.67; EXPRESSED IN FETAL LIVER, SIGNAL = 0.54; EXPRESSED IN BRAIN, SIGNAL = 0.62; EXPRESSED IN BONE MARROW, SIGNAL = 0.61
CSSASVRRMWIMKRLKPSMMHVLCMTVDL

SEQ ID NO: 45660 - protein, 74 aa, Homo sapiens
  MAP TO AL161777.1; EXPRESSED IN PLACENTA, SIGNAL = 0.64; EXPRESSED IN ADULT LIVER, SIGNAL = 0.87; EXPRESSED IN FETAL LIVER, SIGNAL = 0.71; EXPRESSED IN BRAIN, SIGNAL = 1.1; EXPRESSED IN BONE MARROW, SIGNAL = 0.77; EST_HUMAN HIT: AV752834.1, EVALUE 3.00e-39; SWISSPROT HIT: P10911, EVALUE 8.00e-41
GNLNELGKMIMQGGFSVWIGHKKGATKMKDLARFKPMQRHLFLYEKAIVFCKRRVESGEGSDRYPSYSFKHCWK

SEQ ID NO: 45661 - protein, 27 aa, Homo sapiens
  MAP TO AL135940.11; EXPRESSED IN LUNG, SIGNAL =   1; EXPRESSED IN ADULT LIVER, SIGNAL = 0.92; EXPRESSED IN BRAIN, SIGNAL = 0.87; EXPRESSED IN BONE MARROW, SIGNAL = 0.87; EXPRESSED IN PLACENTA, SIGNAL = 0.94; EXPRESSED IN FETAL LIVER, SIGNAL = 0.74; EST_HUMAN HIT: BF055939.1, EVALUE 3.50e+00
KQEKKRNSDLKQAEGKNRAEINVIENR

SEQ ID NO: 45662 - protein, 71 aa, Homo sapiens
  MAP TO AC015908.4; EXPRESSED IN BONE MARROW, SIGNAL = 0.95; EXPRESSED IN PLACENTA, SIGNAL =   1; EXPRESSED IN ADULT LIVER, SIGNAL = 1.2; EXPRESSED IN FETAL LIVER, SIGNAL = 0.94; EXPRESSED IN BRAIN, SIGNAL = 1.1; EXPRESSED IN LUNG, SIGNAL = 1.1; SWISSPROT HIT: P91285, EVALUE 6.60e+00; EST_HUMAN HIT: BE870004.1, EVALUE 2.40e-01
RQRRQQQAGPPPSHANHPRECSWAPPAPPGQCSWGVCGEDAIQGAVRSSSSSPSCWTRSAWSFCCWGSWPP

SEQ ID NO: 45663 - protein, 44 aa, Homo sapiens
  MAP TO AC009635.4; EXPRESSED IN PLACENTA, SIGNAL = 0.45; EXPRESSED IN BRAIN, SIGNAL = 0.49; EXPRESSED IN BONE MARROW, SIGNAL = 0.47; EST_HUMAN HIT: AA781357.1, EVALUE 9.10e+00
TTGNNSPPTVSPRFLNHTLRNSVYPAHTFVINSDENKLSLNYAN

SEQ ID NO: 45664 - protein, 18 aa, Homo sapiens
  MAP TO AC009635.4; EXPRESSED IN PLACENTA, SIGNAL = 0.45; EXPRESSED IN BRAIN, SIGNAL = 0.49; EXPRESSED IN BONE MARROW, SIGNAL = 0.47
LRAITAHLLLALGSSTIR

SEQ ID NO: 45665 - protein, 58 aa, Homo sapiens
  MAP TO AC011938.3; EXPRESSED IN ADULT LIVER, SIGNAL = 0.67; EXPRESSED IN BONE MARROW, SIGNAL = 0.53; EXPRESSED IN BRAIN, SIGNAL = 0.62; EXPRESSED IN PLACENTA, SIGNAL = 0.59; EXPRESSED IN FETAL LIVER, SIGNAL = 0.51; SWISSPROT HIT: P16960, EVALUE 4.00e-19; EST_HUMAN HIT: R93694.1, EVALUE 6.20e+00
ELKEKLDSSHKRDIEGMGVPEIKYGDSVCFVQHIASGLWVTYKAQDAKTSRLGPLKRK

SEQ ID NO: 45666 - protein, 57 aa, Homo sapiens
  MAP TO AC011159.3; EXPRESSED IN FETAL LIVER, SIGNAL = 0.52; EXPRESSED IN BONE MARROW, SIGNAL = 0.48; EXPRESSED IN ADULT LIVER, SIGNAL = 0.64; EXPRESSED IN BRAIN, SIGNAL = 0.5; SWISSPROT HIT: Q01955, EVALUE 2.00e+00
MTFHIGLSRGQISTLVKDGICKELIGIQNSQTEQGIPKSNTYKGQDNFPGRAGVSIQ

SEQ ID NO: 45667 - protein, 40 aa, Homo sapiens
  MAP TO AC019253.3; EXPRESSED IN BONE MARROW, SIGNAL = 0.55; EXPRESSED IN ADULT LIVER, SIGNAL = 0.56; EXPRESSED IN BRAIN, SIGNAL = 0.51; EXPRESSED IN FETAL LIVER, SIGNAL = 0.61; EXPRESSED IN PLACENTA, SIGNAL = 0.62; SWISSPROT HIT: P23921, EVALUE 8.30e+00
LIIRHLKSNCQISNLALSSFVFGPFTWDLKKACELNSGNL

SEQ ID NO: 45668 - protein, 47 aa, Homo sapiens
  MAP TO AC019194.2; EXPRESSED IN BONE MARROW, SIGNAL = 0.45; EXPRESSED IN BRAIN, SIGNAL = 0.46; EXPRESSED IN PLACENTA, SIGNAL = 0.5
MVQAEDTAPGIVEIQGAFFKEVSLFDLRRQPGFNSTVLKDKELGRSQ

SEQ ID NO: 45669 - protein, 26 aa, Homo sapiens
  MAP TO AC019194.2; EXPRESSED IN BONE MARROW, SIGNAL = 0.45; EXPRESSED IN BRAIN, SIGNAL = 0.46; EXPRESSED IN PLACENTA, SIGNAL = 0.5
WSKRKTLPQASWRYKGLSLRKCLSLI

SEQ ID NO: 45670 - protein, 49 aa, Homo sapiens
  MAP TO AC009699.6; EXPRESSED IN LUNG, SIGNAL = 0.89; EXPRESSED IN ADULT LIVER, SIGNAL = 0.71; EXPRESSED IN FETAL LIVER, SIGNAL = 0.74; EXPRESSED IN BRAIN, SIGNAL = 0.81; EXPRESSED IN PLACENTA, SIGNAL = 1.1; EXPRESSED IN BONE MARROW, SIGNAL = 0.97; SWISSPROT HIT: Q00706, EVALUE 4.70e+00; EST_HUMAN HIT: BE777699.1, EVALUE 1.30e+00
KAERTRRKNLESSKIGSKGQPRRLWLCSRECDDLGKGHGNKDRGKSEER

SEQ ID NO: 45671 - protein, 34 aa, Homo sapiens
  MAP TO AC018378.3; EXPRESSED IN PLACENTA, SIGNAL = 1.2; EXPRESSED IN ADULT LIVER, SIGNAL = 1.5; EXPRESSED IN FETAL LIVER, SIGNAL = 0.98; EXPRESSED IN BRAIN, SIGNAL = 1.2; EXPRESSED IN BONE MARROW, SIGNAL = 1.2; EXPRESSED IN LUNG, SIGNAL = 1.2; SWISSPROT HIT: Q05903, EVALUE 4.90e+00; EST_HUMAN HIT: AA324960.1, EVALUE 6.60e-01
MCEDLWLTHKYGNLHVPKADSINTFVDENLKRKK

SEQ ID NO: 45672 - protein, 29 aa, Homo sapiens
  MAP TO AC018378.3; EXPRESSED IN PLACENTA, SIGNAL = 1.2; EXPRESSED IN ADULT LIVER, SIGNAL = 1.5; EXPRESSED IN FETAL LIVER, SIGNAL = 0.98; EXPRESSED IN BRAIN, SIGNAL = 1.2; EXPRESSED IN BONE MARROW, SIGNAL = 1.2; EXPRESSED IN LUNG, SIGNAL = 1.2
CVKISGLHTSMGICMCQKLTLSIHLLMRI

SEQ ID NO: 45673 - protein, 32 aa, Homo sapiens
  MAP TO AC015670.4; EXPRESSED IN BRAIN, SIGNAL = 0.45; EXPRESSED IN BONE MARROW, SIGNAL = 0.44; EXPRESSED IN PLACENTA, SIGNAL = 0.56; EXPRESSED IN FETAL LIVER, SIGNAL = 0.49; EST_HUMAN HIT: AV726462.1, EVALUE 8.80e-01
YPAMHRTVLMTRISWSKTLIPPRLRNPVLKVT

SEQ ID NO: 45674 - protein, 71 aa, Homo sapiens
  MAP TO AL135923.11; EXPRESSED IN LUNG, SIGNAL = 1.1; EXPRESSED IN PLACENTA, SIGNAL = 0.99; EXPRESSED IN ADULT LIVER, SIGNAL =   1; EXPRESSED IN BRAIN, SIGNAL = 0.89; EXPRESSED IN FETAL LIVER, SIGNAL = 0.95; EXPRESSED IN BONE MARROW, SIGNAL = 0.89; EST_HUMAN HIT: BE047892.1, EVALUE 8.20e-01; SWISSPROT HIT: O46483, EVALUE 8.20e+00
SCPQHLREGCLPEISSWGGAGGGQGDSQAKWRSQEAGHDNHSDCGCSARSSGGSQSLPRFCLRPVLALQSL

SEQ ID NO: 45675 - protein, 55 aa, Homo sapiens
  MAP TO AC018787.3; EXPRESSED IN ADULT LIVER, SIGNAL = 1.1; EXPRESSED IN BRAIN, SIGNAL = 0.86; EXPRESSED IN LUNG, SIGNAL =   1; EXPRESSED IN PLACENTA, SIGNAL = 0.75; EXPRESSED IN FETAL LIVER, SIGNAL = 0.73; EXPRESSED IN BONE MARROW, SIGNAL = 0.87
LQYEVELKQLEGSVSNQAERGWKENNSCSRKESLLSTVMSEGDLEDDLNVKLAVK

SEQ ID NO: 45676 - protein, 35 aa, Homo sapiens
  MAP TO AC013490.3; EXPRESSED IN ADULT LIVER, SIGNAL = 0.64; EXPRESSED IN BRAIN, SIGNAL = 0.65; EXPRESSED IN BONE MARROW, SIGNAL = 1.5; EXPRESSED IN PLACENTA, SIGNAL = 9.4; EXPRESSED IN FETAL LIVER, SIGNAL = 0.57; EST_HUMAN HIT: BF508546.1, EVALUE 4.00e-04; SWISSPROT HIT: P19028, EVALUE 3.30e-01
LLMPMSQLAKKGIKVLAVLIDLNVQGEIGLLLHNE

SEQ ID NO: 45677 - protein, 30 aa, Homo sapiens
  MAP TO AC013626.3; EXPRESSED IN FETAL LIVER, SIGNAL = 0.6; EXPRESSED IN PLACENTA, SIGNAL = 0.6; EXPRESSED IN ADULT LIVER, SIGNAL = 0.67; EXPRESSED IN BRAIN, SIGNAL = 0.63; EXPRESSED IN BONE MARROW, SIGNAL = 0.6; EST_HUMAN HIT: U54733.1, EVALUE 7.80e+00
QKYQQFPHQPTERVNEKLPTAPSPHVASVN

SEQ ID NO: 45678 - protein, 56 aa, Homo sapiens
  MAP TO AC008688.4; EXPRESSED IN BONE MARROW, SIGNAL = 0.62; EXPRESSED IN BRAIN, SIGNAL = 0.77; EXPRESSED IN PLACENTA, SIGNAL = 0.92; EXPRESSED IN ADULT LIVER, SIGNAL = 0.7; EXPRESSED IN FETAL LIVER, SIGNAL = 0.69; SWISSPROT HIT: Q02386, EVALUE 1.20e+00
DLHILMLNSRKLQTHLELKLFKNLKNQGHQSTQVPLSMQMDTKRGLRNTSLGSCGK

SEQ ID NO: 45679 - protein, 31 aa, Homo sapiens
  MAP TO AC019253.3; EXPRESSED IN PLACENTA, SIGNAL = 0.67; EXPRESSED IN FETAL LIVER, SIGNAL = 0.53; EXPRESSED IN BONE MARROW, SIGNAL = 0.64; EXPRESSED IN ADULT LIVER, SIGNAL = 0.8; EXPRESSED IN BRAIN, SIGNAL = 0.68; EST_HUMAN HIT: AA932671.1, EVALUE 7.70e+00
MPLEGRYYCVDTLLRPWHPLELGQHPGFSLT

SEQ ID NO: 45680 - protein, 31 aa, Homo sapiens
  MAP TO AC019253.3; EXPRESSED IN PLACENTA, SIGNAL = 0.67; EXPRESSED IN FETAL LIVER, SIGNAL = 0.53; EXPRESSED IN BONE MARROW, SIGNAL = 0.64; EXPRESSED IN ADULT LIVER, SIGNAL = 0.8; EXPRESSED IN BRAIN, SIGNAL = 0.68; EST_HUMAN HIT: BF331566.1, EVALUE 7.70e+00
CLWKADTTVWIPCSGLGIPWNWASILASRLL

SEQ ID NO: 45681 - protein, 51 aa, Homo sapiens
  MAP TO AC018780.3; EXPRESSED IN PLACENTA, SIGNAL = 0.65; EXPRESSED IN BONE MARROW, SIGNAL = 0.67; EXPRESSED IN ADULT LIVER, SIGNAL = 0.77; EXPRESSED IN FETAL LIVER, SIGNAL = 0.57; EXPRESSED IN BRAIN, SIGNAL = 0.71; EST_HUMAN HIT: AA348131.1, EVALUE 6.00e-20; SWISSPROT HIT: P46703, EVALUE 9.00e-03
YLQFTLADMATRLVAARLMVRNAAVALQEERKDAVALCSMAKLFATDECFA

SEQ ID NO: 45682 - protein, 17 aa, Homo sapiens
  MAP TO AC018780.3; EXPRESSED IN PLACENTA, SIGNAL = 0.65; EXPRESSED IN BONE MARROW, SIGNAL = 0.67; EXPRESSED IN ADULT LIVER, SIGNAL = 0.77; EXPRESSED IN FETAL LIVER, SIGNAL = 0.57; EXPRESSED IN BRAIN, SIGNAL = 0.71; EST_HUMAN HIT: AA282272.1, EVALUE 7.00e-06
TCNSHWLIWQQGWWPRG

SEQ ID NO: 45683 - protein, 33 aa, Homo sapiens
  MAP TO AC015772.5; EXPRESSED IN PLACENTA, SIGNAL = 1.5; EXPRESSED IN ADULT LIVER, SIGNAL = 0.97; EXPRESSED IN FETAL LIVER, SIGNAL = 0.8; EXPRESSED IN BRAIN, SIGNAL = 1.1; EXPRESSED IN BONE MARROW, SIGNAL = 0.93; EST_HUMAN HIT: AW003063.1, EVALUE 3.00e-10; SWISSPROT HIT: P10266, EVALUE 8.60e-02
DDQMFVWVPTKHLKIYHEPRHLVGPPVQCKLKV

SEQ ID NO: 45684 - protein, 85 aa, Homo sapiens
  MAP TO AL121901.10; EXPRESSED IN PLACENTA, SIGNAL = 0.6; EXPRESSED IN ADULT LIVER, SIGNAL = 0.71; EXPRESSED IN BRAIN, SIGNAL = 0.45; EXPRESSED IN BONE MARROW, SIGNAL = 0.45; EST_HUMAN HIT: BE787396.1, EVALUE 5.20e-01; SWISSPROT HIT: P52961, EVALUE 7.10e+00
TAFVNNLRALQAAGRVTWSLRVAQGRQRRSKWSWPSGFLSLHRPRAPVLGPAINAQMDGEDLGHHRIHYGRLLGNITITTFILSG

SEQ ID NO: 45685 - protein, 34 aa, Homo sapiens
  MAP TO AC018390.3; EXPRESSED IN BONE MARROW, SIGNAL =   1; EXPRESSED IN ADULT LIVER, SIGNAL = 1.2; EXPRESSED IN FETAL LIVER, SIGNAL = 0.87; EXPRESSED IN BRAIN, SIGNAL = 0.95; EXPRESSED IN LUNG, SIGNAL = 0.98; EXPRESSED IN PLACENTA, SIGNAL = 1.1
RNFLPLGTGISKPINSKFIGIGTLLIKSRRISLQ

SEQ ID NO: 45686 - protein, 36 aa, Homo sapiens
  MAP TO AC016326.4; EXPRESSED IN BRAIN, SIGNAL = 0.47
ATLLAFLVELLKSSVAMQEQMLGGKGFLVIGYLLEK

SEQ ID NO: 45687 - protein, 29 aa, Homo sapiens
  MAP TO AL133226.16; EXPRESSED IN PLACENTA, SIGNAL = 0.46; EXPRESSED IN ADULT LIVER, SIGNAL = 0.76; EXPRESSED IN FETAL LIVER, SIGNAL = 0.5; EXPRESSED IN BRAIN, SIGNAL = 0.65; EXPRESSED IN BONE MARROW, SIGNAL = 0.56; EST_HUMAN HIT: AW265686.1, EVALUE 2.30e-01
FWKRGRFPRTVVPRMFTPNIGIPGTVMAL

SEQ ID NO: 45688 - protein, 27 aa, Homo sapiens
  MAP TO AC018537.3; EXPRESSED IN ADULT LIVER, SIGNAL = 0.55; EXPRESSED IN FETAL LIVER, SIGNAL = 0.5; EXPRESSED IN BRAIN, SIGNAL = 0.45; EXPRESSED IN BONE MARROW, SIGNAL = 0.43
KGTASPNLIQTARDTTWCNMAAGTLKQ

SEQ ID NO: 45689 - protein, 37 aa, Homo sapiens
  MAP TO AC011207.3; EXPRESSED IN BRAIN, SIGNAL = 1.2; EXPRESSED IN BONE MARROW, SIGNAL = 0.58; EXPRESSED IN PLACENTA, SIGNAL = 0.65; EXPRESSED IN ADULT LIVER, SIGNAL = 0.69; EXPRESSED IN FETAL LIVER, SIGNAL = 0.55; EST_HUMAN HIT: AU127322.1, EVALUE 2.00e-07; SWISSPROT HIT: Q63622, EVALUE 1.00e-10
YARFEAKIHDLREQMMNHSMSSGSGSLRTNQKRSLYV

SEQ ID NO: 45690 - protein, 57 aa, Homo sapiens [sequence omitted]

SEQ ID NO: 45691 - protein, 52 aa, Homo sapiens
  MAP TO AC025740.1; EXPRESSED IN PLACENTA, SIGNAL = 0.78; EXPRESSED IN FETAL LIVER, SIGNAL = 0.78; EXPRESSED IN BRAIN, SIGNAL = 0.77; EXPRESSED IN BONE MARROW, SIGNAL = 0.74; EXPRESSED IN LUNG, SIGNAL = 1.2; EXPRESSED IN ADULT LIVER, SIGNAL = 1.1; EST_HUMAN HIT: AW505600.1, EVALUE 4.00e-25
EERAVRDRNLLQVHDHNQPIPWKVQFNLGNSSRPSNQCRNSIQGKHLITDEL

SEQ ID NO: 45692 - protein, 30 aa, Homo sapiens
  MAP TO AC012433.5; EXPRESSED IN LUNG, SIGNAL = 0.83; EXPRESSED IN PLACENTA, SIGNAL = 0.8; EXPRESSED IN BONE MARROW, SIGNAL = 0.54; EXPRESSED IN ADULT LIVER, SIGNAL = 0.62; EXPRESSED IN BRAIN, SIGNAL = 0.62
KMTFPTQNQMMDKKHLYRNQTKPFPSVMQG

SEQ ID NO: 45693 - protein, 67 aa, Homo sapiens
  MAP TO AC011159.3; EXPRESSED IN PLACENTA, SIGNAL = 1.6; EXPRESSED IN ADULT LIVER, SIGNAL = 1.3; EXPRESSED IN FETAL LIVER, SIGNAL = 0.77; EXPRESSED IN BONE MARROW, SIGNAL = 0.97; EXPRESSED IN LUNG, SIGNAL = 1.5; EXPRESSED IN BRAIN, SIGNAL = 1.6; EST_HUMAN HIT: AI700089.1, EVALUE 3.00e-05
PCSDAYLGPSPSAASPAFLGKGQVPQPLLSFSLPLLCFPGAGASTPQPFSPSPLAASPAFLGQGQVP

SEQ ID NO: 45694 - protein, 39 aa, Homo sapiens [sequence omitted]

SEQ ID NO: 45695 - protein, 63 aa, Homo sapiens
  MAP TO AL162171.1; EXPRESSED IN PLACENTA, SIGNAL = 0.58; EXPRESSED IN ADULT LIVER, SIGNAL = 0.7; EXPRESSED IN BRAIN, SIGNAL = 0.72; EXPRESSED IN BONE MARROW, SIGNAL = 0.46; EST_HUMAN HIT: AW968359.1, EVALUE 1.00e-10; SWISSPROT HIT: Q15542, EVALUE 1.00e-05
GKILVGTRNAEIIEVGEKNAACNILVNGHVDGPIWGLATHPSRDFFLSAAEDGTVRLWDIADK

SEQ ID NO: 45696 - protein, 33 aa, Homo sapiens
  MAP TO AC009415.2; EXPRESSED IN BONE MARROW, SIGNAL = 0.5; EXPRESSED IN PLACENTA, SIGNAL = 0.62; EXPRESSED IN ADULT LIVER, SIGNAL = 0.68; EXPRESSED IN FETAL LIVER, SIGNAL = 0.51; EXPRESSED IN BRAIN, SIGNAL = 0.45
DDYDKKGFLNNEDKEIEEKKVLIYFKADERITF

SEQ ID NO: 45697 - protein, 96 aa, Homo sapiens
  MAP TO AC021804.3; EXPRESSED IN LUNG, SIGNAL = 0.89; EXPRESSED IN PLACENTA, SIGNAL = 0.99; EXPRESSED IN ADULT LIVER, SIGNAL = 0.9; EXPRESSED IN BRAIN, SIGNAL = 0.92; EXPRESSED IN BONE MARROW, SIGNAL = 0.88; EXPRESSED IN FETAL LIVER, SIGNAL = 0.75; EST_HUMAN HIT: BE880658.1, EVALUE 2.00e-51; SWISSPROT HIT: Q61501, EVALUE 5.00e-06
VERRRIYDIVNVLESLHLVSRVAKNQYGWHGRHSLPKTLRNLQRLGEEQKYEEQMAYLQQKELDLIDYKFGERKKDGDPDSQEQQLLDFSEPDCPS

SEQ ID NO: 45698 - protein, 27 aa, Homo sapiens
  MAP TO AC023134.3; EXPRESSED IN PLACENTA, SIGNAL = 0.69; EXPRESSED IN ADULT LIVER, SIGNAL = 1.1; EXPRESSED IN FETAL LIVER, SIGNAL = 0.75; EXPRESSED IN BRAIN, SIGNAL = 0.81; EXPRESSED IN BONE MARROW, SIGNAL = 0.68
MLLLYTLKVIAVTVVINSLLFAPLSGV

SEQ ID NO: 45699 - protein, 37 aa, Homo sapiens
  MAP TO AC022050.2; EXPRESSED IN PLACENTA, SIGNAL = 0.88; EXPRESSED IN FETAL LIVER, SIGNAL = 0.77; EXPRESSED IN BONE MARROW, SIGNAL = 0.89; EXPRESSED IN ADULT LIVER, SIGNAL = 1.1; EXPRESSED IN BRAIN, SIGNAL = 0.79; EXPRESSED IN LUNG, SIGNAL = 1.1
GDMIYKIYLDIDPSFVKYKNEYSTEDSLEIFEVDLEK

SEQ ID NO: 45700 - protein, 52 aa, Homo sapiens
  MAP TO AC021385.3; EXPRESSED IN PLACENTA, SIGNAL = 0.65; EXPRESSED IN FETAL LIVER, SIGNAL = 0.48; EXPRESSED IN BONE MARROW, SIGNAL = 0.74; EXPRESSED IN ADULT LIVER, SIGNAL = 0.8; EXPRESSED IN BRAIN, SIGNAL = 0.62; EST_HUMAN HIT: AI932673.1, EVALUE 6.50e+00
NPFKFFLLICHPVTISRAPFCNAYSSANKHSIFHRRCQLHSFYFSSVSSSMQ

SEQ ID NO: 45701 - protein, 71 aa, Homo sapiens [sequence omitted]

SEQ ID NO: 45702 - protein, 29 aa, Homo sapiens
  MAP TO AC016706.2; EXPRESSED IN PLACENTA, SIGNAL = 0.79; EXPRESSED IN ADULT LIVER, SIGNAL = 0.95; EXPRESSED IN FETAL LIVER, SIGNAL = 0.77; EXPRESSED IN BRAIN, SIGNAL = 0.85; EXPRESSED IN BONE MARROW, SIGNAL = 0.81; EXPRESSED IN LUNG, SIGNAL = 0.92
MIAAEYKTGTGPNTAKTQNMLDKPDPNKK

SEQ ID NO: 45703 - protein, 97 aa, Homo sapiens
  MAP TO AC009486.3; EXPRESSED IN LUNG, SIGNAL = 1.2; EXPRESSED IN PLACENTA, SIGNAL = 0.8; EXPRESSED IN ADULT LIVER, SIGNAL = 0.95; EXPRESSED IN FETAL LIVER, SIGNAL =   1; EXPRESSED IN BRAIN, SIGNAL = 0.97; EXPRESSED IN BONE MARROW, SIGNAL = 0.62; SWISSPROT HIT: P57058, EVALUE 1.00e-06; EST_HUMAN HIT: AU127403.1, EVALUE 4.00e-51
VFDISCYQESLAPCFCLSAHSNINQITEIILGETKAYVFFERSYGDMHSFVRTCKKLREEEAARLFYQIASAVAHCHDGGLVLRDLKLRKFIFKDEE

SEQ ID NO: 45704 - protein, 32 aa, Homo sapiens [sequence omitted]

SEQ ID NO: 45705 - protein, 25 aa, Homo sapiens
  MAP TO AC025539.2; EXPRESSED IN PLACENTA, SIGNAL = 0.63; EXPRESSED IN ADULT LIVER, SIGNAL = 0.6; EXPRESSED IN BRAIN, SIGNAL = 0.5
DVLVQGKEDKAGDLEYDSHKECLTL

SEQ ID NO: 45706 - protein, 23 aa, Homo sapiens
  MAP TO AC025539.2; EXPRESSED IN PLACENTA, SIGNAL = 0.63; EXPRESSED IN ADULT LIVER, SIGNAL = 0.6; EXPRESSED IN BRAIN, SIGNAL = 0.5
GMCWSRAKRTRLEIWNMIHIKSV

SEQ ID NO: 45707 - protein, 32 aa, Homo sapiens
  MAP TO AC016851.3; EXPRESSED IN PLACENTA, SIGNAL = 0.54; EXPRESSED IN FETAL LIVER, SIGNAL = 0.59; EXPRESSED IN BONE MARROW, SIGNAL = 0.59; EXPRESSED IN ADULT LIVER, SIGNAL = 0.56; EXPRESSED IN BRAIN, SIGNAL = 0.59
TYLEDNLENSKHIPPFRITLLSNADRMNMNQI

SEQ ID NO: 45708 - protein, 26 aa, Homo sapiens
  MAP TO AC016851.3; EXPRESSED IN PLACENTA, SIGNAL = 0.54; EXPRESSED IN FETAL LIVER, SIGNAL = 0.59; EXPRESSED IN BONE MARROW, SIGNAL = 0.59; EXPRESSED IN ADULT LIVER, SIGNAL = 0.56; EXPRESSED IN BRAIN, SIGNAL = 0.59
LTWRTTLRTVNTFHHLESPFSPMLTE

SEQ ID NO: 45709 - protein, 114 aa, Homo sapiens
  MAP TO AC025863.2; EXPRESSED IN ADULT LIVER, SIGNAL = 1.1; EXPRESSED IN FETAL LIVER, SIGNAL = 0.99; EXPRESSED IN BRAIN, SIGNAL = 0.87; EXPRESSED IN BONE MARROW, SIGNAL = 0.86; EXPRESSED IN LUNG, SIGNAL =   1; EXPRESSED IN PLACENTA, SIGNAL = 0.89; EST_HUMAN HIT: BE958511.1, EVALUE 3.00e-40; SWISSPROT HIT: Q50028, EVALUE 8.90e-01
NQQVNSASTPSPEQLRPGDLILDHAGGNRASRAKVILLTGYAHSSLPAELDSGACGGSSLNSKGNSGSGDSSSYDAPAGNSFLEDCELSRQIGAQLKLLPMNDQIRELQTIIRD

SEQ ID NO: 45710 - protein, 37 aa, Homo sapiens
  MAP TO AC025863.2; EXPRESSED IN ADULT LIVER, SIGNAL = 1.1; EXPRESSED IN FETAL LIVER, SIGNAL = 0.99; EXPRESSED IN BRAIN, SIGNAL = 0.87; EXPRESSED IN BONE MARROW, SIGNAL = 0.86; EXPRESSED IN LUNG, SIGNAL =   1; EXPRESSED IN PLACENTA, SIGNAL = 0.89; EST_HUMAN HIT: BE958511.1, EVALUE 2.00e-07
CRPSWTLGPAAAPASTQRATVVVVTVAAMTHQLATPS

SEQ ID NO: 45711 - protein, 34 aa, Homo sapiens
  MAP TO AL121723.35; EXPRESSED IN ADULT LIVER, SIGNAL = 0.67; EXPRESSED IN BRAIN, SIGNAL = 0.83; EXPRESSED IN PLACENTA, SIGNAL = 1.1; SWISSPROT HIT: P09506, EVALUE 3.80e+00
MADQELLAKAEHRRTAKKQQKSHRPQQPRMTTNK

SEQ ID NO: 45712 - protein, 58 aa, Homo sapiens
  MAP TO AL133417.9; EXPRESSED IN LUNG, SIGNAL = 0.88; EXPRESSED IN PLACENTA, SIGNAL = 0.81; EXPRESSED IN ADULT LIVER, SIGNAL = 0.75; EXPRESSED IN BRAIN, SIGNAL = 0.8; EXPRESSED IN BONE MARROW, SIGNAL = 0.8; EXPRESSED IN FETAL LIVER, SIGNAL = 0.75; SWISSPROT HIT: P11161, EVALUE 8.00e-30; EST_HUMAN HIT: AU142101.1, EVALUE 9.00e-29
GMINIDMTGEKRSLDLPYPSSFAPVSAPRNQTFTYMGKFSIDPQYPGASCYPEGIINI

SEQ ID NO: 45713 - protein, 50 aa, Homo sapiens
  MAP TO AC009430.2; EXPRESSED IN FETAL LIVER, SIGNAL = 0.67; EXPRESSED IN PLACENTA, SIGNAL = 0.5; EXPRESSED IN BONE MARROW, SIGNAL = 0.68; EXPRESSED IN BRAIN, SIGNAL = 0.51; SWISSPROT HIT: P37938, EVALUE 2.70e+00; EST_HUMAN HIT: AA677048.1, EVALUE 8.00e-09
AGPSGGIPEEGVIITGDDSSMHVIAPEDLPVGQDVGVKDSDPDDPDPVKT

SEQ ID NO: 45714 - protein, 47 aa, Homo sapiens
  MAP TO AC007458.13; EXPRESSED IN PLACENTA, SIGNAL = 0.65; EXPRESSED IN BONE MARROW, SIGNAL = 0.55; EXPRESSED IN ADULT LIVER, SIGNAL = 0.62; EXPRESSED IN BRAIN, SIGNAL = 0.55; SWISSPROT HIT: Q29442, EVALUE 8.10e+00
KNCQFQEQLLSFFMEDVFGQLQLQGCKKIRFVEDFHSLRQKLSHCVS

SEQ ID NO: 45715 - protein, 35 aa, Homo sapiens
  MAP TO AC007458.13; EXPRESSED IN PLACENTA, SIGNAL = 0.65; EXPRESSED IN BONE MARROW, SIGNAL = 0.55; EXPRESSED IN ADULT LIVER, SIGNAL = 0.62; EXPRESSED IN BRAIN, SIGNAL = 0.55
KLSISRTASVLLHGRRFWSTAIARLQENTLCGGLS

SEQ ID NO: 45716 - protein, 69 aa, Homo sapiens
  MAP TO AL162171.1; EXPRESSED IN PLACENTA, SIGNAL = 0.81; EXPRESSED IN ADULT LIVER, SIGNAL = 0.91; EXPRESSED IN BRAIN, SIGNAL = 0.85; EXPRESSED IN BONE MARROW, SIGNAL = 0.72; EXPRESSED IN FETAL LIVER, SIGNAL = 0.71; EST_HUMAN HIT: BE559987.1, EVALUE 2.00e-03; SWISSPROT HIT: P56093, EVALUE 2.00e+00
AKIASRAGHNQRIFVAEFRPDSDTQFVSVGVKHVKFWTLAGRALLSKKGLLSTLEDARMQTMLAIAFGA

SEQ ID NO: 45717 - protein, 31 aa, Homo sapiens
  MAP TO AL162171.1; EXPRESSED IN PLACENTA, SIGNAL = 0.81; EXPRESSED IN ADULT LIVER, SIGNAL = 0.91; EXPRESSED IN BRAIN, SIGNAL = 0.85; EXPRESSED IN BONE MARROW, SIGNAL = 0.72; EXPRESSED IN FETAL LIVER, SIGNAL = 0.71
VPKLPAELVTINVFLWQNSDQIQIPSLSQWE

SEQ ID NO: 45718 - protein, 121 aa, Homo sapiens
  MAP TO AC009487.3; EXPRESSED IN PLACENTA, SIGNAL = 0.48; EXPRESSED IN ADULT LIVER, SIGNAL = 0.66; EXPRESSED IN FETAL LIVER, SIGNAL = 0.79; EXPRESSED IN BRAIN, SIGNAL = 0.68; EXPRESSED IN BONE MARROW, SIGNAL = 0.98; EST_HUMAN HIT: BE897487.1, EVALUE 1.00e-52; SWISSPROT HIT: P14196, EVALUE 2.50e-01
TAQETSTMTMNVSQVDDVVSSKTRTRGQRIQNVNVKSAQQEASADVATPKMPGQSVKKKTRKAKEISEASENIYSDVRGLSQNQQIPQNSVTPRRGRRKKEVNQDILENTSSVEQELQITT

SEQ ID NO: 45719 - protein, 25 aa, Homo sapiens
  MAP TO AC025539.2; EXPRESSED IN LUNG, SIGNAL = 0.91; EXPRESSED IN BONE MARROW, SIGNAL = 0.85; EXPRESSED IN ADULT LIVER, SIGNAL = 0.92; EXPRESSED IN BRAIN, SIGNAL = 0.8; EXPRESSED IN PLACENTA, SIGNAL = 0.82; EXPRESSED IN FETAL LIVER, SIGNAL = 0.76; EST_HUMAN HIT: AW264679.1, EVALUE 4.00e-07
MEPHPYNLMEIRSSKAPTSKYHHTE

SEQ ID NO: 45720 - protein, 25 aa, Homo sapiens
  MAP TO AC025539.2; EXPRESSED IN LUNG, SIGNAL = 0.91; EXPRESSED IN BONE MARROW, SIGNAL = 0.85; EXPRESSED IN ADULT LIVER, SIGNAL = 0.92; EXPRESSED IN BRAIN, SIGNAL = 0.8; EXPRESSED IN PLACENTA, SIGNAL = 0.82; EXPRESSED IN FETAL LIVER, SIGNAL = 0.76; EST_HUMAN HIT: AW264679.1, EVALUE 2.00e-08; SWISSPROT HIT: P01286, EVALUE 8.70e+00
WSPTLTTLWKSDHLKPPPPNTITLR

SEQ ID NO: 45721 - protein, 41 aa, Homo sapiens
  MAP TO AC007989.2; EXPRESSED IN LUNG, SIGNAL = 1.9; EXPRESSED IN PLACENTA, SIGNAL = 1.1; EXPRESSED IN FETAL LIVER, SIGNAL = 0.69; EXPRESSED IN BRAIN, SIGNAL = 0.57; EXPRESSED IN ADULT LIVER, SIGNAL = 1.1; EXPRESSED IN BONE MARROW, SIGNAL = 1.1; SWISSPROT HIT: P78067, EVALUE 4.80e+00
EPNEDSTLASSEARISRVGVKGTLPGERWGQAGSQPQDMKE

SEQ ID NO: 45722 - protein, 19 aa, Homo sapiens
  MAP TO AC007989.2; EXPRESSED IN LUNG, SIGNAL = 1.9; EXPRESSED IN PLACENTA, SIGNAL = 1.1; EXPRESSED IN FETAL LIVER, SIGNAL = 0.69; EXPRESSED IN BRAIN, SIGNAL = 0.57; EXPRESSED IN ADULT LIVER, SIGNAL = 1.1; EXPRESSED IN BONE MARROW, SIGNAL = 1.1
SPMRIAHWPLLRLEFLELG

SEQ ID NO: 45723 - protein, 35 aa, Homo sapiens
  MAP TO AL121883.13; EXPRESSED IN ADULT LIVER, SIGNAL = 0.91; EXPRESSED IN LUNG, SIGNAL = 0.89; EXPRESSED IN PLACENTA, SIGNAL = 0.88; EXPRESSED IN FETAL LIVER, SIGNAL = 0.67; EXPRESSED IN BRAIN, SIGNAL = 0.61; EXPRESSED IN BONE MARROW, SIGNAL = 0.69
ENKLNKGYLCPAHYQISMAHNGAQEISVDCMIKLK

SEQ ID NO: 45724 - protein, 30 aa, Homo sapiens
  MAP TO AL121883.13; EXPRESSED IN ADULT LIVER, SIGNAL = 0.91; EXPRESSED IN LUNG, SIGNAL = 0.89; EXPRESSED IN PLACENTA, SIGNAL = 0.88; EXPRESSED IN FETAL LIVER, SIGNAL = 0.67; EXPRESSED IN BRAIN, SIGNAL = 0.61; EXPRESSED IN BONE MARROW, SIGNAL = 0.69
KTSLIKATSALLTTKFQWHTMVLKKYLWTA

SEQ ID NO: 45725 - protein, 43 aa, Homo sapiens
  MAP TO AL158049.2; EXPRESSED IN PLACENTA, SIGNAL = 0.67; EXPRESSED IN FETAL LIVER, SIGNAL = 0.56; EXPRESSED IN BRAIN, SIGNAL = 0.54; EXPRESSED IN BONE MARROW, SIGNAL = 0.5; EXPRESSED IN ADULT LIVER, SIGNAL = 0.64; EST_HUMAN HIT: BE544646.1, EVALUE 2.40e+00; SWISSPROT HIT: Q00923, EVALUE 1.60e+00
LRSSLRAWQGPGSLHLVGWSGLALTLTLGKMTMAAAMGVTSSY

SEQ ID NO: 45726 - protein, 71 aa, Homo sapiens
  MAP TO AL121777.16; EXPRESSED IN PLACENTA, SIGNAL = 0.52; EXPRESSED IN FETAL LIVER, SIGNAL = 0.56; EXPRESSED IN BONE MARROW, SIGNAL = 0.51; EXPRESSED IN BRAIN, SIGNAL = 0.52; EST_HUMAN HIT: AA412409.1, EVALUE 5.00e-18; SWISSPROT HIT: P28349, EVALUE 1.90e+00
TFTVETLVLMGVVSTHSQLLGIRGRTHRSSEAELTGRGSFCDTYCITGLCEVTQLPELTQYHSTPKPHGKN

SEQ ID NO: 45727 - protein, 34 aa, Homo sapiens
  MAP TO AL121777.16; EXPRESSED IN PLACENTA, SIGNAL = 0.52; EXPRESSED IN FETAL LIVER, SIGNAL = 0.56; EXPRESSED IN BONE MARROW, SIGNAL = 0.51; EXPRESSED IN BRAIN, SIGNAL = 0.52; EST_HUMAN HIT: BF345882.1, EVALUE 2.00e+00
EPSPWKPLCSWAWSQHTVSCWGSEAALTGAVRQN

SEQ ID NO: 45728 - protein, 80 aa, Homo sapiens
  MAP TO AC008521.5; EXPRESSED IN ADULT LIVER, SIGNAL = 0.64; EXPRESSED IN PLACENTA, SIGNAL = 0.91; EXPRESSED IN FETAL LIVER, SIGNAL = 0.78; EXPRESSED IN BRAIN, SIGNAL = 0.67; EXPRESSED IN BONE MARROW, SIGNAL = 0.68; EST_HUMAN HIT: AA311624.1, EVALUE 6.00e-42; SWISSPROT HIT: P80858, EVALUE 2.60e+00
GEDDDYLPDNVTFAPKDVTPVDFTPKDNVHGLAYKGLDPHQALFGTSGEHFNLFSGGSERAGDLGEIGLNKGRKLGISGQ

SEQ ID NO: 45729 - protein, 126 aa, Homo sapiens; identical to SEQ ID NO: 36179
  MAP TO AC011440.5; EXPRESSED IN ADULT LIVER, SIGNAL = 0.6; EXPRESSED IN BRAIN, SIGNAL =   1; EXPRESSED IN PLACENTA, SIGNAL = 0.55; EXPRESSED IN FETAL LIVER, SIGNAL = 0.57; EXPRESSED IN BONE MARROW, SIGNAL = 0.56; EST_HUMAN HIT: R59266.1, EVALUE 3.00e-51; SWISSPROT HIT: P25304, EVALUE 2.60e-02

SEQ ID NO: 45730 - protein, 52 aa, Homo sapiens
  MAP TO AL109976.21; EXPRESSED IN PLACENTA, SIGNAL = 0.76; EXPRESSED IN FETAL LIVER, SIGNAL = 0.72; EXPRESSED IN BRAIN, SIGNAL = 0.81; EXPRESSED IN ADULT LIVER, SIGNAL = 0.7; EXPRESSED IN BONE MARROW, SIGNAL = 0.67; SWISSPROT HIT: O51066, EVALUE 8.00e+00
WMVYRQIMDSSECFHAAHFQRYLSSALEAQQNRSARQSAYIRKKTRLLVVLQ

SEQ ID NO: 45731 - protein, 26 aa, Homo sapiens
  MAP TO AL109976.21; EXPRESSED IN PLACENTA, SIGNAL = 0.76; EXPRESSED IN FETAL LIVER, SIGNAL = 0.72; EXPRESSED IN BRAIN, SIGNAL = 0.81; EXPRESSED IN ADULT LIVER, SIGNAL = 0.7; EXPRESSED IN BONE MARROW, SIGNAL = 0.67
GWCIAKSWTALNVFMLHTSRDTFPVP

SEQ ID NO: 45732 - protein, 54 aa, Homo sapiens
  MAP TO AC013698.3; EXPRESSED IN ADULT LIVER, SIGNAL = 0.64; EXPRESSED IN BRAIN, SIGNAL = 0.45; EXPRESSED IN BONE MARROW, SIGNAL = 0.5; EXPRESSED IN PLACENTA, SIGNAL = 0.67; EXPRESSED IN FETAL LIVER, SIGNAL = 0.54; EST_HUMAN HIT: BE180318.1, EVALUE 2.00e-09; SWISSPROT HIT: P27041, EVALUE 2.70e+00
VKEVRHKRYMLCHLINLKFKNRQNQPIATLEVTMVVSLEKKVGLLMAALVMFWI

SEQ ID NO: 45733 - protein, 133 aa, Homo sapiens [sequence omitted]

SEQ ID NO: 45734 - protein, 93 aa, Homo sapiens
  MAP TO AC026156.2; EXPRESSED IN PLACENTA, SIGNAL = 0.45; EXPRESSED IN ADULT LIVER, SIGNAL = 0.68; EXPRESSED IN BONE MARROW, SIGNAL = 0.59; EXPRESSED IN FETAL LIVER, SIGNAL = 0.68; EXPRESSED IN BRAIN, SIGNAL = 0.59; SWISSPROT HIT: O14338, EVALUE 5.10e+00
PGHIQPLTPALLITPVLTAAAAAGSGLELGACHAHLPIWIFPSPYSGSCLGRRFISNLSFPTPSDSCPSAISAPKMAVLAGRPVSTMRSIAWG

SEQ ID NO: 45735 - protein, 23 aa, Homo sapiens
  MAP TO AC009079.4; EXPRESSED IN ADULT LIVER, SIGNAL = 1.1; EXPRESSED IN LUNG, SIGNAL = 1.2; EXPRESSED IN PLACENTA, SIGNAL = 0.94; EXPRESSED IN BRAIN, SIGNAL = 1.3; EXPRESSED IN BONE MARROW, SIGNAL = 1.3; EXPRESSED IN FETAL LIVER, SIGNAL = 1.4
SWPNTLWSTTRHPPLPQRPRYPC

SEQ ID NO: 45736 - protein, 114 aa, Homo sapiens
  MAP TO AL136984.7; EXPRESSED IN PLACENTA, SIGNAL = 0.64; EXPRESSED IN ADULT LIVER, SIGNAL = 0.72; EXPRESSED IN BRAIN, SIGNAL = 0.67; EXPRESSED IN BONE MARROW, SIGNAL = 0.78; EXPRESSED IN FETAL LIVER, SIGNAL = 0.81
TSDTTSNNTATVISTAPPASSAVTSPSLSPSPSASASTSEASSASETSTTQTTSTPLSSPLGTSQVMVTASGLQTAAAAALQGAAQLPANASLAAMAAAAGLNPSLMAPSQFAA

SEQ ID NO: 45737 - protein, 83 aa, Homo sapiens
  MAP TO AC015452.4; EXPRESSED IN LUNG, SIGNAL = 1.1; EXPRESSED IN ADULT LIVER, SIGNAL = 1.3; EXPRESSED IN BONE MARROW, SIGNAL = 1.5; EXPRESSED IN FETAL LIVER, SIGNAL = 1.4; EXPRESSED IN BRAIN, SIGNAL = 1.4; EST_HUMAN HIT: AI500342.1, EVALUE 1.00e-29; SWISSPROT HIT: P03365, EVALUE 3.20e-02
QNQQPIWIPSRHLKPFHEPDAEEEIPGGSRGTPGCSNVETEAEEDPNCHKQHPSNTATHLGTDQEAVTDGRRKSEESRTTSHN

SEQ ID NO: 45738 - protein, 55 aa, Homo sapiens
  MAP TO AC021115.3; EXPRESSED IN LUNG, SIGNAL = 1.2; EXPRESSED IN FETAL LIVER, SIGNAL = 0.67; EXPRESSED IN BONE MARROW, SIGNAL = 0.71; EXPRESSED IN PLACENTA, SIGNAL = 0.8; EXPRESSED IN ADULT LIVER, SIGNAL = 0.93; EXPRESSED IN BRAIN, SIGNAL = 0.74; SWISSPROT HIT: P87366, EVALUE 3.50e+00; EST_HUMAN HIT: AI394723.1, EVALUE 5.00e-17
MWRLGDRRIPEGIAVDGGSDWFLLNRRFVEYVTFSTDDLVTKMKQFYSYTLLPAE

SEQ ID NO: 45739 - protein, 39 aa, Homo sapiens
  MAP TO AC021115.3; EXPRESSED IN LUNG, SIGNAL = 1.2; EXPRESSED IN FETAL LIVER, SIGNAL = 0.67; EXPRESSED IN BONE MARROW, SIGNAL = 0.71; EXPRESSED IN PLACENTA, SIGNAL = 0.8; EXPRESSED IN ADULT LIVER, SIGNAL = 0.93; EXPRESSED IN BRAIN, SIGNAL = 0.74; EST_HUMAN HIT: AI394723.1, EVALUE 6.00e-08; SWISSPROT HIT: P54087, EVALUE 6.40e+00
FGSRAWIGSSWSATLTCGAWEIGGSQRALPWMAVRTGSC

SEQ ID NO: 45740 - protein, 52 aa, Homo sapiens
  MAP TO AC023340.2; EXPRESSED IN PLACENTA, SIGNAL = 0.72; EXPRESSED IN FETAL LIVER, SIGNAL = 0.78; EXPRESSED IN ADULT LIVER, SIGNAL = 0.74; EXPRESSED IN BRAIN, SIGNAL = 0.53; EXPRESSED IN BONE MARROW, SIGNAL = 0.62; EXPRESSED IN LUNG, SIGNAL = 1.1; EST_HUMAN HIT: BE253347.1, EVALUE 1.00e-09; SWISSPROT HIT: O14817, EVALUE 4.70e+00
MVDPTGFREIVAANPLLLTGAYILLAMGGLLFLLGFLGCCGAVRENKCLLLF

SEQ ID NO: 45741 - protein, 32 aa, Homo sapiens
  MAP TO AC025221.2; EXPRESSED IN ADULT LIVER, SIGNAL = 0.84; EXPRESSED IN PLACENTA, SIGNAL = 0.95; EXPRESSED IN FETAL LIVER, SIGNAL = 0.77; EXPRESSED IN BRAIN, SIGNAL = 0.68; EXPRESSED IN LUNG, SIGNAL =   1; EXPRESSED IN BONE MARROW, SIGNAL = 0.63
HSWLPEPMDYLEPGIILQLVEEAVLKLNFQEN

SEQ ID NO: 45742 - protein, 164 aa, Homo sapiens
  MAP TO AC010290.4; EXPRESSED IN PLACENTA, SIGNAL = 0.5; EXPRESSED IN FETAL LIVER, SIGNAL = 0.53; EXPRESSED IN BRAIN, SIGNAL = 0.46; EXPRESSED IN BONE MARROW, SIGNAL = 0.6; EST_HUMAN HIT: BE304522.1, EVALUE 2.00e-44; SWISSPROT HIT: P18171, EVALUE 1.80e-01
TKMVQHIRKKHPEFAQLSNTIHTPLTTAVISATPAVLTTDSATGETVVTTDLLTQAMTELSQTLTTDYRTPQGDYQRIQYIPVSQSASGLQQPQHIQLQVVQVASVLRALVSLCLMNAVLPLAPHSQSWGWDLCNVLLRGSSEPWAFYNCPFPFQADEASGLSN

SEQ ID NO: 45743 - protein, 24 aa, Homo sapiens
  MAP TO AC010290.4; EXPRESSED IN PLACENTA, SIGNAL = 0.5; EXPRESSED IN FETAL LIVER, SIGNAL = 0.53; EXPRESSED IN BRAIN, SIGNAL = 0.46; EXPRESSED IN BONE MARROW, SIGNAL = 0.6; EST_HUMAN HIT: BE304522.1, EVALUE 2.80e-02
PRWSSTFERSIQSSPSSPTPYTHH

SEQ ID NO: 45744 - protein, 56 aa, Homo sapiens
  MAP TO AC013627.3; EXPRESSED IN BONE MARROW, SIGNAL = 0.74; EXPRESSED IN ADULT LIVER, SIGNAL = 0.92; EXPRESSED IN BRAIN, SIGNAL = 0.56; EXPRESSED IN PLACENTA, SIGNAL = 0.71; EXPRESSED IN FETAL LIVER, SIGNAL = 0.71; EST_HUMAN HIT: AA325835.1, EVALUE 5.00e-19; SWISSPROT HIT: P04710, EVALUE 7.00e-07
VMKTRLAVGKTGQYSGIYDCAKKILKHEGLGAFYKGYVPNLLGIIPYAGIDLAVYE

SEQ ID NO: 45745 - protein, 67 aa, Homo sapiens
  MAP TO AL137225.7; EXPRESSED IN PLACENTA, SIGNAL = 0.9; EXPRESSED IN ADULT LIVER, SIGNAL = 0.6; EXPRESSED IN FETAL LIVER, SIGNAL = 0.82; EXPRESSED IN BONE MARROW, SIGNAL = 0.71; EXPRESSED IN BRAIN, SIGNAL = 0.79; EST_HUMAN HIT: H65167.1, EVALUE 1.00e-21; SWISSPROT HIT: P53297, EVALUE 2.00e+00
TLVGEAGGGLIDYPLGWPAVSPKPMPELPPMGDNTKSQLAMSANFLGSVLTLLQKQHALDLDITNGM

SEQ ID NO: 45746 - protein, 49 aa, Homo sapiens
  MAP TO AL137225.7; EXPRESSED IN PLACENTA, SIGNAL = 0.9; EXPRESSED IN ADULT LIVER, SIGNAL = 0.6; EXPRESSED IN FETAL LIVER, SIGNAL = 0.82; EXPRESSED IN BONE MARROW, SIGNAL = 0.71; EXPRESSED IN BRAIN, SIGNAL = 0.79; EST_HUMAN HIT: H65167.1, EVALUE 6.00e-22; SWISSPROT HIT: P24585, EVALUE 2.70e+00
RWLGRLEEDSSTTHWGGQLCLPSRCQSCLPWVTTPSPSWPCLPTSWAQC

SEQ ID NO: 45747 - protein, 29 aa, Homo sapiens
  MAP TO AC018535.3; EXPRESSED IN BONE MARROW, SIGNAL = 0.62; EXPRESSED IN ADULT LIVER, SIGNAL = 0.65; EXPRESSED IN BRAIN, SIGNAL = 0.66; EXPRESSED IN PLACENTA, SIGNAL = 0.66; EXPRESSED IN FETAL LIVER, SIGNAL = 0.65; EST_HUMAN HIT: AW953229.1, EVALUE 2.00e-09; SWISSPROT HIT: P96786, EVALUE 8.60e+00
DIDEMKISYVLNEGSNASKDIFYFSVEDN

SEQ ID NO: 45748 - protein, 92 aa, Homo sapiens
  MAP TO AC008750.4; EXPRESSED IN PLACENTA, SIGNAL = 0.54; EXPRESSED IN FETAL LIVER, SIGNAL = 0.52; EXPRESSED IN BRAIN, SIGNAL = 0.46; EXPRESSED IN BONE MARROW, SIGNAL = 0.54; EST_HUMAN HIT: AU138048.1, EVALUE 5.00e-12; SWISSPROT HIT: P20138, EVALUE 6.00e-17
DWTGSTPAYGYWFKAVTETTKGAPVATNHQSREVEMSTRGRFQLTGDPAKGNCSLVIRDAQMQDESQYFFRVERGSYVRYNFMNDGFFLKVT

SEQ ID NO: 45749 - protein, 40 aa, Homo sapiens
  MAP TO AC021641.4; EXPRESSED IN BONE MARROW, SIGNAL = 0.53; EXPRESSED IN ADULT LIVER, SIGNAL = 0.58; EXPRESSED IN BRAIN, SIGNAL = 0.48; EXPRESSED IN PLACENTA, SIGNAL = 0.54; EXPRESSED IN FETAL LIVER, SIGNAL = 0.54
WCKTREDAVMLTLLPQSMLQPTSVHSVVKLGVFQFSVHEN

SEQ ID NO: 45750 - protein, 53 aa, Homo sapiens
  MAP TO AC025746.2; EXPRESSED IN PLACENTA, SIGNAL = 0.56; EXPRESSED IN ADULT LIVER, SIGNAL = 0.66; EXPRESSED IN BRAIN, SIGNAL = 0.62; EXPRESSED IN FETAL LIVER, SIGNAL = 0.53; EXPRESSED IN BONE MARROW, SIGNAL = 0.54; SWISSPROT HIT: Q58605, EVALUE 2.70e+00; EST_HUMAN HIT: AA657909.1, EVALUE 6.40e+00
LNGTALSSELTVVNEQEEIPALMMLKGVREGKQIKTTIRTYVVRNAEHRKEEA

SEQ ID NO: 45751 - protein, 137 aa, Homo sapiens
  MAP TO AC008103.27; EXPRESSED IN ADULT LIVER, SIGNAL = 1.4; EXPRESSED IN FETAL LIVER, SIGNAL = 1.2; EXPRESSED IN BRAIN, SIGNAL = 1.1; EXPRESSED IN BONE MARROW, SIGNAL = 1.3; EXPRESSED IN LUNG, SIGNAL = 1.1; EXPRESSED IN PLACENTA, SIGNAL = 0.77; SWISSPROT HIT: P10263, EVALUE 2.00e-56; EST_HUMAN HIT: BE466095.1, EVALUE 4.00e-40
VVIEDKSTRDPEYVYSQPYGKLVRSEEARVIMGQTKSKIKSKYASYLSFIKILLKRGGVKVSTKNLIKLFQIIEQFCPWFPEQGTLDLKDWKRIGKELKQAGRKGNIIPLTVWNDWAIIKAALEPFQTEEDSVSVSD

SEQ ID NO: 45752 - protein, 76 aa, Homo sapiens
  MAP TO AL161445.2; EXPRESSED IN PLACENTA, SIGNAL = 1.1; EXPRESSED IN ADULT LIVER, SIGNAL = 0.86; EXPRESSED IN FETAL LIVER, SIGNAL = 1.3; EXPRESSED IN BRAIN, SIGNAL = 0.74; EXPRESSED IN BONE MARROW, SIGNAL = 1.2; EXPRESSED IN LUNG, SIGNAL = 1.4; EST_HUMAN HIT: AI192425.1, EVALUE 6.00e-26; SWISSPROT HIT: P15291, EVALUE 1.00e-39
MLIEFNMPVDLELVAKQNPNVKMGGRYAPRDCVSPHKVAIIIPFRNRQEHLKYWLYYLHPVLQRQQLDYGIYVINQ

SEQ ID NO: 45753 - protein, 44 aa, Homo sapiens
  MAP TO AC013818.3; EXPRESSED IN BONE MARROW, SIGNAL = 0.6; EXPRESSED IN ADULT LIVER, SIGNAL = 0.92; EXPRESSED IN BRAIN, SIGNAL = 0.62; EXPRESSED IN LUNG, SIGNAL = 0.91; EXPRESSED IN PLACENTA, SIGNAL = 0.85; EXPRESSED IN FETAL LIVER, SIGNAL = 0.61; EST_HUMAN HIT: AU125430.1, EVALUE 1.00e-17; SWISSPROT HIT: P52849, EVALUE 8.00e-19
VYPVHIQLYAAWKKVWGIQVTSTEEYPHLKPARYRKGFIHNSIM

SEQ ID NO: 45754 - protein, 29 aa, Homo sapiens
  MAP TO AC013818.3; EXPRESSED IN BONE MARROW, SIGNAL = 0.6; EXPRESSED IN ADULT LIVER, SIGNAL = 0.92; EXPRESSED IN BRAIN, SIGNAL = 0.62; EXPRESSED IN LUNG, SIGNAL = 0.91; EXPRESSED IN PLACENTA, SIGNAL = 0.85; EXPRESSED IN FETAL LIVER, SIGNAL = 0.61; EST_HUMAN HIT: AA354508.1, EVALUE 8.00e-04
GSTRFTFSCMQLGRRSGVFKSPALKNIHI

SEQ ID NO: 45755 - protein, 79 aa, Homo sapiens
  MAP TO AC007325.51; EXPRESSED IN PLACENTA, SIGNAL = 0.65; EXPRESSED IN ADULT LIVER, SIGNAL = 0.71; EXPRESSED IN BRAIN, SIGNAL = 0.68; EXPRESSED IN BONE MARROW, SIGNAL = 0.67; EXPRESSED IN FETAL LIVER, SIGNAL = 0.74; EST_HUMAN HIT: AI904151.1, EVALUE 3.00e-24
RMRLLYMTSLMRTLYMTSLMRTLYTTSLMRTLYTTSLMRTLYMASLMRMLYTNSLIRMLYMTLLMRTLYKTSVKKKMLP

SEQ ID NO: 45756 - protein, 60 aa, Homo sapiens
  MAP TO AC018896.2; EXPRESSED IN PLACENTA, SIGNAL = 0.6; EXPRESSED IN ADULT LIVER, SIGNAL = 0.57; EXPRESSED IN FETAL LIVER, SIGNAL = 0.52; EXPRESSED IN BRAIN, SIGNAL = 0.53; EXPRESSED IN BONE MARROW, SIGNAL = 0.49
HQCRSCLCPRGRVGRKGRCRDCSFHTWSLGMSCPPPPCCPSWLLWASAALGATARSRAHC

SEQ ID NO: 45757 - protein, 41 aa, Homo sapiens
  MAP TO AC013751.3; EXPRESSED IN PLACENTA, SIGNAL = 0.65; EXPRESSED IN BONE MARROW, SIGNAL = 0.64; EXPRESSED IN ADULT LIVER, SIGNAL = 0.72; EXPRESSED IN BRAIN, SIGNAL = 0.6; EXPRESSED IN FETAL LIVER, SIGNAL = 0.65; EST_HUMAN HIT: AA069559.1, EVALUE 6.00e-18; SWISSPROT HIT: P46590, EVALUE 6.30e+00
KLSKKNSSGDLTTNPDPQNAAEPTGTVPEQKEMDPGKEGPN

SEQ ID NO: 45758 - protein, 24 aa, Homo sapiens
  MAP TO AC010634.2; EXPRESSED IN LUNG, SIGNAL = 0.95; EXPRESSED IN PLACENTA, SIGNAL = 1.1; EXPRESSED IN ADULT LIVER, SIGNAL = 0.59; EXPRESSED IN FETAL LIVER, SIGNAL = 0.56; EXPRESSED IN BRAIN, SIGNAL = 0.61
KSGKFKPAISNQKQEPSNYPNANH

SEQ ID NO: 45759 - protein, 24 aa, Homo sapiens
  MAP TO AC010634.2; EXPRESSED IN LUNG, SIGNAL = 0.95; EXPRESSED IN PLACENTA, SIGNAL = 1.1; EXPRESSED IN ADULT LIVER, SIGNAL = 0.59; EXPRESSED IN FETAL LIVER, SIGNAL = 0.56; EXPRESSED IN BRAIN, SIGNAL = 0.61
KVGSSNQQSQTRSRSRRTTPTLTT

SEQ ID NO: 45760 - protein, 42 aa, Homo sapiens
  MAP TO AC013552.3; EXPRESSED IN PLACENTA, SIGNAL = 0.52; EXPRESSED IN ADULT LIVER, SIGNAL = 0.55; EXPRESSED IN FETAL LIVER, SIGNAL = 0.49; EXPRESSED IN BONE MARROW, SIGNAL = 0.47; EXPRESSED IN BRAIN, SIGNAL = 0.49
CPNCTRKLIGSGISPTSSTLAEEQGSVVKTHSHQGGARCSKE

SEQ ID NO: 45761 - protein, 25 aa, Homo sapiens
  MAP TO AC019295.3; EXPRESSED IN FETAL LIVER, SIGNAL = 0.57; EXPRESSED IN BONE MARROW, SIGNAL = 0.68; EXPRESSED IN BRAIN, SIGNAL = 1.7; EST_HUMAN HIT: AW504389.1, EVALUE 3.20e-01
AVQVLKKEICLEETGKRKKRKEKIH

SEQ ID NO: 45762 - protein, 35 aa, Homo sapiens [sequence omitted]

SEQ ID NO: 45763 - protein, 27 aa, Homo sapiens
  MAP TO AL161670.1; EXPRESSED IN PLACENTA, SIGNAL = 1.1; EXPRESSED IN ADULT LIVER, SIGNAL =   1; EXPRESSED IN BRAIN, SIGNAL = 1.7; EXPRESSED IN LUNG, SIGNAL = 0.95; EXPRESSED IN FETAL LIVER, SIGNAL = 1.3; EXPRESSED IN BONE MARROW, SIGNAL = 1.1
GEYFSNEGLMTCFRERQKCPFRLYDLL

SEQ ID NO: 45764 - protein, 69 aa, Homo sapiens
  MAP TO AC013705.3; EXPRESSED IN PLACENTA, SIGNAL = 1.1; EXPRESSED IN ADULT LIVER, SIGNAL = 1.1; EXPRESSED IN FETAL LIVER, SIGNAL = 0.74; EXPRESSED IN BRAIN, SIGNAL = 0.84; EXPRESSED IN BONE MARROW, SIGNAL = 0.86; EXPRESSED IN LUNG, SIGNAL = 0.96; EST_HUMAN HIT: BE909055.1, EVALUE 1.10e+00; SWISSPROT HIT: Q28998, EVALUE 2.00e+00
MKCCSLVAAAIRCAAPGDGGTVSGAYAVVVCLPPTTMATAGTSQNPKICGFFLTPEEARKVKRQEEVQE

SEQ ID NO: 45765 - protein, 41 aa, Homo sapiens
  MAP TO AC009467.3; EXPRESSED IN PLACENTA, SIGNAL = 0.47; EXPRESSED IN FETAL LIVER, SIGNAL = 0.82; EXPRESSED IN ADULT LIVER, SIGNAL =   1; EXPRESSED IN BONE MARROW, SIGNAL = 0.68; EXPRESSED IN BRAIN, SIGNAL = 0.63
EHSVKKKKKKDKHSKKAKKEKKKKSKKQKYEKNNESSDSSS

SEQ ID NO: 45766 - protein, 29 aa, Homo sapiens
  MAP TO AC009486.3; EXPRESSED IN FETAL LIVER, SIGNAL = 0.93; EXPRESSED IN BONE MARROW, SIGNAL = 5.2; EXPRESSED IN PLACENTA, SIGNAL = 0.59; EXPRESSED IN ADULT LIVER, SIGNAL = 0.9; EXPRESSED IN BRAIN, SIGNAL = 0.93; EXPRESSED IN LUNG, SIGNAL = 0.96; EST_HUMAN HIT: AU127403.1, EVALUE 7.00e-11
LGSSWKAWKTPTFCGEMMIPSPTSMAARL

SEQ ID NO: 45767 - protein, 138 aa, Homo sapiens
  MAP TO AC009486.3; EXPRESSED IN FETAL LIVER, SIGNAL = 0.93; EXPRESSED IN BONE MARROW, SIGNAL = 5.2; EXPRESSED IN PLACENTA, SIGNAL = 0.59; EXPRESSED IN ADULT LIVER, SIGNAL = 0.9; EXPRESSED IN BRAIN, SIGNAL = 0.93; EXPRESSED IN LUNG, SIGNAL = 0.96; SWISSPROT HIT: O74536, EVALUE 1.00e-18; EST_HUMAN HIT: BE897149.1, EVALUE 2.00e-71
TRVKLESLEDAYILRGDDDSLSDKHGCPAYVSPEILNTSGSYSGKAADVWSLGVMLYTMLVGRYPFHDIEPSSLFSKIRRGQFNIPETLSPKAKCLIRSILRREPSERLTSQEILDHPWFSTDFSVSNSAYGAKEVSD

SEQ ID NO: 45768 - protein, 49 aa, Homo sapiens
  MAP TO AC018425.3; EXPRESSED IN ADULT LIVER, SIGNAL = 0.65; EXPRESSED IN FETAL LIVER, SIGNAL = 0.5; EXPRESSED IN BRAIN, SIGNAL = 0.49; EXPRESSED IN PLACENTA, SIGNAL = 0.56; EXPRESSED IN BONE MARROW, SIGNAL = 0.47; SWISSPROT HIT: Q9YDX4, EVALUE 6.20e+00; EST_HUMAN HIT: AW591518.1, EVALUE 7.00e-06
LWRLRSPRSRCWHLMRAFLLCPHMKEGRRAKKGTNSLSSYGRREERTHS

SEQ ID NO: 45769 - protein, 25 aa, Homo sapiens
  MAP TO AC019278.3; EXPRESSED IN BONE MARROW, SIGNAL = 0.65; EXPRESSED IN PLACENTA, SIGNAL = 0.64; EXPRESSED IN ADULT LIVER, SIGNAL = 1.3; EXPRESSED IN FETAL LIVER, SIGNAL = 0.71; EXPRESSED IN BRAIN, SIGNAL = 0.56; EST_HUMAN HIT: AW855868.1, EVALUE 1.00e-07
YTLPNWLKINMLSAKTETEVPDVLY

SEQ ID NO: 45770 - protein, 25 aa, Homo sapiens
  MAP TO AC019278.3; EXPRESSED IN BONE MARROW, SIGNAL = 0.65; EXPRESSED IN PLACENTA, SIGNAL = 0.64; EXPRESSED IN ADULT LIVER, SIGNAL = 1.3; EXPRESSED IN FETAL LIVER, SIGNAL = 0.71; EXPRESSED IN BRAIN, SIGNAL = 0.56; EST_HUMAN HIT: AW855868.1, EVALUE 1.00e-07
IHYPTGSKSICCQLKQKLRSLMSFT

SEQ ID NO: 45771 - protein, 32 aa, Homo sapiens
  MAP TO AC013691.3; EXPRESSED IN PLACENTA, SIGNAL = 0.79; EXPRESSED IN FETAL LIVER, SIGNAL = 0.65; EXPRESSED IN ADULT LIVER, SIGNAL = 1.3; EXPRESSED IN BRAIN, SIGNAL = 0.7; EXPRESSED IN BONE MARROW, SIGNAL = 0.69
TLPVLLEATHMNIVIGVHQAWVPFLPCILLVW

SEQ ID NO: 45772 - protein, 46 aa, Homo sapiens
  MAP TO AC016057.3; EXPRESSED IN PLACENTA, SIGNAL = 0.47; EXPRESSED IN FETAL LIVER, SIGNAL = 0.92; EXPRESSED IN ADULT LIVER, SIGNAL = 0.64; EXPRESSED IN BONE MARROW, SIGNAL = 0.47; EXPRESSED IN BRAIN, SIGNAL = 0.51
RRMAISFPQRLCNSLMTTTVNYSSHPFSEISLSAVSITVVNCSPSI

SEQ ID NO: 45773 - protein, 25 aa, Homo sapiens
  MAP TO AL138956.3; EXPRESSED IN BONE MARROW, SIGNAL = 0.52; EXPRESSED IN PLACENTA, SIGNAL = 0.65; EXPRESSED IN BRAIN, SIGNAL = 0.5
RCEQGSVRDSSAPHGSAGSPSGLQL

SEQ ID NO: 45774 - protein, 19 aa, Homo sapiens
  MAP TO AL138956.3; EXPRESSED IN BONE MARROW, SIGNAL = 0.52; EXPRESSED IN PLACENTA, SIGNAL = 0.65; EXPRESSED IN BRAIN, SIGNAL = 0.5; SWISSPROT HIT: P31209, EVALUE 6.70e+00
QLKTTGRPCRAMWSRRITH

SEQ ID NO: 45775 - protein, 58 aa, Homo sapiens
  MAP TO AC011292.2; EXPRESSED IN LUNG, SIGNAL = 1.4; EXPRESSED IN PLACENTA, SIGNAL = 1.3; EXPRESSED IN ADULT LIVER, SIGNAL = 1.1; EXPRESSED IN BRAIN, SIGNAL = 1.3; EXPRESSED IN FETAL LIVER, SIGNAL = 0.86; EXPRESSED IN BONE MARROW, SIGNAL = 1.1; EST_HUMAN HIT: AW062377.1, EVALUE 5.40e-01; SWISSPROT HIT: P16691, EVALUE 7.90e+00
TEKAVDIQGSEVESQGIKLRTGKQHEFWRVQKSVIYPKAKDLHISKKILVITRTKNKS

SEQ ID NO: 45776 - protein, 30 aa, Homo sapiens
  MAP TO AL157405.2; EXPRESSED IN BONE MARROW, SIGNAL = 0.47; EXPRESSED IN PLACENTA, SIGNAL = 0.5; EXPRESSED IN BRAIN, SIGNAL = 0.47; EST_HUMAN HIT: AI001770.1, EVALUE 6.00e-11
MGRSQAKGKEAPCVSLDGFDEKMQVELWNE

SEQ ID NO: 45777 - protein, 29 aa, Homo sapiens
  MAP TO AL157405.2; EXPRESSED IN BONE MARROW, SIGNAL = 0.47; EXPRESSED IN PLACENTA, SIGNAL = 0.5; EXPRESSED IN BRAIN, SIGNAL = 0.47; EST_HUMAN HIT: AI001770.1, EVALUE 1.00e-12
WADHRLRGKKLPVYPWMALMRRCRWSCGT

SEQ ID NO: 45778 - protein, 58 aa, Homo sapiens
  MAP TO AC011778.3; EXPRESSED IN PLACENTA, SIGNAL = 0.52; EXPRESSED IN BRAIN, SIGNAL = 0.47; EXPRESSED IN BONE MARROW, SIGNAL = 0.78; EXPRESSED IN FETAL LIVER, SIGNAL = 0.49
MVLFGKYKIIASYILIEKRPMGIFFFVIMLILIKVLILIKVAQEIGAVNKDKWHVTSL

SEQ ID NO: 45779 - protein, 63 aa, Homo sapiens
  MAP TO AL138914.5; EXPRESSED IN ADULT LIVER, SIGNAL = 1.2; EXPRESSED IN FETAL LIVER, SIGNAL = 0.94; EXPRESSED IN BRAIN, SIGNAL = 1.3; EXPRESSED IN BONE MARROW, SIGNAL = 1.1; EXPRESSED IN LUNG, SIGNAL = 1.1; EXPRESSED IN PLACENTA, SIGNAL = 1.2; SWISSPROT HIT: P03518, EVALUE 1.40e+00; EST_HUMAN HIT: BE742383.1, EVALUE 1.50e+00
SSTILDQRPCGSKHRVGLPPPLPFPPSPASSRVSSQCGHRSWVGGGGLMLGRPFPSPPQCPAP

SEQ ID NO: 45780 - protein, 67 aa, Homo sapiens
  MAP TO AC009467.3; EXPRESSED IN ADULT LIVER, SIGNAL = 0.92; EXPRESSED IN PLACENTA, SIGNAL = 0.79; EXPRESSED IN BRAIN, SIGNAL = 0.78; EXPRESSED IN BONE MARROW, SIGNAL = 0.91; EXPRESSED IN LUNG, SIGNAL = 0.88; EXPRESSED IN FETAL LIVER, SIGNAL = 0.82; EST_HUMAN HIT: BE158913.1, EVALUE 3.00e-23
LWEKQMETITPWMTCLSPKQLRENVLVKRKRTKGKKLLLSIGVLLHKWKNVCIVLTALNFPSILLLQ

SEQ ID NO: 45781 - protein, 29 aa, Homo sapiens
  MAP TO AC018560.3; EXPRESSED IN PLACENTA, SIGNAL = 0.5; EXPRESSED IN BONE MARROW, SIGNAL = 0.44; EXPRESSED IN FETAL LIVER, SIGNAL = 0.47; EXPRESSED IN BRAIN, SIGNAL = 0.6
NLMCVKEQRMCSHSTCVKVLAQQVSSVCE

SEQ ID NO: 45782 - protein, 72 aa, Homo sapiens
  MAP TO AC010162.6; EXPRESSED IN BRAIN, SIGNAL = 0.55; EXPRESSED IN FETAL LIVER, SIGNAL = 0.53; EXPRESSED IN BONE MARROW, SIGNAL = 0.48; SWISSPROT HIT: Q9VZH1, EVALUE 4.60e+00; EST_HUMAN HIT: BE551292.1, EVALUE 2.00e-30
LGNEEQQEKLLREWLDCCVTEGGVLVAMQKSSRRRNHPLVTQMVEKWLDRYRQIRPCTSLSDGEEDEDDEDE

SEQ ID NO: 45783 - protein, 18 aa, Homo sapiens
  MAP TO AC010162.6; EXPRESSED IN BRAIN, SIGNAL = 0.55; EXPRESSED IN FETAL LIVER, SIGNAL = 0.53; EXPRESSED IN BONE MARROW, SIGNAL = 0.48; EST_HUMAN HIT: AV716271.1, EVALUE 2.20e-02
KSLICCMIFPLSSYSSKS

SEQ ID NO: 45784 - protein, 60 aa, Homo sapiens
  MAP TO AC007923.2; EXPRESSED IN ADULT LIVER, SIGNAL = 1.9; EXPRESSED IN BRAIN, SIGNAL = 1.4; EXPRESSED IN LUNG, SIGNAL = 1.3; EXPRESSED IN PLACENTA, SIGNAL = 1.1; EXPRESSED IN FETAL LIVER, SIGNAL = 1.8; EXPRESSED IN BONE MARROW, SIGNAL = 2.1; SWISSPROT HIT: P97481, EVALUE 7.90e-02; EST_HUMAN HIT: BE064386.1, EVALUE 4.00e-21
GRDSGGDPPVAVMSRLMLRRTPTVTSNTCQTQPPTWGQIKKLSQTVEENLRKAGQPVTIS

SEQ ID NO: 45785 - protein, 19 aa, Homo sapiens
  MAP TO AC013691.3; EXPRESSED IN LUNG, SIGNAL = 1.2; EXPRESSED IN ADULT LIVER, SIGNAL = 1.1; EXPRESSED IN BRAIN, SIGNAL = 0.95; EXPRESSED IN PLACENTA, SIGNAL = 1.1; EXPRESSED IN FETAL LIVER, SIGNAL = 0.95; EXPRESSED IN BONE MARROW, SIGNAL = 0.98
MHLCWKKSWGMAREKKWQV

SEQ ID NO: 45786 - protein, 44 aa, Homo sapiens
  MAP TO AC021782.2; EXPRESSED IN BONE MARROW, SIGNAL = 0.95; EXPRESSED IN LUNG, SIGNAL = 0.97; EXPRESSED IN ADULT LIVER, SIGNAL =   1; EXPRESSED IN BRAIN, SIGNAL = 0.94; EXPRESSED IN PLACENTA, SIGNAL =   1; EXPRESSED IN FETAL LIVER, SIGNAL = 0.81; SWISSPROT HIT: P53882, EVALUE 1.20e+00; EST_HUMAN HIT: BE081469.1, EVALUE 2.00e-13
ANNMAVIFDSSLACVPNIQSVNKSSRLCPSLTNFTASILASHHH

SEQ ID NO: 45787 - protein, 49 aa, Homo sapiens
  MAP TO AC016212.3; EXPRESSED IN ADULT LIVER, SIGNAL = 0.57; EXPRESSED IN BRAIN, SIGNAL = 0.54; EXPRESSED IN BONE MARROW, SIGNAL = 0.56; EXPRESSED IN PLACENTA, SIGNAL = 0.64; SWISSPROT HIT: P55203, EVALUE 3.60e+00; EST_HUMAN HIT: AI888072.1, EVALUE 8.70e+00
MKHNPLDGVTEAPTPKCGGDNDTICSYGLRLFAFFGIHTALVASIEFVV

SEQ ID NO: 45788 - protein, 18 aa, Homo sapiens
  MAP TO AC022317.4; EXPRESSED IN PLACENTA, SIGNAL = 0.69; EXPRESSED IN ADULT LIVER, SIGNAL = 0.76; EXPRESSED IN FETAL LIVER, SIGNAL = 0.67; EXPRESSED IN BONE MARROW, SIGNAL = 0.81; EXPRESSED IN BRAIN, SIGNAL = 0.76
CSIQWKVINQQKLSLRKS

SEQ ID NO: 45789 - protein, 32 aa, Homo sapiens
  MAP TO AC009466.2; EXPRESSED IN PLACENTA, SIGNAL = 0.82; EXPRESSED IN ADULT LIVER, SIGNAL = 0.73; EXPRESSED IN FETAL LIVER, SIGNAL = 0.59; EXPRESSED IN BRAIN, SIGNAL = 0.82; EXPRESSED IN BONE MARROW, SIGNAL = 0.65; EST_HUMAN HIT: BE314123.1, EVALUE 6.00e-10
VLAIRQQSFALLLHLAQTESGRSLIINHLDLT

SEQ ID NO: 45790 - protein, 78 aa, Homo sapiens
  MAP TO AL138914.5; EXPRESSED IN ADULT LIVER, SIGNAL = 0.84; EXPRESSED IN BONE MARROW, SIGNAL = 0.93; EXPRESSED IN BRAIN, SIGNAL = 0.97; EXPRESSED IN PLACENTA, SIGNAL = 0.72; EXPRESSED IN FETAL LIVER, SIGNAL = 0.67; EST_HUMAN HIT: N52903.1, EVALUE 2.10e+00; SWISSPROT HIT: Q57987, EVALUE 5.90e+00
RLRLELVCKHIDAGCGADEEGTAFSLNPSSALHPDRGIEEITKTSEVFRCPHPLLIFDGNSQNLKTKTTKNTTSNNKQ

SEQ ID NO: 45791 - protein, 23 aa, Homo sapiens
  MAP TO AC013657.3; EXPRESSED IN BONE MARROW, SIGNAL = 0.44; EXPRESSED IN PLACENTA, SIGNAL = 0.6; EXPRESSED IN ADULT LIVER, SIGNAL = 0.54; EXPRESSED IN BRAIN, SIGNAL = 0.47; SWISSPROT HIT: P34226, EVALUE 6.70e+00
LTVESSNALAMPSAKMGKSRQSE

SEQ ID NO: 45792 - protein, 34 aa, Homo sapiens
  MAP TO AC021385.3; EXPRESSED IN ADULT LIVER, SIGNAL = 0.54; EXPRESSED IN PLACENTA, SIGNAL = 0.6; EXPRESSED IN BONE MARROW, SIGNAL = 0.51; EXPRESSED IN BRAIN, SIGNAL = 0.58
CGHLLRSMMSSKLMAKWLKRNWWNYHLAPTSGLL

SEQ ID NO: 45793 - protein, 44 aa, Homo sapiens
  MAP TO AC018425.3; EXPRESSED IN LUNG, SIGNAL = 0.88; EXPRESSED IN PLACENTA, SIGNAL = 0.93; EXPRESSED IN ADULT LIVER, SIGNAL = 0.93; EXPRESSED IN BRAIN, SIGNAL = 0.92; EXPRESSED IN FETAL LIVER, SIGNAL = 0.75; EXPRESSED IN BONE MARROW, SIGNAL = 0.9; SWISSPROT HIT: Q12798, EVALUE 1.00e-07; EST_HUMAN HIT: AV748749.1, EVALUE 2.00e-18
ASNYHTSSDQWKKRAAKIELNESQKQEIKDAFNLFDIDGSGTID

SEQ ID NO: 45794 - protein, 19 aa, Homo sapiens
  MAP TO AC018425.3; EXPRESSED IN LUNG, SIGNAL = 0.88; EXPRESSED IN PLACENTA, SIGNAL = 0.93; EXPRESSED IN ADULT LIVER, SIGNAL = 0.93; EXPRESSED IN BRAIN, SIGNAL = 0.92; EXPRESSED IN FETAL LIVER, SIGNAL = 0.75; EXPRESSED IN BONE MARROW, SIGNAL = 0.9; EST_HUMAN HIT: AA328999.1, EVALUE 2.00e-03
HLTTIQVQTNGRKEQQKLN

SEQ ID NO: 45795 - protein, 54 aa, Homo sapiens
  MAP TO AL137141.7; EXPRESSED IN PLACENTA, SIGNAL = 0.88; EXPRESSED IN ADULT LIVER, SIGNAL = 0.73; EXPRESSED IN FETAL LIVER, SIGNAL = 0.89; EXPRESSED IN BONE MARROW, SIGNAL = 3.1; EXPRESSED IN LUNG, SIGNAL = 1.3; EXPRESSED IN BRAIN, SIGNAL = 0.67; SWISSPROT HIT: P13796, EVALUE 1.00e-26; EST_HUMAN HIT: AW503428.1, EVALUE 1.00e-25
TDGNGYISFNELNDLFKAACLPLPGYRVREITENLMATGDLDQDGRISFDEFIK

SEQ ID NO: 45796 - protein, 24 aa, Homo sapiens
  MAP TO AC011229.2; EXPRESSED IN ADULT LIVER, SIGNAL = 0.84; EXPRESSED IN BONE MARROW, SIGNAL = 0.79; EXPRESSED IN BRAIN, SIGNAL = 1.3; EXPRESSED IN PLACENTA, SIGNAL = 1.4; EXPRESSED IN FETAL LIVER, SIGNAL = 0.7
MICSFWKSKMIIKTESKILPSHIP

SEQ ID NO: 45797 - protein, 20 aa, Homo sapiens
  MAP TO AC018909.3; EXPRESSED IN BONE MARROW, SIGNAL = 0.87; EXPRESSED IN PLACENTA, SIGNAL = 0.83; EXPRESSED IN ADULT LIVER, SIGNAL = 1.1; EXPRESSED IN BRAIN, SIGNAL = 0.96; EXPRESSED IN LUNG, SIGNAL = 0.89; EXPRESSED IN FETAL LIVER, SIGNAL = 0.84
SLYNMESSILSSTSKSADFR

SEQ ID NO: 45798 - protein, 47 aa, Homo sapiens
  MAP TO AL139352.8; EXPRESSED IN FETAL LIVER, SIGNAL = 1.3; EXPRESSED IN PLACENTA, SIGNAL = 1.3; EXPRESSED IN BONE MARROW, SIGNAL = 1.4; EXPRESSED IN LUNG, SIGNAL = 1.3; EXPRESSED IN ADULT LIVER, SIGNAL = 1.1; EXPRESSED IN BRAIN, SIGNAL = 1.3; SWISSPROT HIT: P00813, EVALUE 3.00e-22; EST_HUMAN HIT: BE792987.1, EVALUE 4.00e-21
GCREAIKRIAYEFVEMKAKEGVVYVEVRYSPHLLANSKVEPIPWNQA

SEQ ID NO: 45799 - protein, 108 aa, Homo sapiens
  MAP TO AC013800.3; EXPRESSED IN BONE MARROW, SIGNAL = 0.66; EXPRESSED IN PLACENTA, SIGNAL = 0.97; EXPRESSED IN ADULT LIVER, SIGNAL = 0.84; EXPRESSED IN FETAL LIVER, SIGNAL = 0.58; EXPRESSED IN BRAIN, SIGNAL = 0.73; SWISSPROT HIT: P98063, EVALUE 1.00e-16; EST_HUMAN HIT: AA416550.1, EVALUE 6.00e-14
SCFFNFTSPSGVVLSPNYPEDYGNHLHCVWLILARPESRIHLAFNDIDVEPQFDFLVIKDGATAEAPVLGTFSGNQLPSSITSSGHVARLEFQTDHSTGKRGFNITFT

SEQ ID NO: 45800 - protein, 114 aa, Homo sapiens
  MAP TO AC013800.3; EXPRESSED IN BONE MARROW, SIGNAL = 0.66; EXPRESSED IN PLACENTA, SIGNAL = 0.97; EXPRESSED IN ADULT LIVER, SIGNAL = 0.84; EXPRESSED IN FETAL LIVER, SIGNAL = 0.58; EXPRESSED IN BRAIN, SIGNAL = 0.73; SWISSPROT HIT: Q02910, EVALUE 6.50e-01; EST_HUMAN HIT: AW518564.1, EVALUE 2.20e-01
SPASSTSPARLGLSCLPTTQRTMATTSTVSGSSWPGLRAASTWPSTTLTWSLSLISWSSRMGPPPRRPSWAPSQETSFPPPSQAVATWPVSSSRLTTPQGRGASTSLLPVSPPS

SEQ ID NO: 45801 - protein, 129 aa, Homo sapiens
  MAP TO AC015805.3; EXPRESSED IN BONE MARROW, SIGNAL = 0.73; EXPRESSED IN PLACENTA, SIGNAL = 0.72; EXPRESSED IN ADULT LIVER, SIGNAL = 0.71; EXPRESSED IN BRAIN, SIGNAL = 0.64; EXPRESSED IN FETAL LIVER, SIGNAL = 0.65; SWISSPROT HIT: P32538, EVALUE 8.20e-01; EST_HUMAN HIT: Z42103.1, EVALUE 2.00e-17
TLETTFDTNVTTEMSGRSILSLTGRPTPLSWRLGQSSPRLQAGDAPSMGNGYPPRANASRFINTESGRYVYSAPLRRQLASRGSSVCHVDVSDKAGDEMDLEGISMDAPGYMSDGDVLSKNIRTDDITS

SEQ ID NO: 45802 - protein, 32 aa, Homo sapiens
  MAP TO AC015805.3; EXPRESSED IN BONE MARROW, SIGNAL = 0.73; EXPRESSED IN PLACENTA, SIGNAL = 0.72; EXPRESSED IN ADULT LIVER, SIGNAL = 0.71; EXPRESSED IN BRAIN, SIGNAL = 0.64; EXPRESSED IN FETAL LIVER, SIGNAL = 0.65; EST_HUMAN HIT: R06950.1, EVALUE 4.50e+00; SWISSPROT HIT: P36011, EVALUE 2.90e+00
ETPPQWAMGIPLEPTPAGSSTLSQVAMCTPPL

SEQ ID NO: 45803 - protein, 58 aa, Homo sapiens
  MAP TO AL160492.1; EXPRESSED IN ADULT LIVER, SIGNAL = 0.55; EXPRESSED IN PLACENTA, SIGNAL = 0.56; EXPRESSED IN FETAL LIVER, SIGNAL = 0.49; EXPRESSED IN BONE MARROW, SIGNAL = 0.54; EXPRESSED IN BRAIN, SIGNAL = 0.84; EST_HUMAN HIT: BF346332.1, EVALUE 4.00e-18
TKPAASIDPWGVPTGATAQSVPKNSDPWAASQQPASSAGKRASDAWGAVSTTKPVSVS

SEQ ID NO: 45804 - protein, 111 aa, Homo sapiens
  MAP TO AC019250.3; EXPRESSED IN LUNG, SIGNAL =   1; EXPRESSED IN PLACENTA, SIGNAL = 1.1; EXPRESSED IN ADULT LIVER, SIGNAL = 0.73; EXPRESSED IN BRAIN, SIGNAL = 2.4; EXPRESSED IN FETAL LIVER, SIGNAL = 0.77; EXPRESSED IN BONE MARROW, SIGNAL = 1.1; SWISSPROT HIT: Q61982, EVALUE 3.00e-36; EST_HUMAN HIT: AI631818.1, EVALUE 3.00e-69
KECQWTDACLSHPCANGSTCTTVANQFSCKCLTGFTGQKCETDVNECDIPGHCQHGGTCLNLPGSYQCQCPQGFTGQYCDSLYVPCAPSPCVNGGTCRQTGDFTFECNCLP

SEQ ID NO: 45805 - protein, 101 aa, Homo sapiens
  MAP TO AC019250.3; EXPRESSED IN LUNG, SIGNAL =   1; EXPRESSED IN PLACENTA, SIGNAL = 1.1; EXPRESSED IN ADULT LIVER, SIGNAL = 0.73; EXPRESSED IN BRAIN, SIGNAL = 2.4; EXPRESSED IN FETAL LIVER, SIGNAL = 0.77; EXPRESSED IN BONE MARROW, SIGNAL = 1.1; SWISSPROT HIT: P38739, EVALUE 3.60e+00; EST_HUMAN HIT: AW137104.1, EVALUE 2.00e-49
VRSANGRMPACLIPVQMEVPVPLWPTSSPANASQASQGRNVRLMSMSVTFQDTASMVAPASTCLVPTSASALRASQASTVTACMCPVHPHLVSMEAPVGRL

SEQ ID NO: 45806 - protein, 117 aa, Homo sapiens
  MAP TO AC021880.2; EXPRESSED IN BRAIN, SIGNAL = 0.49; SWISSPROT HIT: Q04652, EVALUE 9.00e-19; EST_HUMAN HIT: AW812355.1, EVALUE 3.00e-16
IRLNEDTIQDVVQAADLLLLTDLKTLCCEFLEGCIAAENCIGIRDFALHYCLHHVHYLATEYLETHFRDVSSTEEFLELSPQKLKEVISLEKLNVGNERYVFEAVIRWIAHDTEIRK

SEQ ID NO: 45807 - protein, 63 aa, Homo sapiens
  MAP TO AC025226.2; EXPRESSED IN PLACENTA, SIGNAL = 0.47; EXPRESSED IN BRAIN, SIGNAL = 0.63; SWISSPROT HIT: P32528, EVALUE 3.20e+00; EST_HUMAN HIT: AW063430.1, EVALUE 2.00e-09
ALPTGDIVTYLCTDHPGDATLLYALPTNGIVTYLCTDHPGEVTFPVSAYRGRCDIILHGSPGL

SEQ ID NO: 45808 - protein, 70 aa, Homo sapiens
  MAP TO AC012241.4; EXPRESSED IN BONE MARROW, SIGNAL = 1.1; EXPRESSED IN LUNG, SIGNAL = 1.3; EXPRESSED IN PLACENTA, SIGNAL = 1.1; EXPRESSED IN ADULT LIVER, SIGNAL = 1.1; EXPRESSED IN BRAIN, SIGNAL = 1.1; EXPRESSED IN FETAL LIVER, SIGNAL = 0.9; EST_HUMAN HIT: BF307178.1, EVALUE 6.30e-01; SWISSPROT HIT: P13685, EVALUE 1.70e-01
YVLGGCTPTEGVKRKIRSILHEALGEEWRPDELGRKNEVQEESPGQEPSRKKRLQKRRGEAPLRQGTNDP

SEQ ID NO: 45809 - protein, 46 aa, Homo sapiens
  MAP TO AC009467.3; EXPRESSED IN BONE MARROW, SIGNAL = 0.49; EXPRESSED IN PLACENTA, SIGNAL = 0.54; EXPRESSED IN BRAIN, SIGNAL = 0.48; SWISSPROT HIT: P06847, EVALUE 8.20e+00; EST_HUMAN HIT: AW836230.1, EVALUE 5.00e-20
VSTHEERERVRYFHDDDNLSLNDLVKNEKMGTAENQNKLFMRMASK

SEQ ID NO: 45810 - protein, 18 aa, Homo sapiens
  MAP TO AC009467.3; EXPRESSED IN BONE MARROW, SIGNAL = 0.49; EXPRESSED IN PLACENTA, SIGNAL = 0.54; EXPRESSED IN BRAIN, SIGNAL = 0.48; EST_HUMAN HIT: AW836230.1, EVALUE 6.00e-03
FQPMRKEKGSDTFMMMII

SEQ ID NO: 45811 - protein, 32 aa, Homo sapiens
  MAP TO AC021774.3; EXPRESSED IN PLACENTA, SIGNAL = 0.6; EXPRESSED IN FETAL LIVER, SIGNAL = 0.56; EXPRESSED IN BRAIN, SIGNAL = 0.84; EXPRESSED IN BONE MARROW, SIGNAL = 0.85
CIQFPKNPSQALVVVVVVVVVAVAVVVAVEVV

SEQ ID NO: 45812 - protein, 37 aa, Homo sapiens
  MAP TO AL138807.7; EXPRESSED IN PLACENTA, SIGNAL = 0.65; EXPRESSED IN FETAL LIVER, SIGNAL = 0.59; EXPRESSED IN BONE MARROW, SIGNAL = 0.51; EXPRESSED IN ADULT LIVER, SIGNAL = 0.64; EXPRESSED IN BRAIN, SIGNAL = 0.83; EST_HUMAN HIT: BF364681.1, EVALUE 2.00e-15
AVQPVQILFQPLFLTSCLLSVCSRNETWCTLYLLGSP

SEQ ID NO: 45813 - protein, 25 aa, Homo sapiens
  MAP TO AL138807.7; EXPRESSED IN PLACENTA, SIGNAL = 0.65; EXPRESSED IN FETAL LIVER, SIGNAL = 0.59; EXPRESSED IN BONE MARROW, SIGNAL = 0.51; EXPRESSED IN ADULT LIVER, SIGNAL = 0.64; EXPRESSED IN BRAIN, SIGNAL = 0.83; EST_HUMAN HIT: BF364684.1, EVALUE 1.20e+00
CCSTSSNTFSTSISYFLPALSLFPK

SEQ ID NO: 45814 - protein, 51 aa, Homo sapiens
  MAP TO AC016471.4; EXPRESSED IN BRAIN, SIGNAL = 0.58
LYVELPRPLQPLTLLLFQFLNQSLFYPLSLLLCTLLHTWTPVITSILLLLL

SEQ ID NO: 45815 - protein, 29 aa, Homo sapiens
  MAP TO AC011229.2; EXPRESSED IN PLACENTA, SIGNAL = 0.7; EXPRESSED IN BRAIN, SIGNAL = 0.76; EXPRESSED IN BONE MARROW, SIGNAL = 0.74; EXPRESSED IN LUNG, SIGNAL = 0.84; EXPRESSED IN ADULT LIVER, SIGNAL = 0.62; EXPRESSED IN FETAL LIVER, SIGNAL = 0.59
NMVAPDKVGTSLFHGLMINYSVEVLVSED

SEQ ID NO: 45816 - protein, 106 aa, Homo sapiens
  MAP TO AC013691.3; EXPRESSED IN ADULT LIVER, SIGNAL =   1; EXPRESSED IN BONE MARROW, SIGNAL = 0.97; EXPRESSED IN PLACENTA, SIGNAL = 0.88; EXPRESSED IN FETAL LIVER, SIGNAL = 0.88; EXPRESSED IN LUNG, SIGNAL = 0.91; EXPRESSED IN BRAIN, SIGNAL = 2.8
VNSELRPKKTQKALYSSPSIHHIMLTRQSIPNKAGPFTRPSFPRSLSPSLHVSLESSSWNLSCTERGRCFFMSMPLLCKSAMPFPILCIRANSYYFFKSQPQVTSS

SEQ ID NO: 45817 - protein, 39 aa, Homo sapiens
  MAP TO AC018780.3; EXPRESSED IN ADULT LIVER, SIGNAL = 0.63; EXPRESSED IN PLACENTA, SIGNAL = 0.54; EXPRESSED IN FETAL LIVER, SIGNAL = 0.73; EXPRESSED IN BRAIN, SIGNAL = 0.59; EXPRESSED IN BONE MARROW, SIGNAL = 0.66; SWISSPROT HIT: P23780, EVALUE 3.00e-05; EST_HUMAN HIT: AA429144.1, EVALUE 7.00e-11
NWNYGFVFINGRNLGRYWNIGPQKTLYLPGVWLHPEDNE

SEQ ID NO: 45818 - protein, 30 aa, Homo sapiens
  MAP TO AC009416.2; EXPRESSED IN BONE MARROW, SIGNAL = 0.57; EXPRESSED IN LUNG, SIGNAL = 0.85; EXPRESSED IN PLACENTA, SIGNAL = 0.93; EXPRESSED IN ADULT LIVER, SIGNAL = 0.73; EXPRESSED IN FETAL LIVER, SIGNAL = 0.63; EXPRESSED IN BRAIN, SIGNAL = 0.49; EST_HUMAN HIT: AI798902.1, EVALUE 4.00e-05
NQNQIYSAKIFTSNNPEVKYEDEMHPGATE

SEQ ID NO: 45819 - protein, 31 aa, Homo sapiens
  MAP TO AC009416.2; EXPRESSED IN BONE MARROW, SIGNAL = 0.57; EXPRESSED IN LUNG, SIGNAL = 0.85; EXPRESSED IN PLACENTA, SIGNAL = 0.93; EXPRESSED IN ADULT LIVER, SIGNAL = 0.73; EXPRESSED IN FETAL LIVER, SIGNAL = 0.63; EXPRESSED IN BRAIN, SIGNAL = 0.49; EST_HUMAN HIT: AI798902.1, EVALUE 5.00e-05
KTKTKYTVPRFSPATTQKSNMRMRCILGPQR

SEQ ID NO: 45820 - protein, 29 aa, Homo sapiens [sequence omitted]

SEQ ID NO: 45821 - protein, 41 aa, Homo sapiens
  MAP TO AL078591.18; EXPRESSED IN LUNG, SIGNAL = 1.2; EXPRESSED IN PLACENTA, SIGNAL = 1.1; EXPRESSED IN ADULT LIVER, SIGNAL = 1.1; EXPRESSED IN BRAIN, SIGNAL = 0.91; EXPRESSED IN BONE MARROW, SIGNAL = 1.1; EXPRESSED IN FETAL LIVER, SIGNAL = 0.79; SWISSPROT HIT: P32926, EVALUE 4.80e+00
RKNGTASINYGDNSSSFYFQVSIHETNWFKAQNTDSLNNDA

SEQ ID NO: 45822 - protein, 75 aa, Homo sapiens
  MAP TO AC022268.3; EXPRESSED IN BONE MARROW, SIGNAL = 0.42; EXPRESSED IN ADULT LIVER, SIGNAL = 0.55; EXPRESSED IN PLACENTA, SIGNAL = 0.52; EXPRESSED IN BRAIN, SIGNAL = 0.5; EST_HUMAN HIT: BE257003.1, EVALUE 2.40e+00; SWISSPROT HIT: Q04957, EVALUE 6.90e+00
ISLGYVHNCHAGVGGGDNNTILLVNWQKIWASAGQSSNINKPKSICCSFWKSGGKEEAEVLEFSRSNYAFERGNQ

SEQ ID NO: 45823 - protein, 56 aa, Homo sapiens
  MAP TO AC010397.3; EXPRESSED IN BRAIN, SIGNAL = 0.5; EXPRESSED IN FETAL LIVER, SIGNAL = 0.53; EXPRESSED IN BONE MARROW, SIGNAL = 0.53; SWISSPROT HIT: Q26228, EVALUE 1.20e+00; EST_HUMAN HIT: AV716835.1, EVALUE 4.00e-27
NEGRRPFKIDNDDEPHTSKRDEVDRAVILFKPMVSEPIHIHRKSPLPRSRKTATND

SEQ ID NO: 45824 - protein, 26 aa, Homo sapiens
  MAP TO AC010397.3; EXPRESSED IN BRAIN, SIGNAL = 0.5; EXPRESSED IN FETAL LIVER, SIGNAL = 0.53; EXPRESSED IN BONE MARROW, SIGNAL = 0.53; EST_HUMAN HIT: AU131130.1, EVALUE 1.00e-06
MKAGDLLKLIMMMNHILLKEMKLIEL

SEQ ID NO: 45825 - protein, 49 aa, Homo sapiens
  MAP TO AC024252.3; EXPRESSED IN PLACENTA, SIGNAL = 0.9; EXPRESSED IN FETAL LIVER, SIGNAL = 0.47; EXPRESSED IN BONE MARROW, SIGNAL = 0.53; EXPRESSED IN ADULT LIVER, SIGNAL = 0.62; EXPRESSED IN BRAIN, SIGNAL = 0.57; SWISSPROT HIT: Q02551, EVALUE 4.20e-01; EST_HUMAN HIT: BF528429.1, EVALUE 4.00e-13
HINRMLSMYSISYVRLASDMARVPEYKIVTQTKIVILLQLNSEDTLPGK

SEQ ID NO: 45826 - protein, 31 aa, Homo sapiens
  MAP TO AC010162.6; EXPRESSED IN BONE MARROW, SIGNAL = 0.82; EXPRESSED IN PLACENTA, SIGNAL = 0.76; EXPRESSED IN FETAL LIVER, SIGNAL = 0.73; EXPRESSED IN BRAIN, SIGNAL = 0.73
MLAACVTDDKADETGEYVIHYCYLSTVLNEK

SEQ ID NO: 45827 - protein, 17 aa, Homo sapiens
  MAP TO AC010162.6; EXPRESSED IN BONE MARROW, SIGNAL = 0.82; EXPRESSED IN PLACENTA, SIGNAL = 0.76; EXPRESSED IN FETAL LIVER, SIGNAL = 0.73; EXPRESSED IN BRAIN, SIGNAL = 0.73
CWQPVSLMIRQMRQENM

SEQ ID NO: 45828 - protein, 27 aa, Homo sapiens
  MAP TO AL132874.14; EXPRESSED IN PLACENTA, SIGNAL = 0.51; EXPRESSED IN ADULT LIVER, SIGNAL = 0.61; EXPRESSED IN BRAIN, SIGNAL = 0.53; EXPRESSED IN BONE MARROW, SIGNAL = 0.53; EST_HUMAN HIT: AV741648.1, EVALUE 2.10e+00
HAGLMFRDMVTLEDAITVVSVMESSMQ

SEQ ID NO: 45829 - protein, 38 aa, Homo sapiens
  MAP TO AL135998.2; EXPRESSED IN LUNG, SIGNAL = 0.84; EXPRESSED IN PLACENTA, SIGNAL =   1; EXPRESSED IN ADULT LIVER, SIGNAL = 0.99; EXPRESSED IN FETAL LIVER, SIGNAL = 0.98; EXPRESSED IN BONE MARROW, SIGNAL = 1.2; EXPRESSED IN BRAIN, SIGNAL = 0.92; SWISSPROT HIT: Q04047, EVALUE 3.80e-02; EST_HUMAN HIT: W60541.1, EVALUE 5.00e-16
MANNLQKGNGGPMRLYVGSLHFNITEDMLRGIFEPFGK

SEQ ID NO: 45830 - protein, 155 aa, Homo sapiens
  MAP TO AL121988.10; EXPRESSED IN ADULT LIVER, SIGNAL = 0.82; EXPRESSED IN BONE MARROW, SIGNAL = 0.67; EXPRESSED IN LUNG, SIGNAL = 1.1; EXPRESSED IN PLACENTA, SIGNAL = 0.67; EXPRESSED IN FETAL LIVER, SIGNAL = 0.83; EXPRESSED IN BRAIN, SIGNAL = 0.64; SWISSPROT HIT: P35212, EVALUE 3.00e-74; EST_HUMAN HIT: AU139505.1, EVALUE 1.00e-42
ERLRQKEGELRALPAKDPQVERALAAVERQMAKISVAEDGRLRIRGALMGTYVASVLCKSVLEAGFLYGQWRLYGWTMEPVFVCQRAPCPYLVDCFVSRPTEKTIFIIFMLVVGLISLVLNLLELVHLLCRCLSRGMRARQGQDAPPTQGTSSDP

SEQ ID NO: 45831 - protein, 17 aa, Homo sapiens
  MAP TO AC021769.3; EXPRESSED IN ADULT LIVER, SIGNAL = 0.76; EXPRESSED IN BONE MARROW, SIGNAL = 0.78; EXPRESSED IN LUNG, SIGNAL = 0.88; EXPRESSED IN PLACENTA, SIGNAL = 1.2; EXPRESSED IN FETAL LIVER, SIGNAL = 0.66; EXPRESSED IN BRAIN, SIGNAL =   1; EST_HUMAN HIT: AA309269.1, EVALUE 6.30e+00
VALLCRSSHRAITLLPQ

SEQ ID NO: 45832 - protein, 25 aa, Homo sapiens
  MAP TO AC013799.3; EXPRESSED IN PLACENTA, SIGNAL = 1.6; EXPRESSED IN ADULT LIVER, SIGNAL = 1.5; EXPRESSED IN FETAL LIVER, SIGNAL = 1.5; EXPRESSED IN BONE MARROW, SIGNAL = 1.6; EXPRESSED IN LUNG, SIGNAL = 1.5; EXPRESSED IN BRAIN, SIGNAL = 1.5
SNFVRSIRPKHNFSFITTVTILSCQ

SEQ ID NO: 45833 - protein, 39 aa, Homo sapiens
  MAP TO AC021361.4; EXPRESSED IN BONE MARROW, SIGNAL = 0.6; EXPRESSED IN PLACENTA, SIGNAL = 0.74; EXPRESSED IN ADULT LIVER, SIGNAL = 0.57; EXPRESSED IN FETAL LIVER, SIGNAL = 0.65; EXPRESSED IN BRAIN, SIGNAL = 0.62
KEEGGGGGRRRRGGGGGGGGEGRGLGGKGGREEEGELLL

SEQ ID NO: 45834 - protein, 24 aa, Homo sapiens
  MAP TO AC021361.4; EXPRESSED IN BONE MARROW, SIGNAL = 0.6; EXPRESSED IN PLACENTA, SIGNAL = 0.74; EXPRESSED IN ADULT LIVER, SIGNAL = 0.57; EXPRESSED IN FETAL LIVER, SIGNAL = 0.65; EXPRESSED IN BRAIN, SIGNAL = 0.62
RRRRRRRKKKKRRRRRRRRRRKRT

SEQ ID NO: 45835 - protein, 81 aa, Homo sapiens
  MAP TO AC016549.4; EXPRESSED IN PLACENTA, SIGNAL = 0.48; EXPRESSED IN BONE MARROW, SIGNAL = 0.43; EXPRESSED IN BRAIN, SIGNAL = 0.46; SWISSPROT HIT: O75962, EVALUE 2.00e-44; EST_HUMAN HIT: AW245407.1, EVALUE 5.00e-36
LSGGCELTVVIHDFTACNSNELTIRRGQTVEVLERPHDKPDWCLVRTTDRSPAAEGLVPCGSLCIAHSRSSMEMEGIFNHK

SEQ ID NO: 45836 - protein, 20 aa, Homo sapiens
  MAP TO AC018421.3; EXPRESSED IN PLACENTA, SIGNAL = 0.74; EXPRESSED IN ADULT LIVER, SIGNAL = 0.98; EXPRESSED IN FETAL LIVER, SIGNAL = 1.7; EXPRESSED IN BRAIN, SIGNAL = 1.7; EXPRESSED IN LUNG, SIGNAL =   1; EXPRESSED IN BONE MARROW, SIGNAL = 2.2; EST_HUMAN HIT: AW247863.1, EVALUE 1.10e-01
LPVGQDAGELEDSDADDPDP

SEQ ID NO: 45837 - protein, 50 aa, Homo sapiens
  MAP TO AC010971.3; EXPRESSED IN LUNG, SIGNAL =   1; EXPRESSED IN PLACENTA, SIGNAL = 0.87; EXPRESSED IN ADULT LIVER, SIGNAL = 0.97; EXPRESSED IN FETAL LIVER, SIGNAL = 1.2; EXPRESSED IN BRAIN, SIGNAL =   1; EXPRESSED IN BONE MARROW, SIGNAL =   1; SWISSPROT HIT: Q62227, EVALUE 6.20e+00; EST_HUMAN HIT: AA282376.1, EVALUE 3.00e-14
VDGPRRSPKAKLAPKKGHGHCLVACCQSDPLQLSEPQRNHYIREVCSANG

SEQ ID NO: 45838 - protein, 35 aa, Homo sapiens
  MAP TO AC010721.2; EXPRESSED IN LUNG, SIGNAL = 0.98; EXPRESSED IN ADULT LIVER, SIGNAL = 0.95; EXPRESSED IN BRAIN, SIGNAL = 0.84; EXPRESSED IN PLACENTA, SIGNAL = 0.94; EXPRESSED IN FETAL LIVER, SIGNAL = 0.94; EXPRESSED IN BONE MARROW, SIGNAL = 0.8
PMADSHHSDICQACSYSYSTTIYYVKENSLSSILD

SEQ ID NO: 45839 - protein, 19 aa, Homo sapiens
  MAP TO AC015570.5; EXPRESSED IN ADULT LIVER, SIGNAL = 0.95; EXPRESSED IN BRAIN, SIGNAL = 0.89; EXPRESSED IN LUNG, SIGNAL = 0.84; EXPRESSED IN PLACENTA, SIGNAL = 1.1; EXPRESSED IN FETAL LIVER, SIGNAL =   1; EXPRESSED IN BONE MARROW, SIGNAL = 0.87; EST_HUMAN HIT: R69805.1, EVALUE 1.40e-01
WSPIIVLKCYLVFLSTRRL

SEQ ID NO: 45840 - protein, 115 aa, Homo sapiens
  MAP TO AL096800.20; EXPRESSED IN PLACENTA, SIGNAL = 0.72; EXPRESSED IN BRAIN, SIGNAL = 0.53; EXPRESSED IN FETAL LIVER, SIGNAL = 0.53; EXPRESSED IN BONE MARROW, SIGNAL = 0.65; EST_HUMAN HIT: BE794576.1, EVALUE 2.00e-50; SWISSPROT HIT: P38994, EVALUE 3.00e-07
SSDTLQVSIDTQRLAPQKALYSTAMEFIQGEARLGDTMEADDHMGGIPAQNSKGERLLLYIGIIDILQSYTFLKKLEHSWKAVVHDGDAVSVHRPGFYAERFQHFMCNAVFKKIP

SEQ ID NO: 45841 - protein, 56 aa, Homo sapiens
  MAP TO AC010503.3; EXPRESSED IN LUNG, SIGNAL = 0.91; EXPRESSED IN PLACENTA, SIGNAL = 0.62; EXPRESSED IN FETAL LIVER, SIGNAL = 0.69; EXPRESSED IN ADULT LIVER, SIGNAL = 0.68; EXPRESSED IN BRAIN, SIGNAL = 1.2; EXPRESSED IN BONE MARROW, SIGNAL = 0.58; SWISSPROT HIT: P55851, EVALUE 3.00e-06; EST_HUMAN HIT: BF526089.1, EVALUE 3.00e-26
VLKTRLTLRRTGQYKGLLDCARRILEREGPRAFYRGYLPNVLGIIPYAGIDLAVYE

SEQ ID NO: 45842 - protein, 52 aa, Homo sapiens
  MAP TO AC021239.3; EXPRESSED IN PLACENTA, SIGNAL =   1; EXPRESSED IN LUNG, SIGNAL =   1; EXPRESSED IN FETAL LIVER, SIGNAL = 1.5; EXPRESSED IN ADULT LIVER, SIGNAL = 0.93; EXPRESSED IN BRAIN, SIGNAL = 1.2; EXPRESSED IN BONE MARROW, SIGNAL = 1.2; EST_HUMAN HIT: AW130758.1, EVALUE 8.50e+00; SWISSPROT HIT: P33011, EVALUE 6.10e+00
DRVKLLTSMLQITQMLTPKPPEVPQTFYLSFRIVHLNIKCMVTFKCLKNTKY

SEQ ID NO: 45843 - protein, 76 aa, Homo sapiens
  MAP TO AC013657.3; EXPRESSED IN PLACENTA, SIGNAL = 0.65; EXPRESSED IN FETAL LIVER, SIGNAL = 0.45; EXPRESSED IN ADULT LIVER, SIGNAL = 0.84; EXPRESSED IN BRAIN, SIGNAL = 0.53; EXPRESSED IN BONE MARROW, SIGNAL = 0.49; EST_HUMAN HIT: AL039886.1, EVALUE 6.00e-33; SWISSPROT HIT: Q9X172, EVALUE 7.80e+00
IYCFCLLNLGAYFLLLRVTPVIVWLIIMHWLKPKLTGRKKGETLVNQQTFNMVLDSTMNTRNIQMILDFMKLIVCM

SEQ ID NO: 45844 - protein, 33 aa, Homo sapiens
  MAP TO AC015999.3; EXPRESSED IN BONE MARROW, SIGNAL = 0.9; EXPRESSED IN PLACENTA, SIGNAL =   1; EXPRESSED IN ADULT LIVER, SIGNAL = 1.4; EXPRESSED IN BRAIN, SIGNAL = 0.9; EXPRESSED IN LUNG, SIGNAL = 1.2; EXPRESSED IN FETAL LIVER, SIGNAL = 0.87
MLRFLSLLQQEKPLFSNLATFEEVTQTSSWPLK

SEQ ID NO: 45845 - protein, 23 aa, Homo sapiens
  MAP TO AC015999.3; EXPRESSED IN BONE MARROW, SIGNAL = 0.9; EXPRESSED IN PLACENTA, SIGNAL =   1; EXPRESSED IN ADULT LIVER, SIGNAL = 1.4; EXPRESSED IN BRAIN, SIGNAL = 0.9; EXPRESSED IN LUNG, SIGNAL = 1.2; EXPRESSED IN FETAL LIVER, SIGNAL = 0.87; EST_HUMAN HIT: AW961564.1, EVALUE 8.20e+00; SWISSPROT HIT: P15265, EVALUE 3.90e+00
CCVFSPCCNKKSLCFPTWQPLKK

SEQ ID NO: 45846 - protein, 27 aa, Homo sapiens
  MAP TO AC012241.4; EXPRESSED IN PLACENTA, SIGNAL = 0.81; EXPRESSED IN FETAL LIVER, SIGNAL = 0.59; EXPRESSED IN ADULT LIVER, SIGNAL = 0.61; EXPRESSED IN BRAIN, SIGNAL = 0.48; EXPRESSED IN BONE MARROW, SIGNAL = 0.53
CILIVKMSQTTILKIISLEMIQSRMPF

SEQ ID NO: 45847 - protein, 55 aa, Homo sapiens
  MAP TO AC021774.3; EXPRESSED IN BONE MARROW, SIGNAL = 1.3; EXPRESSED IN LUNG, SIGNAL = 1.2; EXPRESSED IN PLACENTA, SIGNAL = 1.4; EXPRESSED IN ADULT LIVER, SIGNAL = 1.2; EXPRESSED IN BRAIN, SIGNAL =   1; EXPRESSED IN FETAL LIVER, SIGNAL = 0.99; SWISSPROT HIT: Q9JZR0, EVALUE 7.90e+00; EST_HUMAN HIT: AU121943.1, EVALUE 6.00e-17
YTTGCKLIPQTCVRTPRAIPVSSVTYKEKSCPVGKLTTGVWVRAFFRAWKATSVS

SEQ ID NO: 45848 - protein, 73 aa, Homo sapiens
  MAP TO AC015756.4; EXPRESSED IN ADULT LIVER, SIGNAL = 1.1; EXPRESSED IN BRAIN, SIGNAL = 0.46; EST_HUMAN HIT: AW960938.1, EVALUE 7.00e-38; SWISSPROT HIT: O75936, EVALUE 8.00e-39
MACTIQKAEALDGAHLMQILWYDEEESLYPAVWLRDNCPCSDCYLDSAKARKLLVEALDVNIGIKGLIFDRKK

SEQ ID NO: 45849 - protein, 62 aa, Homo sapiens
  MAP TO AC015662.4; EXPRESSED IN BONE MARROW, SIGNAL = 1.9; EXPRESSED IN PLACENTA, SIGNAL = 0.64; EXPRESSED IN ADULT LIVER, SIGNAL = 0.7; EXPRESSED IN BRAIN, SIGNAL = 1.5; EXPRESSED IN LUNG, SIGNAL =   1; EXPRESSED IN FETAL LIVER, SIGNAL = 1.5; EST_HUMAN HIT: BE387557.1, EVALUE 7.00e-31; SWISSPROT HIT: P55822, EVALUE 5.00e-21
IKKKQQDVLGFLEANKIGFEEKDIAANEENRKWMRENVPENSRPATGYPLPPQIFNESQYRG

SEQ ID NO: 45850 - protein, 34 aa, Homo sapiens
  MAP TO AC008998.2; EXPRESSED IN PLACENTA, SIGNAL = 1.1; EXPRESSED IN BONE MARROW, SIGNAL = 1.1; EXPRESSED IN ADULT LIVER, SIGNAL = 1.1; EXPRESSED IN BRAIN, SIGNAL = 2.7; EXPRESSED IN LUNG, SIGNAL = 1.2; EXPRESSED IN FETAL LIVER, SIGNAL =   1; EST_HUMAN HIT: AA378559.1, EVALUE 4.00e-13
TQPIVESLGFQGGRLQRVEVTWRGSHPEALEVHV

SEQ ID NO: 45851 - protein, 60 aa, Homo sapiens
  MAP TO AL133227.7; EXPRESSED IN LUNG, SIGNAL = 0.89; EXPRESSED IN FETAL LIVER, SIGNAL = 0.86; EXPRESSED IN PLACENTA, SIGNAL = 0.89; EXPRESSED IN ADULT LIVER, SIGNAL = 0.84; EXPRESSED IN BRAIN, SIGNAL = 0.96; EXPRESSED IN BONE MARROW, SIGNAL = 0.89; EST_HUMAN HIT: AI971130.1, EVALUE 2.00e-25
SRAARQLMERTQSSNMETRLDAMKELAKLSADVTFATEFINMDGIIVLTRLVESGTKLLS

SEQ ID NO: 45852 - protein, 40 aa, Homo sapiens
  MAP TO AC026273.2; EXPRESSED IN BRAIN, SIGNAL = 0.6; EST_HUMAN HIT: AW892508.1, EVALUE 7.00e-13
FYMKIFPFPRNSSKLSKYPHADSTKRVFQNCSMKRKVQLC

SEQ ID NO: 45853 - protein, 53 aa, Homo sapiens
  MAP TO AC015999.3; EXPRESSED IN PLACENTA, SIGNAL = 0.72; EXPRESSED IN FETAL LIVER, SIGNAL = 0.81; EXPRESSED IN BRAIN, SIGNAL = 0.56; EXPRESSED IN ADULT LIVER, SIGNAL = 0.71; EXPRESSED IN BONE MARROW, SIGNAL = 1.2; EST_HUMAN HIT: BE890669.1, EVALUE 4.00e-05
VSYPPPPAGHSGPGPAGFPVPNQPVYNQPVYNQPVGAAGVPWMPAPQPPLNCP

SEQ ID NO: 45854 - protein, 48 aa, Homo sapiens
  MAP TO AC011778.3; EXPRESSED IN ADULT LIVER, SIGNAL = 0.89; EXPRESSED IN LUNG, SIGNAL = 0.84; EXPRESSED IN BRAIN, SIGNAL = 0.87; EXPRESSED IN BONE MARROW, SIGNAL =   1; EXPRESSED IN PLACENTA, SIGNAL = 0.82; EXPRESSED IN FETAL LIVER, SIGNAL = 0.92; SWISSPROT HIT: P20806, EVALUE 2.10e+00
VKTAMRRLWLVTDNRGMMRLNTVSPLETTKSFMRLMQQSELGVGISSS

SEQ ID NO: 45855 - protein, 30 aa, Homo sapiens
  MAP TO AC012588.5; EXPRESSED IN ADULT LIVER, SIGNAL = 0.88; EXPRESSED IN BRAIN, SIGNAL = 1.2; EXPRESSED IN PLACENTA, SIGNAL = 0.8; EXPRESSED IN FETAL LIVER, SIGNAL = 0.73; EXPRESSED IN BONE MARROW, SIGNAL = 0.8; EST_HUMAN HIT: BE964177.2, EVALUE 4.50e+00
KKPVPLGSWTVLVCHSPRTKPTAPFATLLT

SEQ ID NO: 45856 - protein, 60 aa, Homo sapiens
  MAP TO AC013800.3; EXPRESSED IN ADULT LIVER, SIGNAL = 1.1; EXPRESSED IN BONE MARROW, SIGNAL = 0.92; EXPRESSED IN LUNG, SIGNAL = 0.92; EXPRESSED IN PLACENTA, SIGNAL =   1; EXPRESSED IN FETAL LIVER, SIGNAL = 0.75; EXPRESSED IN BRAIN, SIGNAL = 0.9; EST_HUMAN HIT: AI301941.1, EVALUE 2.00e-06; SWISSPROT HIT: P00751, EVALUE 1.00e-07
IEQGSCGDPGIPAYGRREGSRFRHGDTLKFECQPAFELVGQKAITCQKNNQWSAKKPGCV

SEQ ID NO: 45857 - protein, 61 aa, Homo sapiens [sequence omitted]

SEQ ID NO: 45858 - protein, 34 aa, Homo sapiens
  MAP TO AC015737.4; EXPRESSED IN ADULT LIVER, SIGNAL = 0.59; EXPRESSED IN BONE MARROW, SIGNAL = 0.67; EXPRESSED IN BRAIN, SIGNAL = 0.6; EXPRESSED IN PLACENTA, SIGNAL = 0.57; EXPRESSED IN FETAL LIVER, SIGNAL = 0.72
ESPMQQCMHNGDTSFEDLHMLTQPDILTGQAISK

SEQ ID NO: 45859 - protein, 33 aa, Homo sapiens
  MAP TO AC015737.4; EXPRESSED IN ADULT LIVER, SIGNAL = 0.59; EXPRESSED IN BONE MARROW, SIGNAL = 0.67; EXPRESSED IN BRAIN, SIGNAL = 0.6; EXPRESSED IN PLACENTA, SIGNAL = 0.57; EXPRESSED IN FETAL LIVER, SIGNAL = 0.72; EST_HUMAN HIT: AW973836.1, EVALUE 4.40e+00
NLLCSNACTMATRPLKICICLHSLIFSQGKPSV

SEQ ID NO: 45860 - protein, 93 aa, Homo sapiens
  MAP TO AC021049.12; EXPRESSED IN ADULT LIVER, SIGNAL = 0.7; EXPRESSED IN BRAIN, SIGNAL = 0.75; EXPRESSED IN PLACENTA, SIGNAL = 0.82; EXPRESSED IN FETAL LIVER, SIGNAL = 0.55; EXPRESSED IN BONE MARROW, SIGNAL = 0.64; EST_HUMAN HIT: H08599.1, EVALUE 3.00e-05; SWISSPROT HIT: P77580, EVALUE 8.40e-01
IAPVPPPRDLSWEAGHGGNVALPLKETSVENFLGATTPALAKLQVPREQLSEVLEQICSGSCGPIFRANMNTGDPSKPKSVILKALKGKTRSV

SEQ ID NO: 45861 - protein, 31 aa, Homo sapiens
  MAP TO AL121828.6; EXPRESSED IN ADULT LIVER, SIGNAL = 0.87; EXPRESSED IN PLACENTA, SIGNAL = 0.73; EXPRESSED IN FETAL LIVER, SIGNAL = 0.9; EXPRESSED IN BRAIN, SIGNAL = 0.7; EXPRESSED IN BONE MARROW, SIGNAL = 0.9
FKRQELCLQFSQMCRVHMRAGEEPRKKGAVG

SEQ ID NO: 45862 - protein, 77 aa, Homo sapiens
  MAP TO AC022423.2; EXPRESSED IN ADULT LIVER, SIGNAL = 0.85; EXPRESSED IN BRAIN, SIGNAL = 1.1; EXPRESSED IN PLACENTA, SIGNAL = 1.1; EXPRESSED IN FETAL LIVER, SIGNAL = 0.73; EXPRESSED IN BONE MARROW, SIGNAL = 0.74; EST_HUMAN HIT: BF369844.1, EVALUE 6.00e-11; SWISSPROT HIT: Q14005, EVALUE 3.00e-03
MNRGDFLLSVNGASLAGLAHGNVLKVLHQAQLHKDALVVIKKGMDQPRPSARQEPPTANGKGLLSRKTIPLEPGIGK

SEQ ID NO: 45863 - protein, 45 aa, Homo sapiens
  MAP TO AC008616.2; EXPRESSED IN BONE MARROW, SIGNAL = 1.1; EXPRESSED IN ADULT LIVER, SIGNAL = 1.2; EXPRESSED IN LUNG, SIGNAL = 1.1; EXPRESSED IN PLACENTA, SIGNAL = 1.2; EXPRESSED IN FETAL LIVER, SIGNAL =   1; EXPRESSED IN BRAIN, SIGNAL = 1.1; SWISSPROT HIT: P73769, EVALUE 9.40e-01
APSHLTLQLDPVSLNHSGAYVCWAAVEIPELEEAEGNITRLFVDP

SEQ ID NO: 45864 - protein, 53 aa, Homo sapiens
  MAP TO AL078591.18; EXPRESSED IN ADULT LIVER, SIGNAL = 1.1; EXPRESSED IN LUNG, SIGNAL = 1.4; EXPRESSED IN BRAIN, SIGNAL = 1.2; EXPRESSED IN PLACENTA, SIGNAL = 1.3; EXPRESSED IN FETAL LIVER, SIGNAL = 0.85; EXPRESSED IN BONE MARROW, SIGNAL = 1.6; EST_HUMAN HIT: AW962767.1, EVALUE 2.00e-17; SWISSPROT HIT: P52343, EVALUE 8.00e+00
FLQAKEELKLLKLPGFMYSEVPLLASSVPYFSVEEEDGSEDGVHLIVCVHGLD

SEQ ID NO: 45865 - protein, 55 aa, Homo sapiens
  MAP TO AC007956.5; EXPRESSED IN BONE MARROW, SIGNAL = 0.67; EXPRESSED IN PLACENTA, SIGNAL = 0.53; EXPRESSED IN ADULT LIVER, SIGNAL = 0.59; EXPRESSED IN FETAL LIVER, SIGNAL = 0.51; EXPRESSED IN BRAIN, SIGNAL = 0.54; SWISSPROT HIT: P11996, EVALUE 2.70e+00
GITVSVVAFFFTIKFLFELAARVVSFLQNEDRERRGDRTIYDYVRGNYLDPRSCK

SEQ ID NO: 45866 - protein, 23 aa, Homo sapiens
  MAP TO AC007956.5; EXPRESSED IN BONE MARROW, SIGNAL = 0.67; EXPRESSED IN PLACENTA, SIGNAL = 0.53; EXPRESSED IN ADULT LIVER, SIGNAL = 0.59; EXPRESSED IN FETAL LIVER, SIGNAL = 0.51; EXPRESSED IN BRAIN, SIGNAL = 0.54
VESQCLWLHSSSQLSSSLSLPHV

SEQ ID NO: 45867 - protein, 71 aa, Homo sapiens
  MAP TO AL121827.9; EXPRESSED IN BRAIN, SIGNAL = 0.61; EXPRESSED IN PLACENTA, SIGNAL = 0.68; EXPRESSED IN ADULT LIVER, SIGNAL = 0.58; EXPRESSED IN FETAL LIVER, SIGNAL = 0.51; EXPRESSED IN BONE MARROW, SIGNAL = 0.51; SWISSPROT HIT: Q63262, EVALUE 4.40e-01; EST_HUMAN HIT: AW151498.1, EVALUE 1.00e+00
RDPFASSWSDTGAAPDSLGCCVPAEPPRSQDHPGWYCVGTAHGYSTQKPSVSHIPSAAPRTPGQQQPVSRG

SEQ ID NO: 45868 - protein, 71 aa, Homo sapiens
  MAP TO AL121827.9; EXPRESSED IN BRAIN, SIGNAL = 0.61; EXPRESSED IN PLACENTA, SIGNAL = 0.68; EXPRESSED IN ADULT LIVER, SIGNAL = 0.58; EXPRESSED IN FETAL LIVER, SIGNAL = 0.51; EXPRESSED IN BONE MARROW, SIGNAL = 0.51; SWISSPROT HIT: Q64565, EVALUE 1.90e+00; EST_HUMAN HIT: AI002818.1, EVALUE 2.10e+00
PSGHWLLLAWGSGSCRRDVGHRGFLGAVTMGCANAVPARVVLRPWRFCRNTAAQAVRSCSCVRPAAGKGVP

SEQ ID NO: 45869 - protein, 39 aa, Homo sapiens
  MAP TO AC016948.4; EXPRESSED IN BONE MARROW, SIGNAL = 1.2; EXPRESSED IN ADULT LIVER, SIGNAL = 1.1; EXPRESSED IN LUNG, SIGNAL = 1.3; EXPRESSED IN PLACENTA, SIGNAL = 1.2; EXPRESSED IN BRAIN, SIGNAL = 1.1; EXPRESSED IN FETAL LIVER, SIGNAL = 0.93; EST_HUMAN HIT: BE880522.1, EVALUE 7.20e+00
PLINNRKLCDLEWARRTDLSVLRHYCVFLPLHALNQSYA

SEQ ID NO: 45870 - protein, 31 aa, Homo sapiens
  MAP TO AC009316.3; EXPRESSED IN PLACENTA, SIGNAL = 0.78; EXPRESSED IN ADULT LIVER, SIGNAL = 0.97; EXPRESSED IN FETAL LIVER, SIGNAL = 0.71; EXPRESSED IN BONE MARROW, SIGNAL = 0.82; EXPRESSED IN LUNG, SIGNAL = 0.93; EXPRESSED IN BRAIN, SIGNAL = 1.9; EST_HUMAN HIT: AW894399.1, EVALUE 5.90e+00
YHQWAEFIFMINDNNPFESHHFNASKHLFVM

SEQ ID NO: 45871 - protein, 43 aa, Homo sapiens
  MAP TO AC009507.3; EXPRESSED IN BRAIN, SIGNAL = 0.5; EXPRESSED IN ADULT LIVER, SIGNAL = 0.59; EXPRESSED IN BONE MARROW, SIGNAL = 0.48; SWISSPROT HIT: P04008, EVALUE 4.80e+00; EST_HUMAN HIT: AW850836.1, EVALUE 1.10e-02
YGKAVHWSYHLLHHLQAAVPVEQRKGLIKQQLGHLLANDALER

SEQ ID NO: 45872 - protein, 57 aa, Homo sapiens
  MAP TO AC023296.2; EXPRESSED IN PLACENTA, SIGNAL = 0.51; EXPRESSED IN ADULT LIVER, SIGNAL = 0.66; EXPRESSED IN FETAL LIVER, SIGNAL = 0.54; EXPRESSED IN BRAIN, SIGNAL = 0.45
YIVWTPRGPCQRRPHWRAVYLWRRRALLLQREREPHRQRHESVPGRQSLERGTAPLH

SEQ ID NO: 45873 - protein, 56 aa, Homo sapiens
  MAP TO AC011941.4; EXPRESSED IN PLACENTA, SIGNAL = 0.82; EXPRESSED IN BONE MARROW, SIGNAL = 0.63; EXPRESSED IN ADULT LIVER, SIGNAL = 0.65; EXPRESSED IN FETAL LIVER, SIGNAL = 0.6; EXPRESSED IN BRAIN, SIGNAL = 0.67; EST_HUMAN HIT: BF309707.1, EVALUE 6.30e+00; SWISSPROT HIT: P39896, EVALUE 7.90e+00
YQVQTPQGDIQGHTSGVHPPLKAHSFSLTAQDPIFPAILNFSQDLEDTLLFHACIH

SEQ ID NO: 45874 - protein, 20 aa, Homo sapiens
  MAP TO AC011941.4; EXPRESSED IN PLACENTA, SIGNAL = 0.82; EXPRESSED IN BONE MARROW, SIGNAL = 0.63; EXPRESSED IN ADULT LIVER, SIGNAL = 0.65; EXPRESSED IN FETAL LIVER, SIGNAL = 0.6; EXPRESSED IN BRAIN, SIGNAL = 0.67
IKYKLLRETYKDIQAVSIHP

SEQ ID NO: 45875 - protein, 38 aa, Homo sapiens
  MAP TO AL158111.2; EXPRESSED IN FETAL LIVER, SIGNAL = 0.69; EXPRESSED IN PLACENTA, SIGNAL = 0.76; EXPRESSED IN ADULT LIVER, SIGNAL = 0.86; EXPRESSED IN BONE MARROW, SIGNAL = 0.8; EXPRESSED IN BRAIN, SIGNAL = 0.87; EST_HUMAN HIT: AI144166.1, EVALUE 5.00e-05; SWISSPROT HIT: O28017, EVALUE 3.70e+00
IATVTPTFGNHLPDQSAPINIEARPFTRKRNHDLWKSM

SEQ ID NO: 45876 - protein, 34 aa, Homo sapiens
  MAP TO AC011226.3; EXPRESSED IN PLACENTA, SIGNAL = 1.1; EXPRESSED IN ADULT LIVER, SIGNAL = 0.96; EXPRESSED IN FETAL LIVER, SIGNAL = 0.79; EXPRESSED IN BONE MARROW, SIGNAL = 0.85; EXPRESSED IN LUNG, SIGNAL = 1.1; EXPRESSED IN BRAIN, SIGNAL = 1.1; EST_HUMAN HIT: T77253.1, EVALUE 1.20e-02
KDSIQGTTLYADTETSRDNKTADTLILDFPASRT

SEQ ID NO: 45877 - protein, 24 aa, Homo sapiens
  MAP TO AC011226.3; EXPRESSED IN PLACENTA, SIGNAL = 1.1; EXPRESSED IN ADULT LIVER, SIGNAL = 0.96; EXPRESSED IN FETAL LIVER, SIGNAL = 0.79; EXPRESSED IN BONE MARROW, SIGNAL = 0.85; EXPRESSED IN LUNG, SIGNAL = 1.1; EXPRESSED IN BRAIN, SIGNAL = 1.1
KTAFKEPPCTQTLKPRETTKLLTP

SEQ ID NO: 45878 - protein, 33 aa, Homo sapiens
  MAP TO AC022562.3; EXPRESSED IN PLACENTA, SIGNAL =   1; EXPRESSED IN FETAL LIVER, SIGNAL = 0.67; EXPRESSED IN LUNG, SIGNAL =   1; EXPRESSED IN ADULT LIVER, SIGNAL = 0.77; EXPRESSED IN BRAIN, SIGNAL =   1; EXPRESSED IN BONE MARROW, SIGNAL = 0.74; EST_HUMAN HIT: BE700244.1, EVALUE 3.00e-08
VWNSYFSLAVLFINQPSLQLEIITSAKRKKILD

SEQ ID NO: 45879 - protein, 29 aa, Homo sapiens
  MAP TO AC010474.2; EXPRESSED IN ADULT LIVER, SIGNAL = 0.91; EXPRESSED IN BONE MARROW, SIGNAL = 0.8; EXPRESSED IN PLACENTA, SIGNAL = 0.83; EXPRESSED IN FETAL LIVER, SIGNAL = 0.78; EXPRESSED IN BRAIN, SIGNAL = 0.79
RATGVAPLFGHPAAQTPRGRMQTDRCRDW

SEQ ID NO: 45880 - protein, 17 aa, Homo sapiens
  MAP TO AC010474.2; EXPRESSED IN ADULT LIVER, SIGNAL = 0.91; EXPRESSED IN BONE MARROW, SIGNAL = 0.8; EXPRESSED IN PLACENTA, SIGNAL = 0.83; EXPRESSED IN FETAL LIVER, SIGNAL = 0.78; EXPRESSED IN BRAIN, SIGNAL = 0.79
TCNRCGSSVWSPCSSNP

SEQ ID NO: 45881 - protein, 35 aa, Homo sapiens
  MAP TO AC022995.2; EXPRESSED IN PLACENTA, SIGNAL = 0.58; EXPRESSED IN ADULT LIVER, SIGNAL = 0.55; EXPRESSED IN BRAIN, SIGNAL = 0.46; EST_HUMAN HIT: AV710129.1, EVALUE 7.50e+00
DLSLCTKTYSHHKVSLKKYRCCRMTFNDYKCIAKE

SEQ ID NO: 45882 - protein, 109 aa, Homo sapiens
  MAP TO AC008269.3; EXPRESSED IN ADULT LIVER, SIGNAL = 1.1; EXPRESSED IN LUNG, SIGNAL =   1; EXPRESSED IN PLACENTA, SIGNAL = 1.1; EXPRESSED IN FETAL LIVER, SIGNAL = 1.1; EXPRESSED IN BRAIN, SIGNAL =   1; EXPRESSED IN BONE MARROW, SIGNAL =   1; EST_HUMAN HIT: AI221878.1, EVALUE 7.00e-33; SWISSPROT HIT: P14152, EVALUE 9.00e-03
VSICTKVEEAFRQAHVIVVLDDSTNKEVFTLEDCLRSRVPLCRLYGYLIEKNAHESVRVIVGGRTFVNLKTVLLMRYAPRIAHNIIAVALGVEGEAKAILARKLKTAPS

SEQ ID NO: 45883 - protein, 31 aa, Homo sapiens
  MAP TO AC008269.3; EXPRESSED IN ADULT LIVER, SIGNAL = 1.1; EXPRESSED IN LUNG, SIGNAL =   1; EXPRESSED IN PLACENTA, SIGNAL = 1.1; EXPRESSED IN FETAL LIVER, SIGNAL = 1.1; EXPRESSED IN BRAIN, SIGNAL =   1; EXPRESSED IN BONE MARROW, SIGNAL =   1; EST_HUMAN HIT: AA384253.1, EVALUE 1.00e-10
ALHFYQCLCSCLLQPNSHIDEWRSVWDAYRN

SEQ ID NO: 45884 - protein, 52 aa, Homo sapiens
  MAP TO AL109809.18; EXPRESSED IN ADULT LIVER, SIGNAL = 0.53; EXPRESSED IN BONE MARROW, SIGNAL = 0.57; EXPRESSED IN BRAIN, SIGNAL = 0.77
TSVQYSGHTYNVTSSVLVPLMDDDVFSHVVCHVEHKLTWFFQKTTGLDQYLQ

SEQ ID NO: 45885 - protein, 42 aa, Homo sapiens
  MAP TO AC008773.3; EXPRESSED IN LUNG, SIGNAL = 1.1; EXPRESSED IN PLACENTA, SIGNAL = 0.95; EXPRESSED IN FETAL LIVER, SIGNAL = 0.92; EXPRESSED IN BRAIN, SIGNAL = 0.97; EXPRESSED IN ADULT LIVER, SIGNAL = 1.3; EXPRESSED IN BONE MARROW, SIGNAL = 0.97; SWISSPROT HIT: O23066, EVALUE 4.80e+00; EST_HUMAN HIT: AV661447.1, EVALUE 5.00e-16
KDMDEVEEKSKDVINFTAEKLSVDEVSQLVISPLCGAISLFV

SEQ ID NO: 45886 - protein, 51 aa, Homo sapiens
  MAP TO AC021401.4; EXPRESSED IN PLACENTA, SIGNAL = 0.65; EXPRESSED IN FETAL LIVER, SIGNAL = 0.82; EXPRESSED IN BRAIN, SIGNAL = 0.64; EXPRESSED IN BONE MARROW, SIGNAL = 0.66; SWISSPROT HIT: Q10948, EVALUE 2.10e+00; EST_HUMAN HIT: BF513308.1, EVALUE 5.80e-01
CSNGSSDFFFFLHYSLCGITQSHDFKYHLHLDDSKLYTYISNSSNLLGVPI

SEQ ID NO: 45887 - protein, 51 aa, Homo sapiens
  MAP TO AC009298.2; EXPRESSED IN PLACENTA, SIGNAL = 0.96; EXPRESSED IN ADULT LIVER, SIGNAL = 0.81; EXPRESSED IN FETAL LIVER, SIGNAL = 1.1; EXPRESSED IN LUNG, SIGNAL = 0.93; EXPRESSED IN BRAIN, SIGNAL = 1.1; EXPRESSED IN BONE MARROW, SIGNAL = 0.92
MDQGPLPRVGADPNDGIFIHPPCCPNQIWRPARNSGWCECSKHKLKEVKEV

SEQ ID NO: 45888 - protein, 47 aa, Homo sapiens
  MAP TO AC009298.2; EXPRESSED IN PLACENTA, SIGNAL = 0.96; EXPRESSED IN ADULT LIVER, SIGNAL = 0.81; EXPRESSED IN FETAL LIVER, SIGNAL = 1.1; EXPRESSED IN LUNG, SIGNAL = 0.93; EXPRESSED IN BRAIN, SIGNAL = 1.1; EXPRESSED IN BONE MARROW, SIGNAL = 0.92
WIKDLYPGLVLTQMMEFLSILLAVLTRFGDLLATLDGVNVQSTSLKR

SEQ ID NO: 45889 - protein, 70 aa, Homo sapiens
  MAP TO AL136968.3; EXPRESSED IN PLACENTA, SIGNAL = 0.5; EXPRESSED IN ADULT LIVER, SIGNAL = 0.76; EXPRESSED IN FETAL LIVER, SIGNAL = 0.68; EXPRESSED IN BRAIN, SIGNAL = 0.82; EXPRESSED IN BONE MARROW, SIGNAL = 0.7; SWISSPROT HIT: P29985, EVALUE 4.40e+00; EST_HUMAN HIT: AI524687.1, EVALUE 2.00e-33
QILEPQEGCSLSEVVTSEPALHTQQLDCSLLQGLVDVPDLSLGQSPFHVAVRDAVAVAGLVRPTERKRTQ

SEQ ID NO: 45890 - protein, 70 aa, Homo sapiens
  MAP TO AL158150.2; EXPRESSED IN PLACENTA, SIGNAL = 0.93; EXPRESSED IN ADULT LIVER, SIGNAL = 0.78; EXPRESSED IN FETAL LIVER, SIGNAL = 0.64; EXPRESSED IN BRAIN, SIGNAL = 0.75; EXPRESSED IN BONE MARROW, SIGNAL = 0.64; EST_HUMAN HIT: BF356604.1, EVALUE 4.00e-06; SWISSPROT HIT: P34083, EVALUE 8.00e-06
CPIKGHPVPNITWFHGGQPIVTATGLTHHILAAGQILQVANLSGGSQGEFSCLAQNEAGVLMQKASLVIQ

SEQ ID NO: 45891 - protein, 26 aa, Homo sapiens
  MAP TO AL158150.2; EXPRESSED IN PLACENTA, SIGNAL = 0.93; EXPRESSED IN ADULT LIVER, SIGNAL = 0.78; EXPRESSED IN FETAL LIVER, SIGNAL = 0.64; EXPRESSED IN BRAIN, SIGNAL = 0.75; EXPRESSED IN BONE MARROW, SIGNAL = 0.64
AAPSKVTLSLISPGFMVVSQLSLPQD

SEQ ID NO: 45892 - protein, 71 aa, Homo sapiens
  MAP TO AL136124.3; EXPRESSED IN BONE MARROW, SIGNAL = 0.54; EXPRESSED IN PLACENTA, SIGNAL = 0.59; EXPRESSED IN ADULT LIVER, SIGNAL = 0.6; EXPRESSED IN FETAL LIVER, SIGNAL = 0.52; EXPRESSED IN BRAIN, SIGNAL = 0.65; EST_HUMAN HIT: AW296351.1, EVALUE 3.00e-34; SWISSPROT HIT: Q9UYB5, EVALUE 2.60e+00
EPTVGSQIQRVVSMAALAMVCEAIDQKPELQLDSLHAGPLESFLSSLQLNQTLQKPHAEEQSSYAHPLECS

SEQ ID NO: 45893 - protein, 27 aa, Homo sapiens
  MAP TO AC024972.2; EXPRESSED IN PLACENTA, SIGNAL = 0.62; EXPRESSED IN FETAL LIVER, SIGNAL = 0.48; EXPRESSED IN BRAIN, SIGNAL = 0.68; EST_HUMAN HIT: R55428.1, EVALUE 1.00e-05
LKELQISSCRFYKRCVSKLLYEKECST

SEQ ID NO: 45894 - protein, 21 aa, Homo sapiens
  MAP TO AC024972.2; EXPRESSED IN PLACENTA, SIGNAL = 0.62; EXPRESSED IN FETAL LIVER, SIGNAL = 0.48; EXPRESSED IN BRAIN, SIGNAL = 0.68; EST_HUMAN HIT: AA484156.1, EVALUE 1.10e-01
PQRAPNIQLQILQTVCFKTAL

SEQ ID NO: 45895 - protein, 25 aa, Homo sapiens
  MAP TO AC007321.2; EXPRESSED IN ADULT LIVER, SIGNAL = 0.9; EXPRESSED IN BRAIN, SIGNAL = 0.98; EXPRESSED IN BONE MARROW, SIGNAL = 0.89; EXPRESSED IN LUNG, SIGNAL = 0.97; EXPRESSED IN PLACENTA, SIGNAL = 0.92; EXPRESSED IN FETAL LIVER, SIGNAL = 0.85; EST_HUMAN HIT: BE166604.1, EVALUE 4.00e-04; SWISSPROT HIT: Q62918, EVALUE 3.00e-05
QHGGTCLAGNLCTCPYGFVGPRCET

SEQ ID NO: 45896 - protein, 25 aa, Homo sapiens
  MAP TO AC007321.2; EXPRESSED IN ADULT LIVER, SIGNAL = 0.9; EXPRESSED IN BRAIN, SIGNAL = 0.98; EXPRESSED IN BONE MARROW, SIGNAL = 0.89; EXPRESSED IN LUNG, SIGNAL = 0.97; EXPRESSED IN PLACENTA, SIGNAL = 0.92; EXPRESSED IN FETAL LIVER, SIGNAL = 0.85
LFHTLVLQNHKDKCRDSQPSMCHHV

SEQ ID NO: 45897 - protein, 45 aa, Homo sapiens
  MAP TO AC023602.5; EXPRESSED IN LUNG, SIGNAL = 1.3; EXPRESSED IN PLACENTA, SIGNAL = 0.97; EXPRESSED IN ADULT LIVER, SIGNAL = 1.2; EXPRESSED IN BRAIN, SIGNAL = 1.4; EXPRESSED IN FETAL LIVER, SIGNAL = 1.6; EXPRESSED IN BONE MARROW, SIGNAL = 1.5; SWISSPROT HIT: Q13740, EVALUE 8.00e-21; EST_HUMAN HIT: BE763255.1, EVALUE 9.20e-02
VVIIFKKEMDPVTQLYTMTSTLEYKTTKADIQMPFTCSVTYYGPS

SEQ ID NO: 45898 - protein, 42 aa, Homo sapiens
  MAP TO AL161668.1; EXPRESSED IN PLACENTA, SIGNAL = 0.76; EXPRESSED IN FETAL LIVER, SIGNAL = 0.72; EXPRESSED IN BONE MARROW, SIGNAL = 0.74; EXPRESSED IN BRAIN, SIGNAL = 0.48; EST_HUMAN HIT: AW817224.1, EVALUE 2.00e-09
ALKRTDIMETCYFKILKNSKMTKQKIQPMMLKSPIQKLGQVA

SEQ ID NO: 45899 - protein, 24 aa, Homo sapiens
  MAP TO AC007981.43; EXPRESSED IN LUNG, SIGNAL = 0.94; EXPRESSED IN PLACENTA, SIGNAL = 1.2; EXPRESSED IN ADULT LIVER, SIGNAL = 0.97; EXPRESSED IN FETAL LIVER, SIGNAL = 0.71; EXPRESSED IN BRAIN, SIGNAL = 0.7; EXPRESSED IN BONE MARROW, SIGNAL = 0.87
SSAPWTLPSPMPSTPSASAEGRSS

SEQ ID NO: 45900 - protein, 47 aa, Homo sapiens
  MAP TO AC015529.3; EXPRESSED IN BONE MARROW, SIGNAL = 4.2; EXPRESSED IN FETAL LIVER, SIGNAL = 3.8; EXPRESSED IN BRAIN, SIGNAL = 2.3; EST_HUMAN HIT: H70324.1, EVALUE 1.00e-08; SWISSPROT HIT: P37840, EVALUE 9.00e-10
AEKTKEQVTNVGGAVVTGVTAVAQKTVEGAGSIAAATGFVKKDQLGK

SEQ ID NO: 45901 - protein, 139 aa, Homo sapiens
  MAP TO AC008103.27; EXPRESSED IN PLACENTA, SIGNAL = 0.57; EXPRESSED IN ADULT LIVER, SIGNAL = 0.64; EXPRESSED IN BRAIN, SIGNAL = 0.66; EXPRESSED IN FETAL LIVER, SIGNAL = 0.6; EXPRESSED IN BONE MARROW, SIGNAL = 0.56; EST_HUMAN HIT: AW896117.1, EVALUE 4.00e-20; SWISSPROT HIT: P10264, EVALUE 2.00e-38
AYQYWPPAELQYRPPPESQYGYPGMPPAPQGRAPYPQPPTRRLNPTAPPSRQGSELHEIIDKSRKEGDTEAWQFPVTLEPMPPGEGAQEGEPPTVEARYKSFSIKMLKDMKEGVKQYGPNSPYMRTLLDSIAYGHRLIP

SEQ ID NO: 45902 - protein, 41 aa, Homo sapiens
  MAP TO AC008521.5; EXPRESSED IN ADULT LIVER, SIGNAL = 0.9; EXPRESSED IN BRAIN, SIGNAL = 0.71; EXPRESSED IN PLACENTA, SIGNAL = 0.77; EXPRESSED IN FETAL LIVER, SIGNAL = 0.66; EXPRESSED IN BONE MARROW, SIGNAL = 0.73
TVNKDVDAQAEGEGSRPSMDLFRAIFASSSDEKSSSSEDEQ

SEQ ID NO: 45903 - protein, 72 aa, Homo sapiens
  MAP TO AC008521.5; EXPRESSED IN ADULT LIVER, SIGNAL = 0.9; EXPRESSED IN BRAIN, SIGNAL = 0.71; EXPRESSED IN PLACENTA, SIGNAL = 0.77; EXPRESSED IN FETAL LIVER, SIGNAL = 0.66; EXPRESSED IN BONE MARROW, SIGNAL = 0.73; SWISSPROT HIT: P22997, EVALUE 1.30e+00; EST_HUMAN HIT: BE260213.1, EVALUE 4.70e-01
THRLKEKGAAHPWTYSGPSLPVPQMKSPHPPRMSKVTVKMIRQALGRPTSKAPKTLTWGKHHLWLTVCQYFR

SEQ ID NO: 45904 - protein, 43 aa, Homo sapiens
  MAP TO AC022268.3; EXPRESSED IN PLACENTA, SIGNAL = 0.47; EXPRESSED IN ADULT LIVER, SIGNAL = 0.53; EXPRESSED IN FETAL LIVER, SIGNAL = 0.46; EXPRESSED IN BRAIN, SIGNAL = 0.49
MSQIDMSEKASSDLDMSSEVDVGGYMSDGDILGKSLRTDDINS

SEQ ID NO: 45905 - protein, 76 aa, Homo sapiens
  MAP TO AC018501.5; EXPRESSED IN PLACENTA, SIGNAL = 0.83; EXPRESSED IN FETAL LIVER, SIGNAL = 0.85; EXPRESSED IN BONE MARROW, SIGNAL = 0.64; EXPRESSED IN ADULT LIVER, SIGNAL = 0.86; EXPRESSED IN BRAIN, SIGNAL = 0.94; SWISSPROT HIT: P29994, EVALUE 1.00e-23; EST_HUMAN HIT: BF087283.1, EVALUE 1.00e-30
  unsure 66
APQTKGSQGTQTDPDTYILFQEPLFAARVIYDLLFFFMVIIIVLNLIFGVIIATYADLRSEKQKKXEILKTTCFIC

SEQ ID NO: 45906 - protein, 45 aa, Homo sapiens [sequence omitted]

SEQ ID NO: 45907 - protein, 106 aa, Homo sapiens
  MAP TO AL133544.5; EXPRESSED IN PLACENTA, SIGNAL = 0.77; EXPRESSED IN FETAL LIVER, SIGNAL = 0.66; EXPRESSED IN ADULT LIVER, SIGNAL = 0.76; EXPRESSED IN BRAIN, SIGNAL = 0.86; EXPRESSED IN BONE MARROW, SIGNAL = 0.7; EST_HUMAN HIT: AI656890.1, EVALUE 3.00e-56; SWISSPROT HIT: Q10239, EVALUE 1.00e-01
PDTIRSNLPHIKETTSDDVSAANTNNLKKSTRVTKNKLRNTQLATENPNGDASVEEDKQGKPNKKVIKTVPQLTTQDLKPETPENKVDSTHQKTHTKPQPGVDHQK

SEQ ID NO: 45908 - protein, 42 aa, Homo sapiens
  MAP TO AC018731.3; EXPRESSED IN BONE MARROW, SIGNAL = 0.8; EXPRESSED IN PLACENTA, SIGNAL =   1; EXPRESSED IN ADULT LIVER, SIGNAL = 1.1; EXPRESSED IN FETAL LIVER, SIGNAL = 0.84; EXPRESSED IN BRAIN, SIGNAL = 0.79; EST_HUMAN HIT: AI365435.1, EVALUE 3.00e-06
CPSYKKKLTVNSLSSMRVIDPKTFQWDKMCQWKTVILMILTL

SEQ ID NO: 45909 - protein, 22 aa, Homo sapiens
  MAP TO AC018731.3; EXPRESSED IN BONE MARROW, SIGNAL = 0.8; EXPRESSED IN PLACENTA, SIGNAL =   1; EXPRESSED IN ADULT LIVER, SIGNAL = 1.1; EXPRESSED IN FETAL LIVER, SIGNAL = 0.84; EXPRESSED IN BRAIN, SIGNAL = 0.79; EST_HUMAN HIT: AI365435.1, EVALUE 2.20e-02
SVPCVLLTRRPSSGTRCVSGRQ

SEQ ID NO: 45910 - protein, 17 aa, Homo sapiens
  MAP TO AC022204.3; EXPRESSED IN PLACENTA, SIGNAL = 0.87; EXPRESSED IN BONE MARROW, SIGNAL = 0.67; EXPRESSED IN ADULT LIVER, SIGNAL = 0.65; EXPRESSED IN FETAL LIVER, SIGNAL = 0.64; EXPRESSED IN BRAIN, SIGNAL = 0.77
KALVFHMDIQMVQTAHG

SEQ ID NO: 45911 - protein, 42 aa, Homo sapiens
  MAP TO AC021003.4; EXPRESSED IN BRAIN, SIGNAL = 0.54; EST_HUMAN HIT: AI082750.1, EVALUE 7.10e+00
SGDYGMDVFGDHYSANCICGRKNKKRKDPTQNLTGSAALLKP

SEQ ID NO: 45912 - protein, 40 aa, Homo sapiens
  MAP TO AC021003.4; EXPRESSED IN BRAIN, SIGNAL = 0.54
VLGITAWTSLETIILPTASVEERTRKGRILLRTSQGARPC

SEQ ID NO: 45913 - protein, 150 aa, Homo sapiens
  MAP TO AC013698.3; EXPRESSED IN BONE MARROW, SIGNAL = 0.97; EXPRESSED IN ADULT LIVER, SIGNAL = 0.88; EXPRESSED IN BRAIN, SIGNAL = 2.5; EXPRESSED IN LUNG, SIGNAL = 1.2; EXPRESSED IN PLACENTA, SIGNAL = 0.63; EXPRESSED IN FETAL LIVER, SIGNAL = 1.8; SWISSPROT HIT: P49441, EVALUE 1.00e-85; EST_HUMAN HIT: BF185259.1, EVALUE 3.00e-75
WKGQCYWGLSYMGTNMHSLQLTISRRNGSETHTGNTGSEAAFSPSFSAVISTSEKETIKAALSRVCGDRIFGAAGAGYKSLCVVQGLVDIYIFSEDTTFKWDSCAAHAILRAMGGGIVDLKECLERNPETGLDLPQLVYHVENEGAAGVD

SEQ ID NO: 45914 - protein, 48 aa, Homo sapiens
  MAP TO AC013698.3; EXPRESSED IN BONE MARROW, SIGNAL = 0.97; EXPRESSED IN ADULT LIVER, SIGNAL = 0.88; EXPRESSED IN BRAIN, SIGNAL = 2.5; EXPRESSED IN LUNG, SIGNAL = 1.2; EXPRESSED IN PLACENTA, SIGNAL = 0.63; EXPRESSED IN FETAL LIVER, SIGNAL = 1.8; EST_HUMAN HIT: AW363727.1, EVALUE 7.00e-23
GKDSAIGAFLTWGPTCIHYSSPSLEETAVKHTLETPALRQHSPPVFQP

SEQ ID NO: 45915 - protein, 57 aa, Homo sapiens
  MAP TO AC021037.4; EXPRESSED IN PLACENTA, SIGNAL = 0.7; EXPRESSED IN FETAL LIVER, SIGNAL = 0.53; EXPRESSED IN BONE MARROW, SIGNAL = 0.55; EXPRESSED IN BRAIN, SIGNAL = 0.5
TQDLAEDSGERGEDRRGEGGGGRGGGGGGRSGGGGGRRSGGGGDRGGGGEGTAAVVE

SEQ ID NO: 45916 - protein, 31 aa, Homo sapiens
  MAP TO AC013332.4; EXPRESSED IN PLACENTA, SIGNAL = 0.48; EXPRESSED IN BRAIN, SIGNAL = 0.47; EXPRESSED IN BONE MARROW, SIGNAL = 0.46; EST_HUMAN HIT: AW811748.1, EVALUE 1.20e-02
TCSRLILCIHWPALKSAISPRTLVPFIGGRC

SEQ ID NO: 45917 - protein, 68 aa, Homo sapiens
  MAP TO AC018530.4; EXPRESSED IN ADULT LIVER, SIGNAL = 0.64; EXPRESSED IN BRAIN, SIGNAL = 0.62; EXPRESSED IN PLACENTA, SIGNAL = 0.67; EXPRESSED IN FETAL LIVER, SIGNAL = 0.52; EXPRESSED IN BONE MARROW, SIGNAL = 0.63; SWISSPROT HIT: O73770, EVALUE 2.60e+00; EST_HUMAN HIT: BE147588.1, EVALUE 4.30e+00
FKKRNNYSASFNKMVTRLTVDTPPQILSHQLSSHPSLNGLLRTLQEFRKQLPTDCLARMSYHTTREKE

SEQ ID NO: 45918 - protein, 78 aa, Homo sapiens
  MAP TO AC026206.1; EXPRESSED IN BRAIN, SIGNAL = 0.51; SWISSPROT HIT: P28685, EVALUE 2.00e-15; EST_HUMAN HIT: AA382531.1, EVALUE 3.00e-03
SIPEELQNGEGFGYIIMFRPVGSTTWSKEKVSSVESSRFVYRNESIIPLSPFEVKVGVYNNEGEGSLSTVTIVYSGED

SEQ ID NO: 45919 - protein, 66 aa, Homo sapiens
  MAP TO AC026206.1; EXPRESSED IN BRAIN, SIGNAL = 0.51; EST_HUMAN HIT: BF340649.1, EVALUE 7.60e-02; SWISSPROT HIT: P13597, EVALUE 3.40e+00
QFQKNCRMGRDLDISSCSGQWARQPGPRRKCHLWNHQGLSTEMKASSHCLPLKSKWVCIIMKEKDP

SEQ ID NO: 45920 - protein, 62 aa, Homo sapiens
  MAP TO AC021366.3; EXPRESSED IN BRAIN, SIGNAL = 0.53; EXPRESSED IN FETAL LIVER, SIGNAL = 0.53; EXPRESSED IN BONE MARROW, SIGNAL = 0.52; SWISSPROT HIT: P43596, EVALUE 5.90e+00; EST_HUMAN HIT: W31367.1, EVALUE 2.00e-18
WHNLQSYQKPAFKNPFHEILQRSKPWTIADYKSLFEKDQSKTRIVDDKRLKSAIDKDTVDQD

SEQ ID NO: 45921 - protein, 27 aa, Homo sapiens
  MAP TO AC021366.3; EXPRESSED IN BRAIN, SIGNAL = 0.53; EXPRESSED IN FETAL LIVER, SIGNAL = 0.53; EXPRESSED IN BONE MARROW, SIGNAL = 0.52; EST_HUMAN HIT: W31367.1, EVALUE 4.70e-02
GTISKVIRNLHSRILFMKSSKEASPGP

SEQ ID NO: 45922 - protein, 43 aa, Homo sapiens
  MAP TO AC011155.4; EXPRESSED IN PLACENTA, SIGNAL = 0.6; EXPRESSED IN FETAL LIVER, SIGNAL = 2.1; EXPRESSED IN BRAIN, SIGNAL = 0.44; EST_HUMAN HIT: AW885305.1, EVALUE 9.20e+00
WTRKKASKAAEAQGRWRKRWRKRTRRRRKPKGLGACVCMCACV

SEQ ID NO: 45923 - protein, 71 aa, Homo sapiens
  MAP TO AL121884.5; EXPRESSED IN ADULT LIVER, SIGNAL = 0.83; EXPRESSED IN BONE MARROW, SIGNAL =   2; EXPRESSED IN PLACENTA, SIGNAL = 0.78; EXPRESSED IN FETAL LIVER, SIGNAL =   2; EXPRESSED IN LUNG, SIGNAL =   1; EXPRESSED IN BRAIN, SIGNAL = 1.1; SWISSPROT HIT: Q04652, EVALUE 7.00e-09; EST_HUMAN HIT: AU130089.1, EVALUE 5.00e-36
EHFIEVIKNQEFLLLPANEISKLLCSDDINVPDEETIFHALMQWVGHDVQNRQGELGMLLSYIRLPLLPPQ

SEQ ID NO: 45924 - protein, 42 aa, Homo sapiens
  MAP TO AL078591.18; EXPRESSED IN LUNG, SIGNAL = 1.1; EXPRESSED IN PLACENTA, SIGNAL = 1.2; EXPRESSED IN FETAL LIVER, SIGNAL = 1.1; EXPRESSED IN BRAIN, SIGNAL =   1; EXPRESSED IN ADULT LIVER, SIGNAL = 1.1; EXPRESSED IN BONE MARROW, SIGNAL =   1; SWISSPROT HIT: P41684, EVALUE 4.80e+00
FPRPVKTTWLNRNAPAQNKDSVIPTLESVVFGINYTKQLSPD

SEQ ID NO: 45925 - protein, 50 aa, Homo sapiens
  MAP TO AC008270.3; EXPRESSED IN BONE MARROW, SIGNAL = 0.45; EXPRESSED IN PLACENTA, SIGNAL = 0.45; EXPRESSED IN BRAIN, SIGNAL = 0.52; SWISSPROT HIT: P15602, EVALUE 8.10e+00
VLLFRSTTNYLYKHANGKGRCKPLIPTTQVIQACPPVSFATSDLQRTKNS

SEQ ID NO: 45926 - protein, 39 aa, Homo sapiens
  MAP TO AC019126.3; EXPRESSED IN ADULT LIVER, SIGNAL = 0.76; EXPRESSED IN BRAIN, SIGNAL = 0.59; EXPRESSED IN BONE MARROW, SIGNAL = 0.66; EXPRESSED IN PLACENTA, SIGNAL = 0.62; EXPRESSED IN FETAL LIVER, SIGNAL = 0.68; EST_HUMAN HIT: AI879633.1, EVALUE 1.00e-14; SWISSPROT HIT: P57309, EVALUE 8.30e+00
MQHFLPVLKDRFIQLLSDQSDQSVLIQKQIFKIFYALVQ

SEQ ID NO: 45927 - protein, 54 aa, Homo sapiens
  MAP TO AL158012.2; EXPRESSED IN BRAIN, SIGNAL = 0.44; EXPRESSED IN PLACENTA, SIGNAL = 0.54; EXPRESSED IN FETAL LIVER, SIGNAL = 0.79; EXPRESSED IN BONE MARROW, SIGNAL = 0.43; EST_HUMAN HIT: BF205544.1, EVALUE 1.00e-19; SWISSPROT HIT: Q91690, EVALUE 5.00e-21
FEGCEKAFSRLENLKIHLRSHTGEKPYLCQHPGCQKAFSNSSDRAKHQRTHLDT

SEQ ID NO: 45928 - protein, 53 aa, Homo sapiens
  MAP TO AL158012.2; EXPRESSED IN BRAIN, SIGNAL = 0.44; EXPRESSED IN PLACENTA, SIGNAL = 0.54; EXPRESSED IN FETAL LIVER, SIGNAL = 0.79; EXPRESSED IN BONE MARROW, SIGNAL = 0.43; EST_HUMAN HIT: AI673579.1, EVALUE 2.20e+00
LKVARRPFQGLKISRSTCGATQARSRICASIRVVRRPSVTPVTAPNTSGRIWT

SEQ ID NO: 45929 - protein, 55 aa, Homo sapiens
  MAP TO AC009503.3; EXPRESSED IN PLACENTA, SIGNAL = 0.91; EXPRESSED IN FETAL LIVER, SIGNAL = 0.86; EXPRESSED IN BRAIN, SIGNAL = 0.72; EXPRESSED IN LUNG, SIGNAL = 1.1; EXPRESSED IN ADULT LIVER, SIGNAL = 1.1; EXPRESSED IN BONE MARROW, SIGNAL = 0.75; EST_HUMAN HIT: AW149789.1, EVALUE 7.30e-01
LVLKGNIISGFEWVSYFVSGDSLGDRPPRSITLSSQLDGKDQPGVERSIHLFRKQ

SEQ ID NO: 45930 - protein, 24 aa, Homo sapiens
  MAP TO AC013591.3; EXPRESSED IN BRAIN, SIGNAL = 0.7; EXPRESSED IN PLACENTA, SIGNAL = 0.72; EXPRESSED IN FETAL LIVER, SIGNAL = 0.57; EXPRESSED IN BONE MARROW, SIGNAL = 0.63; EXPRESSED IN ADULT LIVER, SIGNAL = 0.83; EST_HUMAN HIT: BF589594.1, EVALUE 6.00e-06
VFVNTVSIGFLDYKTTKIAVPLIQ

SEQ ID NO: 45931 - protein, 32 aa, Homo sapiens
  MAP TO AC013591.3; EXPRESSED IN BRAIN, SIGNAL = 0.7; EXPRESSED IN PLACENTA, SIGNAL = 0.72; EXPRESSED IN FETAL LIVER, SIGNAL = 0.57; EXPRESSED IN BONE MARROW, SIGNAL = 0.63; EXPRESSED IN ADULT LIVER, SIGNAL = 0.83; EST_HUMAN HIT: R35863.1, EVALUE 2.00e+00
ARVLPFLAWRRSRLPSSCWSWMFLPVPFGRCL

SEQ ID NO: 45932 - protein, 101 aa, Homo sapiens
  MAP TO AL049870.3; EXPRESSED IN BRAIN, SIGNAL = 0.57; EXPRESSED IN PLACENTA, SIGNAL = 0.51; EXPRESSED IN FETAL LIVER, SIGNAL = 0.68; EXPRESSED IN ADULT LIVER, SIGNAL = 0.54; EXPRESSED IN BONE MARROW, SIGNAL = 0.55; EST_HUMAN HIT: H39805.1, EVALUE 9.00e-48; SWISSPROT HIT: Q10103, EVALUE 2.00e-02
YASLNFGSKTQQTFGSQTECTSSNGQNPSPGAYILPSYPVSSPRTSPKHTSPLIISPKKSQDNSVNFSNSWPLKSFEGLSKPSPQKKLVSQKSSDPTGRNH

SEQ ID NO: 45933 - protein, 40 aa, Homo sapiens; identical to SEQ ID NO: 36223
  MAP TO AC007744.2; EXPRESSED IN BONE MARROW, SIGNAL = 0.67; EXPRESSED IN ADULT LIVER, SIGNAL = 0.66; EXPRESSED IN BRAIN, SIGNAL = 0.65; EXPRESSED IN PLACENTA, SIGNAL = 0.65; EXPRESSED IN FETAL LIVER, SIGNAL = 0.73; SWISSPROT HIT: P35840, EVALUE 4.80e+00

SEQ ID NO: 45934 - protein, 28 aa, Homo sapiens
  MAP TO AC022918.2; EXPRESSED IN ADULT LIVER, SIGNAL = 0.98; EXPRESSED IN BONE MARROW, SIGNAL = 0.67; EXPRESSED IN LUNG, SIGNAL = 0.87; EXPRESSED IN PLACENTA, SIGNAL = 0.97; EXPRESSED IN FETAL LIVER, SIGNAL = 0.72; EXPRESSED IN BRAIN, SIGNAL = 0.71
TESSNQIMTDTPFTVSDPVVFFSEAKHM

SEQ ID NO: 45935 - protein, 31 aa, Homo sapiens
  MAP TO AC022918.2; EXPRESSED IN ADULT LIVER, SIGNAL = 0.98; EXPRESSED IN BONE MARROW, SIGNAL = 0.67; EXPRESSED IN LUNG, SIGNAL = 0.87; EXPRESSED IN PLACENTA, SIGNAL = 0.97; EXPRESSED IN FETAL LIVER, SIGNAL = 0.72; EXPRESSED IN BRAIN, SIGNAL = 0.71
VQKHLILQCCCIQILLTCVLPQKRRQLGPIQ

SEQ ID NO: 45936 - protein, 43 aa, Homo sapiens
  MAP TO AC013634.3; EXPRESSED IN ADULT LIVER, SIGNAL = 0.93; EXPRESSED IN BONE MARROW, SIGNAL = 0.66; EXPRESSED IN LUNG, SIGNAL = 0.91; EXPRESSED IN PLACENTA, SIGNAL = 0.82; EXPRESSED IN FETAL LIVER, SIGNAL = 0.71; EXPRESSED IN BRAIN, SIGNAL = 0.72
DTQYRRATCLNVSAVKTSATEVNVGLSVKLMYLKIAALYGTDS

SEQ ID NO: 45937 - protein, 33 aa, Homo sapiens
  MAP TO AC011272.3; EXPRESSED IN ADULT LIVER, SIGNAL = 1.4; EXPRESSED IN BONE MARROW, SIGNAL = 1.1; EXPRESSED IN LUNG, SIGNAL = 0.96; EXPRESSED IN PLACENTA, SIGNAL = 1.1; EXPRESSED IN FETAL LIVER, SIGNAL = 1.3; EXPRESSED IN BRAIN, SIGNAL = 0.87
KEEGHCVTWTISSPIPLTSPLLFLSTLLQMTTL

SEQ ID NO: 45938 - protein, 58 aa, Homo sapiens
  MAP TO AC016202.4; EXPRESSED IN BRAIN, SIGNAL = 0.45; EST_HUMAN HIT: R18000.1, EVALUE 1.20e+00; SWISSPROT HIT: Q00242, EVALUE 7.90e+00
NSANTQFQNWFNGKLMMSARNDVFPSTLSPLFILLPLGSNMAMIESNITYQFQRQKAI

SEQ ID NO: 45939 - protein, 31 aa, Homo sapiens
  MAP TO AC018578.3; EXPRESSED IN BRAIN, SIGNAL = 0.46
MANMGLREEKGQSQDSIESGSAEKQHQDNVH

SEQ ID NO: 45940 - protein, 85 aa, Homo sapiens
  MAP TO AC019284.4; EXPRESSED IN BRAIN, SIGNAL = 0.54; EST_HUMAN HIT: BE779909.1, EVALUE 8.10e-02; SWISSPROT HIT: P13816, EVALUE 2.00e-04
YEEDFEVDEEKQGEKSNEEGQADVQMNGIPQSPLDDKKDNLDPEKESETSSQKAPDAHDNVKDENDGCSESELEEDKQGELFSLS

SEQ ID NO: 45941 - protein, 52 aa, Homo sapiens
  MAP TO AC016517.4; EXPRESSED IN BRAIN, SIGNAL = 1.1; EST_HUMAN HIT: R93859.1, EVALUE 1.00e-23; SWISSPROT HIT: P19493, EVALUE 8.00e-25
GLFIRNTDQEYTAFRLAIFLHNTSPNASEAPFNLVPHVDNIETANSFAVTNA

SEQ ID NO: 45942 - protein, 66 aa, Homo sapiens
  MAP TO AC021041.3; EXPRESSED IN BONE MARROW, SIGNAL = 0.71; EXPRESSED IN PLACENTA, SIGNAL = 0.65; EXPRESSED IN FETAL LIVER, SIGNAL = 0.52; EXPRESSED IN BRAIN, SIGNAL = 0.57; SWISSPROT HIT: P78956, EVALUE 3.40e+00; EST_HUMAN HIT: AA320332.1, EVALUE 3.00e-28
ALGKHENNVEQGKDPGRMTHTSLSYFKFSLGRLAWDNEGKRLLFSSLHHKLPSAESQALLDHPKLK

SEQ ID NO: 45943 - protein, 17 aa, Homo sapiens
  MAP TO AC021041.3; EXPRESSED IN BONE MARROW, SIGNAL = 0.71; EXPRESSED IN PLACENTA, SIGNAL = 0.65; EXPRESSED IN FETAL LIVER, SIGNAL = 0.52; EXPRESSED IN BRAIN, SIGNAL = 0.57; EST_HUMAN HIT: AA320332.1, EVALUE 6.40e-02
PLASMRTTWSRERIREG

SEQ ID NO: 45944 - protein, 25 aa, Homo sapiens
  MAP TO AL161739.1; EXPRESSED IN BRAIN, SIGNAL = 0.54; EXPRESSED IN PLACENTA, SIGNAL = 0.65; EXPRESSED IN FETAL LIVER, SIGNAL = 0.64; EXPRESSED IN BONE MARROW, SIGNAL = 0.52; EST_HUMAN HIT: AA421242.1, EVALUE 2.00e-05
WPEASTTKRKAVDTYCLDYKPSKGR

SEQ ID NO: 45945 - protein, 73 aa, Homo sapiens
  MAP TO AL137853.3; EXPRESSED IN PLACENTA, SIGNAL = 0.7; EXPRESSED IN FETAL LIVER, SIGNAL = 0.7; EXPRESSED IN BRAIN, SIGNAL = 0.62; EXPRESSED IN BONE MARROW, SIGNAL = 0.71; SWISSPROT HIT: P29617, EVALUE 2.90e-01
MAERKAQLDALAFDIQFFISEHAQDLSPQQNRQMLRLLNELQRSFQDILEQTAAQVDALQGHLQQMEQEALVK

SEQ ID NO: 45946 - protein, 44 aa, Homo sapiens
  MAP TO AL121575.24; EXPRESSED IN FETAL LIVER, SIGNAL = 0.6; EXPRESSED IN BONE MARROW, SIGNAL = 0.49; EXPRESSED IN BRAIN, SIGNAL = 0.47; EST_HUMAN HIT: AA325467.1, EVALUE 1.00e-16
VLERIGARALVAHVRTFADFLVYEFSTSAGGQQLNKCIEILNDM

SEQ ID NO: 45947 - protein, 55 aa, Homo sapiens
  MAP TO AC022562.3; EXPRESSED IN BRAIN, SIGNAL = 0.48; SWISSPROT HIT: P13196, EVALUE 1.60e+00; EST_HUMAN HIT: BF346257.1, EVALUE 9.00e-08
LQIYAVTPIPDYVDVLQMDRVPDRVKSFYRVNNVRKFRYDRPFHKGPKDKENEFK

SEQ ID NO: 45948 - protein, 29 aa, Homo sapiens
  MAP TO AC018421.3; EXPRESSED IN PLACENTA, SIGNAL = 0.56; EXPRESSED IN BRAIN, SIGNAL = 0.73
EYGELGKRRVNRVTVEKRKMPAAHDQLCK

SEQ ID NO: 45949 - protein, 43 aa, Homo sapiens
  MAP TO AC009155.3; EXPRESSED IN FETAL LIVER, SIGNAL = 0.46; EXPRESSED IN BRAIN, SIGNAL = 0.75; SWISSPROT HIT: P25386, EVALUE 3.70e+00; EST_HUMAN HIT: AA453929.1, EVALUE 2.00e-18
KTMKSRYMELYDLNRDLLNGYKIRCNNHTELLGNLKAVNQAIQ

SEQ ID NO: 45950 - protein, 40 aa, Homo sapiens
  MAP TO AC008164.3; EXPRESSED IN BRAIN, SIGNAL = 0.45; EXPRESSED IN BONE MARROW, SIGNAL = 0.43
RVLAHTHTHIVIIIIVIISTPPTPLTLLLSSSNIKESTQQ

SEQ ID NO: 45951 - protein, 55 aa, Homo sapiens
  MAP TO AC008164.3; EXPRESSED IN BRAIN, SIGNAL = 0.45; EXPRESSED IN BONE MARROW, SIGNAL = 0.43
YVLHSEQTSHMCAQESACTHTHTHCHHHHCHHLHTSHPFDPVTFLLKYQGKHPTG

SEQ ID NO: 45952 - protein, 46 aa, Homo sapiens; identical to SEQ ID NO: 36888
  MAP TO AC007557.3; EXPRESSED IN PLACENTA, SIGNAL = 0.47; EXPRESSED IN BRAIN, SIGNAL = 0.45; EST_HUMAN HIT: AW002620.1, EVALUE 4.00e-09; SWISSPROT HIT: P09430, EVALUE 3.00e-10

SEQ ID NO: 45953 - protein, 128 aa, Homo sapiens
  MAP TO AP001441.1; EXPRESSED IN ADULT LIVER, SIGNAL = 2.2; EXPRESSED IN BONE MARROW, SIGNAL = 1.2; EXPRESSED IN PLACENTA, SIGNAL = 0.54; EXPRESSED IN FETAL LIVER, SIGNAL = 1.1; EXPRESSED IN BRAIN, SIGNAL =   1; SWISSPROT HIT: P23004, EVALUE 1.10e+00; EST_HUMAN HIT: BE165330.1, EVALUE 3.00e-29
LIVKAYRIPPSRTRGIDVLDQITKPIQEKDLDVAGGFNLSGATTTGLFEKYHSNRIKSCYADIIMYPEGKKKARGRKQKGIITTELILANKEKLIIGKSDRNPGFVATGSLGLVVRAQHYVGNQIPNT

SEQ ID NO: 45954 - protein, 25 aa, Homo sapiens
  MAP TO AC011284.3; EXPRESSED IN PLACENTA, SIGNAL = 0.55; EXPRESSED IN BRAIN, SIGNAL = 0.48
CHDSVGEAQHKAEHTYPAGLYAPHP

SEQ ID NO: 45955 - protein, 79 aa, Homo sapiens
  MAP TO AL133412.4; EXPRESSED IN BONE MARROW, SIGNAL = 0.48; EXPRESSED IN BRAIN, SIGNAL = 0.45; SWISSPROT HIT: P32971, EVALUE 5.00e-42; EST_HUMAN HIT: BF082784.1, EVALUE 2.00e-40
AKHLNKTKLSWNKDGILHGVRYQDGNLVIQFPGLYFIICQLQFLVQCPNNSVDLKLELLINKHIKKQALVTVCESGMQT

SEQ ID NO: 45956 - protein, 35 aa, Homo sapiens
  MAP TO AL117341.26; EXPRESSED IN BRAIN, SIGNAL = 0.45; EXPRESSED IN PLACENTA, SIGNAL = 0.47; EXPRESSED IN BONE MARROW, SIGNAL = 0.49
MERKEDSRDIRQGTLTHPHRRPKSWPSIKLFQKAK

SEQ ID NO: 45957 - protein, 55 aa, Homo sapiens; identical to SEQ ID NO: 38196
  MAP TO AL109809.18; EXPRESSED IN FETAL LIVER, SIGNAL = 0.65; EXPRESSED IN BRAIN, SIGNAL = 1.5; EXPRESSED IN BONE MARROW, SIGNAL = 0.9; SWISSPROT HIT: O10315, EVALUE 6.10e+00; EST_HUMAN HIT: AI363143.1, EVALUE 7.00e-12

SEQ ID NO: 45958 - protein, 28 aa, Homo sapiens
  MAP TO AL109809.18; EXPRESSED IN FETAL LIVER, SIGNAL = 0.65; EXPRESSED IN BRAIN, SIGNAL = 1.5; EXPRESSED IN BONE MARROW, SIGNAL = 0.9; EST_HUMAN HIT: BE514786.1, EVALUE 4.00e-01
RVASELCSWWAETSRARLLLTTSCPSCA

SEQ ID NO: 45959 - protein, 69 aa, Homo sapiens
  MAP TO AL137853.3; EXPRESSED IN LUNG, SIGNAL = 0.87; EXPRESSED IN BRAIN, SIGNAL = 0.61; EXPRESSED IN PLACENTA, SIGNAL = 0.47; SWISSPROT HIT: P02549, EVALUE 2.60e-02; EST_HUMAN HIT: AW500517.1, EVALUE 5.00e-32
VFANEVNAHRDQIIELDQTGNQLKFLSQKQDVVLIKNLLVSVQSRWEKVVQRSIERGRSLDDARKRAKQ

SEQ ID NO: 45960 - protein, 68 aa, Homo sapiens
  MAP TO AL162471.1; EXPRESSED IN BRAIN, SIGNAL = 0.55; SWISSPROT HIT: O26757, EVALUE 7.30e+00; EST_HUMAN HIT: AV728273.1, EVALUE 1.00e-34
SSALFQHITALFECSMAAIITLLVSDPVGVLYIRSCRVLMLSDWYTMLYNPSPDYVTTVHCTHEAVYP

SEQ ID NO: 45961 - protein, 23 aa, Homo sapiens
  MAP TO AL162471.1; EXPRESSED IN BRAIN, SIGNAL = 0.55; EST_HUMAN HIT: BE748156.1, EVALUE 6.00e-07
PAHFSNTSLHYLNAAWQLLSPYL

SEQ ID NO: 45962 - protein, 69 aa, Homo sapiens
  MAP TO AL161627.2; EXPRESSED IN PLACENTA, SIGNAL = 0.61; EXPRESSED IN BRAIN, SIGNAL = 0.52; EST_HUMAN HIT: BE257479.1, EVALUE 2.00e-20; SWISSPROT HIT: O58045, EVALUE 3.40e+00
PKAPEIDPVECLVADNSVTVAWRMPEEDNKIDHFILEHRKTNFDGLPRVKDERCWEIIDNIKGTEYTLS

SEQ ID NO: 45963 - protein, 40 aa, Homo sapiens
  MAP TO AL139819.2; EXPRESSED IN HELA, SIGNAL = 5.2; EXPRESSED IN FETAL LIVER, SIGNAL =   4; EXPRESSED IN BRAIN, SIGNAL = 4.2; EXPRESSED IN PLACENTA, SIGNAL = 0.73; EXPRESSED IN BONE MARROW, SIGNAL = 0.79; EST_HUMAN HIT: BE091651.1, EVALUE 3.00e-08
SLAPIPPPPPLQRLPPGSCRMEEISWRRCPSTWKTTFALI

SEQ ID NO: 45964 - protein, 60 aa, Homo sapiens
  MAP TO AL137225.7; EXPRESSED IN PLACENTA, SIGNAL = 2.8; EXPRESSED IN FETAL LIVER, SIGNAL = 0.76; EXPRESSED IN BRAIN, SIGNAL = 0.85; EXPRESSED IN BONE MARROW, SIGNAL = 0.59; EST_HUMAN HIT: BE969873.1, EVALUE 3.50e+00; SWISSPROT HIT: P24604, EVALUE 2.00e+00
PIVKSVAGDIIDFPKSRAPAKVPPKKDHTSQVMVPLYLFNTMFGLLQTNGALDMDITPEL

SEQ ID NO: 45965 - protein, 174 aa, Homo sapiens
  MAP TO AP001422.1; EXPRESSED IN ADULT LIVER, SIGNAL = 0.58; EXPRESSED IN BRAIN, SIGNAL =   1; EST_HUMAN HIT: BE172254.1, EVALUE 1.00e-41; SWISSPROT HIT: Q99712, EVALUE 1.00e-77
MRKSLLIQCQLSGKLLQTHVTKEGERILLNQATVKFHVDSSSESPFLILPMTFYHVLDETSPLRDLTPQNLKEKEFELVVLLNATVESTSAVCQSRTSYIPEEIYWGFEFVPVVSLSKNGKYVADFSQFEQIRKSPDCTFYCADSEKQQLEEKYRQEDQRERELRTLLLQQSNV

SEQ ID NO: 45966 - protein, 37 aa, Homo sapiens
  MAP TO AP001422.1; EXPRESSED IN ADULT LIVER, SIGNAL = 0.58; EXPRESSED IN BRAIN, SIGNAL =   1; SWISSPROT HIT: P97386, EVALUE 2.80e+00; EST_HUMAN HIT: BF028418.1, EVALUE 2.00e-14
SSCRPTSPRRGSGFSSTKPLSNSTWTPPLRAPSSFCP

SEQ ID NO: 45967 - protein, 34 aa, Homo sapiens
  MAP TO AC012433.5; EXPRESSED IN PLACENTA, SIGNAL = 0.48; EXPRESSED IN BRAIN, SIGNAL = 0.48
MAPDTDTRYTQLSGACCFLGGTDLLPSQRVLIQS

SEQ ID NO: 45968 - protein, 47 aa, Homo sapiens [sequence omitted]

SEQ ID NO: 45969 - protein, 149 aa, Homo sapiens
  MAP TO AC019284.4; EXPRESSED IN BRAIN, SIGNAL = 0.57; EST_HUMAN HIT: AA682200.1, EVALUE 5.00e-37; SWISSPROT HIT: Q02752, EVALUE 1.10e-01
MKTASSTSSRSHPYSSDSEDESAVGDREAHTDSSTDESARRSSSQELSENDKPRKSHLPIEESLEIEIEDQEITKADVETKPMPIDESFENVLKEGTEKGTQEIAEGLSEKSGKHVSAEEKEKDKSKLWEESTAQVKDKKAGLPGLEEG

SEQ ID NO: 45970 - protein, 53 aa, Homo sapiens
  MAP TO AC015897.3; EXPRESSED IN BRAIN, SIGNAL = 0.46; EST_HUMAN HIT: BE541186.1, EVALUE 5.00e-02; SWISSPROT HIT: P07527, EVALUE 9.20e-01
TAPRPYTAPGNMQPPIRLQPLPSNPAVETVPKVTSRSRSKTSLLENEALFPIG

SEQ ID NO: 45971 - protein, 37 aa, Homo sapiens
  MAP TO AL160492.1; EXPRESSED IN BRAIN, SIGNAL = 0.49; EST_HUMAN HIT: AU129351.1, EVALUE 2.90e-01
TSPRVSSELEQARPQTSGEEELQLQLALAMSREVAEQ

SEQ ID NO: 45972 - protein, 30 aa, Homo sapiens
  MAP TO AL160492.1; EXPRESSED IN BRAIN, SIGNAL = 0.49; SWISSPROT HIT: Q08102, EVALUE 5.00e+00; EST_HUMAN HIT: AU129351.1, EVALUE 2.00e-05
PPPRECPPSWSKPGPRLVEKRSFSCSWHLP

SEQ ID NO: 45973 - protein, 28 aa, Homo sapiens
  MAP TO AC015600.4; EXPRESSED IN BRAIN, SIGNAL = 0.49
RNIFPKLDETYTECSLEDTICEAATNCL

SEQ ID NO: 45974 - protein, 146 aa, Homo sapiens
  MAP TO AC009396.5; EXPRESSED IN FETAL LIVER, SIGNAL = 2.1; EXPRESSED IN LUNG, SIGNAL = 1.9; EXPRESSED IN PLACENTA, SIGNAL = 1.9; EXPRESSED IN BRAIN, SIGNAL = 2.2; EXPRESSED IN ADULT LIVER, SIGNAL = 1.5; EXPRESSED IN BONE MARROW, SIGNAL = 2.1; EST_HUMAN HIT: BE796798.1, EVALUE 1.00e-53; SWISSPROT HIT: Q21313, EVALUE 1.00e-04
VVYKNNDIRLELSRLARIADTKMKIYGEVVFKCENVATLDPINFETPEAYISLPKWNTKRMGSISFDFRTTEPNGLILFTHGKPQERKDARSQKNTKVDFFAVELLDGNLYLLLDMGSGTIKVKATQKKANDGEWYHVDIQRDGRS

SEQ ID NO: 45975 - protein, 129 aa, Homo sapiens
  MAP TO AL138761.3; EXPRESSED IN ADULT LIVER, SIGNAL = 1.9; EXPRESSED IN BONE MARROW, SIGNAL =   2; EXPRESSED IN BRAIN, SIGNAL = 1.8; EXPRESSED IN PLACENTA, SIGNAL = 3.1; EXPRESSED IN HELA, SIGNAL = 1.6; EXPRESSED IN LUNG, SIGNAL = 2.4
PDVRSFIVGPPGPPGPQGPPGDSRLLSTDASHSRGSSSSSHSSSVRRGSSYSSSMSTGGGGAGSLGAGGAFGEAAGDRGPYGTDIGPGGGYGAAAEGGMYAGNGGLLGADFAGDLDYNELAVRVSESMQ

SEQ ID NO: 45976 - protein, 55 aa, Homo sapiens
  MAP TO AL138761.3; EXPRESSED IN ADULT LIVER, SIGNAL = 1.9; EXPRESSED IN BONE MARROW, SIGNAL =   2; EXPRESSED IN BRAIN, SIGNAL = 1.8; EXPRESSED IN PLACENTA, SIGNAL = 3.1; EXPRESSED IN HELA, SIGNAL = 1.6; EXPRESSED IN LUNG, SIGNAL = 2.4; EST_HUMAN HIT: BE615162.1, EVALUE 8.00e-26; SWISSPROT HIT: Q9Y6H8, EVALUE 1.60e+00
VLMCAASLLAPQALLGRRDPLGTAASCPRMPPTVGVAAPPHTAHLSGGAAPTALP

SEQ ID NO: 45977 - protein, 19 aa, Homo sapiens
  MAP TO AC007342.2; EXPRESSED IN PLACENTA, SIGNAL = 1.6; EXPRESSED IN BRAIN, SIGNAL = 1.6; EXPRESSED IN ADULT LIVER, SIGNAL = 1.6; EXPRESSED IN BONE MARROW, SIGNAL = 2.1; EXPRESSED IN FETAL LIVER, SIGNAL = 1.7; EXPRESSED IN LUNG, SIGNAL =   2; EST_HUMAN HIT: AV757420.1, EVALUE 1.00e-03
WVVTILKWARKLETQANLS

SEQ ID NO: 45978 - protein, 26 aa, Homo sapiens
  MAP TO AC019055.2; EXPRESSED IN BONE MARROW, SIGNAL = 1.5; EXPRESSED IN FETAL LIVER, SIGNAL = 1.6; EXPRESSED IN BRAIN, SIGNAL = 2.4; EXPRESSED IN PLACENTA, SIGNAL = 1.6; EXPRESSED IN HELA, SIGNAL = 1.6; EXPRESSED IN ADULT LIVER, SIGNAL = 1.6
ELTKGQWTQLTLARVGKMRGRLLGRS

SEQ ID NO: 45979 - protein, 61 aa, Homo sapiens
  MAP TO AC017079.2; EXPRESSED IN BRAIN, SIGNAL =   2; EXPRESSED IN PLACENTA, SIGNAL =   2; EXPRESSED IN ADULT LIVER, SIGNAL = 1.6; EXPRESSED IN LUNG, SIGNAL = 1.9; EXPRESSED IN BONE MARROW, SIGNAL =   2; SWISSPROT HIT: Q09332, EVALUE 4.00e-18; EST_HUMAN HIT: BE254640.1, EVALUE 2.00e-19
EFIPYMANEYNFQYELVQYKWPRWLHQQTEKQRIIWGYKILFLDVLFPLVVDKFLFVDADQ

SEQ ID NO: 45980 - protein, 48 aa, Homo sapiens
  MAP TO AC017079.2; EXPRESSED IN BRAIN, SIGNAL =   2; EXPRESSED IN PLACENTA, SIGNAL =   2; EXPRESSED IN ADULT LIVER, SIGNAL = 1.6; EXPRESSED IN LUNG, SIGNAL = 1.9; EXPRESSED IN BONE MARROW, SIGNAL =   2; EST_HUMAN HIT: AA852449.1, EVALUE 5.00e-15
SLYLTWQMNTISSMSLFSTNGPGGFINKLKNSVSSGVTRSSSWMYFSH

SEQ ID NO: 45981 - protein, 72 aa, Homo sapiens
  MAP TO AC018764.3; EXPRESSED IN ADULT LIVER, SIGNAL = 1.7; EXPRESSED IN BRAIN, SIGNAL = 1.5; EXPRESSED IN PLACENTA, SIGNAL = 1.3; EXPRESSED IN BONE MARROW, SIGNAL = 1.6; EXPRESSED IN FETAL LIVER, SIGNAL = 1.7; EXPRESSED IN HELA, SIGNAL = 2.1; EST_HUMAN HIT: T10045.1, EVALUE 9.00e-12; SWISSPROT HIT: Q01818, EVALUE 1.30e+00
LAVVEPSMMLLENVKRHLKRPVWINADILPGPNGNSKVIDAKPFLDTVISFFPDVTFSLGWTTGWHPEKVNE

SEQ ID NO: 45982 - protein, 70 aa, Homo sapiens
  MAP TO AC004460.1; EXPRESSED IN BRAIN, SIGNAL = 2.3; EXPRESSED IN LUNG, SIGNAL = 2.4; SWISSPROT HIT: Q92834, EVALUE 5.00e-03; EST_HUMAN HIT: AL042298.1, EVALUE 2.00e-10
WGDNDHGQQGNGTTTVNRKPMLVQGLEGQKIMCVACGSSHSVAWTTMDVATPSVHEPVLFQTARDPLGAS

SEQ ID NO: 45983 - protein, 25 aa, Homo sapiens
  MAP TO AL159191.1; EXPRESSED IN BRAIN, SIGNAL = 1.5; EXPRESSED IN PLACENTA, SIGNAL = 1.7; EXPRESSED IN LUNG, SIGNAL = 1.7; EST_HUMAN HIT: T97538.1, EVALUE 1.00e-07
PLTNTRERGFAFRMLIRPLWLREEK

SEQ ID NO: 45984 - protein, 31 aa, Homo sapiens
  MAP TO AC011510.3; EXPRESSED IN BONE MARROW, SIGNAL = 2.3; EXPRESSED IN LUNG, SIGNAL = 2.4; EXPRESSED IN BRAIN, SIGNAL = 1.3; EST_HUMAN HIT: AA256792.1, EVALUE 6.00e-10; SWISSPROT HIT: Q00993, EVALUE 5.00e-11
NSLGISEELKEKLRDVMVDRHKVALGKTLGE

SEQ ID NO: 45985 - protein, 33 aa, Homo sapiens
  MAP TO AL138876.3; EXPRESSED IN BRAIN, SIGNAL = 1.9; EXPRESSED IN PLACENTA, SIGNAL =   2; EXPRESSED IN ADULT LIVER, SIGNAL = 2.9; EXPRESSED IN BONE MARROW, SIGNAL = 1.5; EXPRESSED IN LUNG, SIGNAL = 1.6; EST_HUMAN HIT: H89078.1, EVALUE 3.00e-11
FGSKFVFLSITMLPESLFEIKKFSYQEATFRLS

SEQ ID NO: 45986 - protein, 33 aa, Homo sapiens
  MAP TO AL138876.3; EXPRESSED IN BRAIN, SIGNAL = 1.9; EXPRESSED IN PLACENTA, SIGNAL =   2; EXPRESSED IN ADULT LIVER, SIGNAL = 2.9; EXPRESSED IN BONE MARROW, SIGNAL = 1.5; EXPRESSED IN LUNG, SIGNAL = 1.6; EST_HUMAN HIT: H89078.1, EVALUE 6.00e-04
SDPSLSSYPSPCSLKAFLRLRNFLTRRQLSVCP

SEQ ID NO: 45987 - protein, 45 aa, Homo sapiens
  MAP TO AC021876.2; EXPRESSED IN FETAL LIVER, SIGNAL = 1.6; EXPRESSED IN PLACENTA, SIGNAL = 1.5; EXPRESSED IN BRAIN, SIGNAL = 1.5; SWISSPROT HIT: P78004, EVALUE 2.80e+00; EST_HUMAN HIT: AA427803.1, EVALUE 9.00e-19
LQELTLYNPERTITVKGNVETCAKAEEEIMKKIRESYENDIASMN

SEQ ID NO: 45988 - protein, 77 aa, Homo sapiens
  MAP TO AC020752.3; EXPRESSED IN BRAIN, SIGNAL = 1.6; EXPRESSED IN ADULT LIVER, SIGNAL = 1.8; EST_HUMAN HIT: BE181689.1, EVALUE 9.60e+00; SWISSPROT HIT: Q18775, EVALUE 4.10e+00
IKKTWTEMDQETQKKNCKYTKLSIGRMEMLKKFIKHLQHPIGCCWLLALIISFNLHNSEEYHYPDFSVKKNEIQRSK

SEQ ID NO: 45989 - protein, 84 aa, Homo sapiens
  MAP TO AC008392.3; EXPRESSED IN PLACENTA, SIGNAL = 1.8; EXPRESSED IN FETAL LIVER, SIGNAL = 1.8; EXPRESSED IN HELA, SIGNAL = 1.7; EXPRESSED IN ADULT LIVER, SIGNAL = 1.9; EXPRESSED IN BRAIN, SIGNAL = 1.6; EST_HUMAN HIT: AW050753.1, EVALUE 1.40e+00; SWISSPROT HIT: Q58660, EVALUE 2.30e+00
VLLLELHSRSEFLVRVKRILGKRPDQKEIAVLEDLSPGWNKTHSGRGERATWRRILLRQRRPETRNVGFGQWAEVVGIGEWAVV

SEQ ID NO: 45990 - protein, 51 aa, Homo sapiens
  MAP TO AL121694.3; EXPRESSED IN BRAIN, SIGNAL = 1.6; EXPRESSED IN HELA, SIGNAL = 1.7; EXPRESSED IN ADULT LIVER, SIGNAL = 1.4; EXPRESSED IN FETAL LIVER, SIGNAL = 1.6; EXPRESSED IN BONE MARROW, SIGNAL = 1.7; SWISSPROT HIT: O55131, EVALUE 2.70e+00
EDVKQELQQLRDQESKKNKDHFETLKNLENGFYINDQKADLLLLENKKLKE

SEQ ID NO: 45991 - protein, 127 aa, Homo sapiens
  MAP TO AL158801.1; EXPRESSED IN BRAIN, SIGNAL = 1.5; EXPRESSED IN BONE MARROW, SIGNAL = 2.1; EXPRESSED IN LUNG, SIGNAL = 3.3; EST_HUMAN HIT: R25686.1, EVALUE 2.00e-29; SWISSPROT HIT: P27487, EVALUE 1.20e+00
ENNDQLLKGHNPQIQTPQDSPECQVPPRRLSLFCLHQPECYLQAILCPHFDGSCYSLRGSQAHAGPAASGTQTPTWLPCQGHGLVRSVVHQPQDFPFLWVLHKLLGQNRTQTLQAHLWIGQKTSQLQ

SEQ ID NO: 45992 - protein, 51 aa, Homo sapiens
  MAP TO AC004554.1; EXPRESSED IN ADULT LIVER, SIGNAL = 1.6; EXPRESSED IN FETAL LIVER, SIGNAL = 1.6; EXPRESSED IN BRAIN, SIGNAL = 1.3; EST_HUMAN HIT: BE328303.1, EVALUE 7.00e-08; SWISSPROT HIT: Q57727, EVALUE 1.60e+00
GIFNEWYLVMVLLGISLTVDDADHIFMYLLAILISSLVKGLFKTFAHFLKI

SEQ ID NO: 45993 - protein, 46 aa, Homo sapiens
  MAP TO AC005323.1; EXPRESSED IN PLACENTA, SIGNAL = 2.2; EXPRESSED IN BRAIN, SIGNAL = 4.6; EXPRESSED IN ADULT LIVER, SIGNAL = 1.9; EXPRESSED IN FETAL LIVER, SIGNAL = 1.7; EXPRESSED IN HELA, SIGNAL =   2; EXPRESSED IN LUNG, SIGNAL = 1.2e+02; EST_HUMAN HIT: BF339300.1, EVALUE 4.00e+00
SKVLVLCRSCYLACLKKHFKRNAAKGQASGSQMLETQLFFWSIWKT

SEQ ID NO: 45994 - protein, 50 aa, Homo sapiens
  MAP TO AC008567.3; EXPRESSED IN BRAIN, SIGNAL = 2.1; EXPRESSED IN ADULT LIVER, SIGNAL = 1.6; EXPRESSED IN PLACENTA, SIGNAL = 2.2; SWISSPROT HIT: P40877, EVALUE 4.70e+00; EST_HUMAN HIT: BF125921.1, EVALUE 1.00e-10
MLAALTHSQHLLSLGVHLATLEENFHPPLHCGSPSLGWPRLEPAPSACRE

SEQ ID NO: 45995 - protein, 41 aa, Homo sapiens
  MAP TO AC008567.3; EXPRESSED IN BRAIN, SIGNAL = 2.1; EXPRESSED IN ADULT LIVER, SIGNAL = 1.6; EXPRESSED IN PLACENTA, SIGNAL = 2.2; SWISSPROT HIT: P55067, EVALUE 8.30e+00; EST_HUMAN HIT: BF125921.1, EVALUE 8.00e-08
SLQAEGAGSSLGQPREGLPQCSGGWKFSSSVARWTPRLRRC

SEQ ID NO: 45996 - protein, 107 aa, Homo sapiens
  MAP TO AC018506.3; EXPRESSED IN BRAIN, SIGNAL = 1.5; EXPRESSED IN PLACENTA, SIGNAL = 1.5; EXPRESSED IN BONE MARROW, SIGNAL = 2.1; EXPRESSED IN LUNG, SIGNAL = 4.5; SWISSPROT HIT: O14576, EVALUE 5.60e+00; EST_HUMAN HIT: AA311854.1, EVALUE 6.00e-28
DIAAEKLVPKPPPAKPSRPRPKSRISRYRTSSAQRLKRQKQANAQQAELSQAALEEGGSNSLVTPTEAGSLDSSGENRPLTGSDPTVVSITGSHVNRAASKYPKTKK

SEQ ID NO: 45997 - protein, 25 aa, Homo sapiens
  MAP TO AC012614.3; EXPRESSED IN BRAIN, SIGNAL = 1.7; EXPRESSED IN PLACENTA, SIGNAL = 1.7; EXPRESSED IN BONE MARROW, SIGNAL =  50; EXPRESSED IN ADULT LIVER, SIGNAL = 1.7; EXPRESSED IN FETAL LIVER, SIGNAL = 1.7; EXPRESSED IN HELA, SIGNAL = 1.8
DYYKDGEIAAKKKKKAQGVDDATDQ

SEQ ID NO: 45998 - protein, 35 aa, Homo sapiens
  MAP TO AL109758.1; EXPRESSED IN BRAIN, SIGNAL = 1.4; EXPRESSED IN ADULT LIVER, SIGNAL = 1.7; EXPRESSED IN HELA, SIGNAL =   2; EXPRESSED IN FETAL LIVER, SIGNAL = 1.7; EST_HUMAN HIT: R91638.1, EVALUE 9.00e-13; SWISSPROT HIT: P37339, EVALUE 2.20e-02
GPAGVRAQALDRDGNLVEDFVFDAGVGDIGNRILH

SEQ ID NO: 45999 - protein, 30 aa, Homo sapiens
  MAP TO AL109758.1; EXPRESSED IN BRAIN, SIGNAL = 1.4; EXPRESSED IN ADULT LIVER, SIGNAL = 1.7; EXPRESSED IN HELA, SIGNAL =   2; EXPRESSED IN FETAL LIVER, SIGNAL = 1.7
PDFHLYPGPGLLLQLGPCKSKRWESADSKT

SEQ ID NO: 46000 - protein, 58 aa, Homo sapiens
  MAP TO AL135798.5; EXPRESSED IN BRAIN, SIGNAL = 1.6; EXPRESSED IN PLACENTA, SIGNAL = 1.7; EXPRESSED IN LUNG, SIGNAL = 1.6; EXPRESSED IN ADULT LIVER, SIGNAL = 1.8; SWISSPROT HIT: Q9ZB73, EVALUE 9.10e-01
ESFCLGDIILEANVLRIEKGRRLDVTFKYKLFHSVPIFKPLYYIKHILLTKPNIEPIS

SEQ ID NO: 46001 - protein, 17 aa, Homo sapiens
  MAP TO AL135798.5; EXPRESSED IN BRAIN, SIGNAL = 1.6; EXPRESSED IN PLACENTA, SIGNAL = 1.7; EXPRESSED IN LUNG, SIGNAL = 1.6; EXPRESSED IN ADULT LIVER, SIGNAL = 1.8
GILLPGRYNSGSECSAN

SEQ ID NO: 46002 - protein, 23 aa, Homo sapiens
  MAP TO AC008132.34; EXPRESSED IN FETAL LIVER, SIGNAL = 1.6; EXPRESSED IN BRAIN, SIGNAL = 1.5; EXPRESSED IN PLACENTA, SIGNAL = 1.4; EXPRESSED IN ADULT LIVER, SIGNAL = 1.6; EXPRESSED IN LUNG, SIGNAL = 1.7; EST_HUMAN HIT: AW611477.1, EVALUE 5.00e-08
NLTTMCTPGLPWPRMPSSAWRLG

SEQ ID NO: 46003 - protein, 38 aa, Homo sapiens
  MAP TO AC008132.34; EXPRESSED IN FETAL LIVER, SIGNAL = 1.6; EXPRESSED IN BRAIN, SIGNAL = 1.5; EXPRESSED IN PLACENTA, SIGNAL = 1.4; EXPRESSED IN ADULT LIVER, SIGNAL = 1.6; EXPRESSED IN LUNG, SIGNAL = 1.7; EST_HUMAN HIT: AI222095.1, EVALUE 9.00e-05
WVQQSHEEEVSGAGPAGRGPGAGHCRPLSLAALGLQGT

SEQ ID NO: 46004 - protein, 47 aa, Homo sapiens
  MAP TO AC006946.20; EXPRESSED IN LUNG, SIGNAL = 2.3; EXPRESSED IN BRAIN, SIGNAL = 1.4; EST_HUMAN HIT: BE266878.1, EVALUE 1.20e-01; SWISSPROT HIT: P42759, EVALUE 7.20e-01
AEEQTLCLFPTLEQPGGLIVPWALTAPLPDGVVPHSPGVWSGPPGKT

SEQ ID NO: 46005 - protein, 81 aa, Homo sapiens
  MAP TO AL133375.3; EXPRESSED IN BRAIN, SIGNAL = 1.4; EXPRESSED IN ADULT LIVER, SIGNAL = 1.7; EST_HUMAN HIT: AI525165.1, EVALUE 1.00e-21; SWISSPROT HIT: Q14999, EVALUE 4.00e-11
LETPIIQGQDGSPELLIRSLVGGPSAELLLDLERVLCREGSPGGAVRPLLKRLQQETQPFLLLLRTLDAPGPNKTLLLSVL

SEQ ID NO: 46006 - protein, 19 aa, Homo sapiens
  MAP TO AL133375.3; EXPRESSED IN BRAIN, SIGNAL = 1.4; EXPRESSED IN ADULT LIVER, SIGNAL = 1.7; EST_HUMAN HIT: AI525165.1, EVALUE 9.00e-04
NYSWTWSVCCAVRAAPEVP

SEQ ID NO: 46007 - protein, 33 aa, Homo sapiens
  MAP TO AC020912.3; EXPRESSED IN PLACENTA, SIGNAL = 1.7; EXPRESSED IN BRAIN, SIGNAL = 1.4; EXPRESSED IN ADULT LIVER, SIGNAL = 1.4; EXPRESSED IN FETAL LIVER, SIGNAL = 1.7; EST_HUMAN HIT: AI208733.1, EVALUE 1.00e-03
PSGRIPEEDIATTGIARGDSSMHVIAPEDLPVG

SEQ ID NO: 46008 - protein, 89 aa, Homo sapiens
  MAP TO AC018552.2; EXPRESSED IN BRAIN, SIGNAL = 1.8; EXPRESSED IN PLACENTA, SIGNAL = 2.4; EXPRESSED IN LUNG, SIGNAL = 1.8; EST_HUMAN HIT: AL121415.1, EVALUE 8.00e-37
CWIRDSLVSYITNLGLFSLVFLFNMAMLATMVVQILRLRPHTQKWSHVLTLLGLSLVLGLPWALIFFSFASGTFQLVVLYLFSIITSFQ

SEQ ID NO: 46009 - protein, 22 aa, Homo sapiens
  MAP TO AC018552.2; EXPRESSED IN BRAIN, SIGNAL = 1.8; EXPRESSED IN PLACENTA, SIGNAL = 2.4; EXPRESSED IN LUNG, SIGNAL = 1.8
WIILKTNMTTTAQEMLPVLATR

SEQ ID NO: 46010 - protein, 80 aa, Homo sapiens
  MAP TO AC018836.2; EXPRESSED IN BRAIN, SIGNAL =   2; EXPRESSED IN FETAL LIVER, SIGNAL = 1.6; EXPRESSED IN ADULT LIVER, SIGNAL = 2.3; EXPRESSED IN BONE MARROW, SIGNAL = 1.7; EXPRESSED IN LUNG, SIGNAL = 2.5; EXPRESSED IN PLACENTA, SIGNAL = 1.8; EST_HUMAN HIT: AA485732.1, EVALUE 2.10e-01; SWISSPROT HIT: P90838, EVALUE 3.10e+00
DCSYSFSFHAYYLNAHYAPDTVLGAHDQGEAPALELHCGTGAGQEQVSNAEAVDFQKVMQTLGILNIGERNRAATGGNSI

SEQ ID NO: 46011 - protein, 45 aa, Homo sapiens
  MAP TO AC013528.3; EXPRESSED IN PLACENTA, SIGNAL = 1.9; EXPRESSED IN BRAIN, SIGNAL = 1.4; SWISSPROT HIT: Q9ZD10, EVALUE 2.80e+00
MLISEYLQNHEFKHKENKKIDAQHCGYFIMKDSIAPMLSERKDLT

SEQ ID NO: 46012 - protein, 78 aa, Homo sapiens
  MAP TO AL157885.2; EXPRESSED IN BRAIN, SIGNAL = 1.3; EXPRESSED IN FETAL LIVER, SIGNAL = 1.7; EXPRESSED IN ADULT LIVER, SIGNAL = 1.4; EXPRESSED IN LUNG, SIGNAL = 1.7; EST_HUMAN HIT: AI681749.1, EVALUE 2.00e-25; SWISSPROT HIT: P22897, EVALUE 4.00e-18
MIIVTSLSDILIQALSSEFNFNCFLNAKFLFVCFAFFKNIGLTSSLTSGLWIGLNSLSFNSGWQWSDRSPFRYLNWLP

SEQ ID NO: 46013 - protein, 49 aa, Homo sapiens
  MAP TO AC011836.3; EXPRESSED IN BRAIN, SIGNAL =  12; EST_HUMAN HIT: T05541.1, EVALUE 4.00e-22; SWISSPROT HIT: Q12860, EVALUE 3.00e-23
PPIIEGNMEAARAVDLIPWMEYEFRVVATNTLGRGEPSIPSNRIKTDGA

SEQ ID NO: 46014 - protein, 76 aa, Homo sapiens
  MAP TO AC013533.3; EXPRESSED IN BRAIN, SIGNAL = 1.4; EXPRESSED IN BONE MARROW, SIGNAL = 1.5; EXPRESSED IN LUNG, SIGNAL = 2.2; EST_HUMAN HIT: BF527371.1, EVALUE 1.00e-19; SWISSPROT HIT: P76518, EVALUE 3.30e+00
SCLTQLTSRSAQCQNVELSGLVNIVRMKTGHLQSSVLCVVPKDLVEQLLQKIHLKVVQVMLVEIGILPAPKEEVVL

SEQ ID NO: 46015 - protein, 58 aa, Homo sapiens
  MAP TO AC023490.4; EXPRESSED IN ADULT LIVER, SIGNAL = 1.5; EXPRESSED IN LUNG, SIGNAL = 2.6; EXPRESSED IN BRAIN, SIGNAL = 2.3; EXPRESSED IN PLACENTA, SIGNAL = 2.3; EXPRESSED IN BONE MARROW, SIGNAL = 1.8; EXPRESSED IN FETAL LIVER, SIGNAL = 2.2; SWISSPROT HIT: P42356, EVALUE 3.00e-24; EST_HUMAN HIT: N57357.1, EVALUE 2.00e-30
LWGFADFGFMFESSPGGNLGWEPDIKLTDEMVMIMGGKMEATPFKWFMEMCVQATWLC

SEQ ID NO: 46016 - protein, 60 aa, Homo sapiens
  MAP TO AC011478.2; EXPRESSED IN BRAIN, SIGNAL = 3.8; EXPRESSED IN HELA, SIGNAL = 1.7; EXPRESSED IN ADULT LIVER, SIGNAL = 3.4; EXPRESSED IN BONE MARROW, SIGNAL = 7.8; EXPRESSED IN FETAL LIVER, SIGNAL =   2; EXPRESSED IN LUNG, SIGNAL = 4.4; EXPRESSED IN PLACENTA, SIGNAL = 2.7; SWISSPROT HIT: Q63247, EVALUE 3.50e+00; EST_HUMAN HIT: AA468806.1, EVALUE 1.20e+00
LDTEAESPGKLTTARHRLKGVCEGWGPPLPQAQDSAITNASGPWNTSARLSLPDAQFREA

SEQ ID NO: 46017 - protein, 116 aa, Homo sapiens
  MAP TO AC009425.2; EXPRESSED IN BRAIN, SIGNAL = 1.3; SWISSPROT HIT: Q61772, EVALUE 1.00e-66; EST_HUMAN HIT: AV721376.1, EVALUE 2.00e-45
WEEISGLDENYTPIRTYQVCQVMEPNQNNWLRTNWISKGNAQRIFVELKFTLRDCNSLPGVLGTCKETFNLYYYETDYDTGRNIRENLYVKIDTIAADESFTQGDLGERKMKLNTE

SEQ ID NO: 46018 - protein, 45 aa, Homo sapiens
  MAP TO AC009425.2; EXPRESSED IN BRAIN, SIGNAL = 1.3; EST_HUMAN HIT: BE831053.1, EVALUE 1.10e-02
GKKLVVWMRTIPRYEHTRCAKSWSPTKTTGCGLTGFPKAMHKGFL

SEQ ID NO: 46019 - protein, 41 aa, Homo sapiens
  MAP TO AL158801.1; EXPRESSED IN BRAIN, SIGNAL = 1.3; EXPRESSED IN ADULT LIVER, SIGNAL = 1.5
RSRCHKFIILHESKGVKSIPLILLILFSIKQSIITLLFIIR

SEQ ID NO: 46020 - protein, 68 aa, Homo sapiens
  MAP TO AC008494.5; EXPRESSED IN BRAIN, SIGNAL = 1.9; EST_HUMAN HIT: AA357020.1, EVALUE 1.00e-07
LKEEEEKEKKHQKERQRQFKLKLLLESYTQQKKEQEEFLRLEKEIREKAEKAEKRKNAADEISRFQER

SEQ ID NO: 46021 - protein, 70 aa, Homo sapiens
  MAP TO AC011510.3; EXPRESSED IN BRAIN, SIGNAL =   2; EXPRESSED IN ADULT LIVER, SIGNAL = 1.8; EXPRESSED IN BONE MARROW, SIGNAL =   2; EXPRESSED IN FETAL LIVER, SIGNAL = 2.2; EXPRESSED IN HELA, SIGNAL = 1.7; EXPRESSED IN LUNG, SIGNAL = 4.4; EXPRESSED IN PLACENTA, SIGNAL = 2.4; EST_HUMAN HIT: BE904124.1, EVALUE 5.00e-12; SWISSPROT HIT: P30530, EVALUE 1.00e-37
AVLSNDGMGIQAGEPDPPEEPLTSQASVPPHQLRLGSLHPHTPYHIRVACTSSQGPSSWTHWLPVETPEG

SEQ ID NO: 46022 - protein, 34 aa, Homo sapiens
  MAP TO AC011510.3; EXPRESSED IN BRAIN, SIGNAL =   2; EXPRESSED IN ADULT LIVER, SIGNAL = 1.8; EXPRESSED IN BONE MARROW, SIGNAL =   2; EXPRESSED IN FETAL LIVER, SIGNAL = 2.2; EXPRESSED IN HELA, SIGNAL = 1.7; EXPRESSED IN LUNG, SIGNAL = 4.4; EXPRESSED IN PLACENTA, SIGNAL = 2.4; EST_HUMAN HIT: BE904124.1, EVALUE 7.00e-15
LCCQTMGWASRRENQTPQRSPSPRKHPCPPISFG

SEQ ID NO: 46023 - protein, 46 aa, Homo sapiens
  MAP TO AC011609.9; EXPRESSED IN BRAIN, SIGNAL = 2.7; EXPRESSED IN LUNG, SIGNAL = 2.4; EXPRESSED IN PLACENTA, SIGNAL = 1.4; EST_HUMAN HIT: AI474737.1, EVALUE 9.00e-21; SWISSPROT HIT: P32004, EVALUE 1.00e-05
IIPSNNSGTFRIPNEGHISHFQGKYRCFASNKLGIAMSEEIEFIVP

SEQ ID NO: 46024 - protein, 75 aa, Homo sapiens
  MAP TO AC011469.3; EXPRESSED IN BRAIN, SIGNAL = 1.6; EXPRESSED IN PLACENTA, SIGNAL = 1.3; EXPRESSED IN LUNG, SIGNAL = 1.7; SWISSPROT HIT: P16960, EVALUE 3.00e-27
TVMKSGPEIVKAGLRSFFESASEDIEKMVENLRLGKVSQARTQVKGVGQNLTYTTVALLPVLTTLFQHIAQHQFG

SEQ ID NO: 46025 - protein, 71 aa, Homo sapiens
  MAP TO AL138849.5; EXPRESSED IN BRAIN, SIGNAL = 1.8; EXPRESSED IN PLACENTA, SIGNAL = 2.1; EXPRESSED IN BONE MARROW, SIGNAL = 2.2; EXPRESSED IN LUNG, SIGNAL = 3.2; EXPRESSED IN ADULT LIVER, SIGNAL = 2.5; EXPRESSED IN HELA, SIGNAL = 1.7; EXPRESSED IN FETAL LIVER, SIGNAL = 1.9; SWISSPROT HIT: P75445, EVALUE 1.00e-01; EST_HUMAN HIT: AW862896.1, EVALUE 5.00e-34
IEGFDPKRMDDFQLKGIVEEKFVKWECNSSSATEKNSIAEENKAKADQPKDDTKKTETDNQSNAMKEKHGK

SEQ ID NO: 46026 - protein, 71 aa, Homo sapiens; identical to SEQ ID NO: 44759
  MAP TO AL138828.4; EXPRESSED IN BRAIN, SIGNAL = 1.5; EXPRESSED IN ADULT LIVER, SIGNAL = 1.9; EXPRESSED IN FETAL LIVER, SIGNAL =   2; EXPRESSED IN HELA, SIGNAL = 1.9; EXPRESSED IN LUNG, SIGNAL = 5.1; EST_HUMAN HIT: AA179308.1, EVALUE 2.00e-15

SEQ ID NO: 46027 - protein, 70 aa, Homo sapiens
  MAP TO AL138828.4; EXPRESSED IN BRAIN, SIGNAL = 1.5; EXPRESSED IN ADULT LIVER, SIGNAL = 1.9; EXPRESSED IN FETAL LIVER, SIGNAL =   2; EXPRESSED IN HELA, SIGNAL = 1.9; EXPRESSED IN LUNG, SIGNAL = 5.1; SWISSPROT HIT: P40497, EVALUE 3.40e+00; EST_HUMAN HIT: AI087936.1, EVALUE 4.00e-23
MTTEMMVWIIGPKEEEVVVLFNVAEGALTSKNQVAVLNGLMTNTKGMGLLKMKKRPWKIMKKRRTDARKK

SEQ ID NO: 46028 - protein, 174 aa, Homo sapiens
  MAP TO AL121716.16; EXPRESSED IN BRAIN, SIGNAL = 1.4; EST_HUMAN HIT: AL121540.1, EVALUE 1.00e-18; SWISSPROT HIT: Q9Y3R5, EVALUE 1.00e-34
LYDSSRTLYAFSAIKAILKTNPIAFVNAISTTSVNNAYTPQLSLLQNLLARHRISVMGKDFYSHIPVDSNHNFRSSMYIEILISLCLYYMRSHYPTHVKVTAQDLIGNRNMQMMSIEILTLLFTELAKVIESSAKGFPSFISDMLSKCKVQKVILHCLLSSIFSAQKWHSEKMA

SEQ ID NO: 46029 - protein, 17 aa, Homo sapiens
  MAP TO AL121716.16; EXPRESSED IN BRAIN, SIGNAL = 1.4
CMIHPGLCMLSLPSKPS

SEQ ID NO: 46030 - protein, 42 aa, Homo sapiens
  MAP TO AC004460.1; EXPRESSED IN ADULT LIVER, SIGNAL = 1.5; EXPRESSED IN BRAIN, SIGNAL = 1.6; EXPRESSED IN HELA, SIGNAL = 1.6; SWISSPROT HIT: P55461, EVALUE 6.30e+00; EST_HUMAN HIT: AW771914.1, EVALUE 9.40e-02
NKQGWLHPAPPTRRQQLVCPRMPLRVGEPCSSHSHFHCKPKA

SEQ ID NO: 46031 - protein, 89 aa, Homo sapiens
  MAP TO AL158017.2; EXPRESSED IN BRAIN, SIGNAL = 1.3; EXPRESSED IN LUNG, SIGNAL = 2.3; EXPRESSED IN PLACENTA, SIGNAL = 1.5; SWISSPROT HIT: P51805, EVALUE 6.00e-28; EST_HUMAN HIT: BE294546.1, EVALUE 1.00e-43
VQGNGQQHVEKALKLFAQLINNKVFLLTFIRTLELQRSFSMRDRGNVASLIMTGLQGRLEYATDVLKQLLSDLIDKNLENKNHPKLLLR

SEQ ID NO: 46032 - protein, 34 aa, Homo sapiens
  MAP TO AC008417.3; EXPRESSED IN BRAIN, SIGNAL = 2.1; SWISSPROT HIT: P57654, EVALUE 1.30e+00; EST_HUMAN HIT: BE061177.1, EVALUE 3.00e-04
MSIHLNIVHRDIDCLDIPSNITLVHYIDNIMLIG

SEQ ID NO: 46033 - protein, 55 aa, Homo sapiens
  MAP TO AF223391.1; EXPRESSED IN BRAIN, SIGNAL = 1.7; SWISSPROT HIT: Q15878, EVALUE 3.00e-27; EST_HUMAN HIT: BE935840.1, EVALUE 3.00e-26
RACIDFAISAKPLTRYMPQNRHTFQYRVWHFVVSPSFEYTIMAMIALNTVVLMMK

SEQ ID NO: 46034 - protein, 43 aa, Homo sapiens
  MAP TO AF223391.1; EXPRESSED IN BRAIN, SIGNAL = 1.7; EST_HUMAN HIT: BE935840.1, EVALUE 2.00e-20
GRASTSPSAPNLSPATCRRTDTPSSTACGTLWCLRPLSTPLWP

SEQ ID NO: 46035 - protein, 18 aa, Homo sapiens
  MAP TO AC010368.2; EXPRESSED IN BRAIN, SIGNAL = 1.5; EXPRESSED IN LUNG, SIGNAL = 1.7; EXPRESSED IN ADULT LIVER, SIGNAL = 1.8; EXPRESSED IN HELA, SIGNAL = 1.9; EXPRESSED IN FETAL LIVER, SIGNAL = 2.2; EST_HUMAN HIT: N94219.1, EVALUE 1.00e-03
PLATTVSWKSTRNIFLLW

SEQ ID NO: 46036 - protein, 69 aa, Homo sapiens
  MAP TO AL158017.2; EXPRESSED IN BRAIN, SIGNAL = 1.3; EXPRESSED IN LUNG, SIGNAL = 2.5; SWISSPROT HIT: P51805, EVALUE 1.00e-19; EST_HUMAN HIT: AA629363.1, EVALUE 6.00e-14
HLYKCAAQRESCGLCLKADRKFECGWCSGERRCTLHQHCTSPSSPWLDWSSHNVKCSNPQITEVSPASL

SEQ ID NO: 46037 - protein, 63 aa, Homo sapiens
  MAP TO AL158017.2; EXPRESSED IN BRAIN, SIGNAL = 1.3; EXPRESSED IN LUNG, SIGNAL = 2.5; SWISSPROT HIT: Q64127, EVALUE 5.90e+00
SISTSVQPSGRAAASASRPTGSLSVAGAAASAGAPSTSTVPALPAPGSTGPATMSSAPTLKSP

SEQ ID NO: 46038 - protein, 111 aa, Homo sapiens
  MAP TO AH009158.1; EXPRESSED IN BRAIN, SIGNAL = 4.4; SWISSPROT HIT: Q15878, EVALUE 1.00e-36; EST_HUMAN HIT: AI932384.1, EVALUE 1.30e-02
GTGSLSESSIPSVSDTSTPRRSRRQLPPVPPKPRPLLSYSSLIRHAGSISPPADGSEEGSPLTSQALESNNACLTESSNSPHPQQSQHASPQRYISEPYLALHEDSHASDC

SEQ ID NO: 46039 - protein, 35 aa, Homo sapiens
  MAP TO AH009158.1; EXPRESSED IN BRAIN, SIGNAL = 4.4
ATSPSPTWPCTKTPTPQTVVRRRRSLSKQPWLLAW

SEQ ID NO: 46040 - protein, 56 aa, Homo sapiens
  MAP TO AC013568.3; EXPRESSED IN BRAIN, SIGNAL = 1.4; EXPRESSED IN BONE MARROW, SIGNAL = 2.5; EXPRESSED IN ADULT LIVER, SIGNAL = 1.6; EST_HUMAN HIT: BF335108.1, EVALUE 3.00e-28; SWISSPROT HIT: P28191, EVALUE 8.00e-08
GREQEHTFVFRLDSARTCKHLWKCAVEHHAFFRLRTPGNSKSNRSDFIRLGSRFRF

SEQ ID NO: 46041 - protein, 37 aa, Homo sapiens
  MAP TO AL109938.8; EXPRESSED IN BRAIN, SIGNAL = 1.4; EXPRESSED IN ADULT LIVER, SIGNAL = 1.4; EXPRESSED IN HELA, SIGNAL = 1.6; EST_HUMAN HIT: BE162362.1, EVALUE 3.30e-02; SWISSPROT HIT: Q04690, EVALUE 3.70e+00
TSKLTHVVVDRPQFLRSCWPEASLCSSPVGFSTGQLE

SEQ ID NO: 46042 - protein, 141 aa, Homo sapiens
  MAP TO AC018505.3; EXPRESSED IN BRAIN, SIGNAL =   2; EXPRESSED IN BONE MARROW, SIGNAL = 1.5; EXPRESSED IN LUNG, SIGNAL = 2.2; EST_HUMAN HIT: AI380627.1, EVALUE 1.60e-02; SWISSPROT HIT: Q42510, EVALUE 3.00e-03
CVVDEMDFSTMELDEALRKFQAHIRVQGEAQKVERLIEAFRWGPGWLGLLHQGRMVSPSFRARGWTKDCIPTIPRQGQVSLNVALGVIVLAPPTFQALCRAPFSHCEVVGVEKTVPIILIVKMRKLKLKEVMIATARILAV

SEQ ID NO: 46043 - protein, 36 aa, Homo sapiens
  MAP TO AC018505.3; EXPRESSED IN BRAIN, SIGNAL =   2; EXPRESSED IN BONE MARROW, SIGNAL = 1.5; EXPRESSED IN LUNG, SIGNAL = 2.2
ASWTRWTSLPWSWMRPSGNSRRTSVSKGRLRKWSGS

SEQ ID NO: 46044 - protein, 64 aa, Homo sapiens
  MAP TO AC000134.14; EXPRESSED IN BRAIN, SIGNAL = 1.7; EXPRESSED IN PLACENTA, SIGNAL = 1.5; EXPRESSED IN ADULT LIVER, SIGNAL = 1.6; EXPRESSED IN BONE MARROW, SIGNAL = 1.5; EXPRESSED IN FETAL LIVER, SIGNAL = 1.6; EXPRESSED IN LUNG, SIGNAL = 4.9; SWISSPROT HIT: Q61282, EVALUE 1.20e+00; EST_HUMAN HIT: BF680541.1, EVALUE 3.00e-01
SEAMRGRQRAERAGGDGKEDSVKHSVSQSSGAVGGTGRYPWSGEKTIHAMQNVGDMEPGTLKAE

SEQ ID NO: 46045 - protein, 21 aa, Homo sapiens
  MAP TO AC000134.14; EXPRESSED IN BRAIN, SIGNAL = 1.7; EXPRESSED IN PLACENTA, SIGNAL = 1.5; EXPRESSED IN ADULT LIVER, SIGNAL = 1.6; EXPRESSED IN BONE MARROW, SIGNAL = 1.5; EXPRESSED IN FETAL LIVER, SIGNAL = 1.6; EXPRESSED IN LUNG, SIGNAL = 4.9
QRPCGAGSGQRGQGVTGRKTV

SEQ ID NO: 46046 - protein, 107 aa, Homo sapiens
  MAP TO AL121716.16; EXPRESSED IN BRAIN, SIGNAL = 2.4; EXPRESSED IN BONE MARROW, SIGNAL = 1.7; EXPRESSED IN ADULT LIVER, SIGNAL = 1.8; EXPRESSED IN PLACENTA, SIGNAL = 2.2; EST_HUMAN HIT: AA625526.1, EVALUE 6.00e-13
SQVQLITSKGNGEKPLTMDEIENFSLTVNPLSDRLSLLSTSSETIPMVVSDFDLPDQQIEILQSSDSGCSQSSAGDNLSYEVDPETVNAQEDSQMPKESSPDDDVQQ

SEQ ID NO: 46047 - protein, 80 aa, Homo sapiens
  MAP TO AL158017.2; EXPRESSED IN BRAIN, SIGNAL = 1.7; EXPRESSED IN PLACENTA, SIGNAL = 1.5; EXPRESSED IN LUNG, SIGNAL = 3.7; EST_HUMAN HIT: BE312887.1, EVALUE 7.00e-39; SWISSPROT HIT: P51805, EVALUE 3.00e-15
VCKVVNTTTLTCLAPSLTTDYRPGLDTVERPDEFGFVFNNVQSLLIYNDTKFIYYPNPTFELLSPTGVLDQKPGSPIILK

SEQ ID NO: 46048 - protein, 103 aa, Homo sapiens
  MAP TO AL138498.2; EXPRESSED IN BRAIN, SIGNAL = 1.5; SWISSPROT HIT: Q91289, EVALUE 5.50e+00; EST_HUMAN HIT: W21826.1, EVALUE 6.00e-46
MIPPTSKTFLVNNLAAGTMYDLCVLAIYDDGITSLTATRVVGCIQFTTEQDYVRCHFMQSQFLGGTMIIIIGGIIVASVLVFIIILMIRYKVCNNNGQHKVTK

SEQ ID NO: 46049 - protein, 64 aa, Homo sapiens
  MAP TO AC018388.4; EXPRESSED IN ADULT LIVER, SIGNAL = 1.5; EXPRESSED IN BONE MARROW, SIGNAL = 1.8; EXPRESSED IN BRAIN, SIGNAL = 1.6; EXPRESSED IN PLACENTA, SIGNAL =   2; EST_HUMAN HIT: BF218650.1, EVALUE 3.90e-01; SWISSPROT HIT: P18174, EVALUE 2.00e+00
TKLQWLCEELKERENREKNLRHQLMLCRQQLRNLTENKESELQCLFQQIERQEQLLDEIHREKR

SEQ ID NO: 46050 - protein, 39 aa, Homo sapiens
  MAP TO AL034423.18; EXPRESSED IN BRAIN, SIGNAL = 1.5; EXPRESSED IN PLACENTA, SIGNAL = 1.7; EXPRESSED IN LUNG, SIGNAL = 1.8; EST_HUMAN HIT: BE909483.1, EVALUE 1.00e-07
QAPPGVVLCDPVLQPHRPQPGPSPAAGPLGGHTPRHTRC

SEQ ID NO: 46051 - protein, 93 aa, Homo sapiens
  MAP TO AC007686.5; EXPRESSED IN BRAIN, SIGNAL = 2.1; EXPRESSED IN BONE MARROW, SIGNAL =  39; EXPRESSED IN LUNG, SIGNAL = 3.3; SWISSPROT HIT: Q02224, EVALUE 2.00e+00; EST_HUMAN HIT: AW466922.1, EVALUE 6.00e-39
SEQRQSKHRRFQNTLVVLHKSGLLEITLKTKELIRQNQATQVELDQLKEQTQLFIEATKSRAPQAWAKLQASLTPGSSNTGSDLEAFSDHPAI

SEQ ID NO: 46052 - protein, 51 aa, Homo sapiens
  MAP TO AC010931.5; EXPRESSED IN BRAIN, SIGNAL = 2.9; EXPRESSED IN PLACENTA, SIGNAL =   2; EXPRESSED IN ADULT LIVER, SIGNAL = 1.9; EXPRESSED IN HELA, SIGNAL = 2.1; EXPRESSED IN LUNG, SIGNAL = 3.3; SWISSPROT HIT: Q08379, EVALUE 4.00e-10; EST_HUMAN HIT: AI073403.1, EVALUE 6.00e-14
VKLLELQELVLPLVGNHEGHGKFLIAAQNPADEPTPGAPAPQELGAAGEQD

SEQ ID NO: 46053 - protein, 80 aa, Homo sapiens
  MAP TO AC017079.2; EXPRESSED IN BRAIN, SIGNAL = 1.3; SWISSPROT HIT: P07397, EVALUE 3.00e-01; EST_HUMAN HIT: AU139468.1, EVALUE 2.00e-19
QYDSRFPFCEQKSSNNVRISMINNPAKEISYENTQISRAIWAALQTQTSNAAKNFITKMAKEGAAEALAAGADIAEFSVG

SEQ ID NO: 46054 - protein, 91 aa, Homo sapiens
  MAP TO AC010636.3; EXPRESSED IN BRAIN, SIGNAL =   2; EXPRESSED IN BONE MARROW, SIGNAL =   3; EXPRESSED IN LUNG, SIGNAL = 2.4; EXPRESSED IN FETAL LIVER, SIGNAL = 1.9; SWISSPROT HIT: O35681, EVALUE 3.30e+00; EST_HUMAN HIT: AV738764.1, EVALUE 6.00e-11
QRLITSTVTQGLRGRGLKHYPIRDGGLETIQSGTQLERRGRFPGLVRPLSLAAVRAPGLVLLLKAQAVWPRVLQVLGDPQLRHRDLLEAKN

SEQ ID NO: 46055 - protein, 164 aa, Homo sapiens
  MAP TO AC005137.1; EXPRESSED IN PLACENTA, SIGNAL = 1.4; EXPRESSED IN BRAIN, SIGNAL = 2.8; EXPRESSED IN ADULT LIVER, SIGNAL = 1.5; EXPRESSED IN LUNG, SIGNAL =   2; EXPRESSED IN BONE MARROW, SIGNAL = 1.6; SWISSPROT HIT: Q92793, EVALUE 6.60e-01; EST_HUMAN HIT: BF698352.1, EVALUE 7.90e-02
VEPAVWVPTEALGNETLPPSQGLPTPSDEEPQLSQESPRTPTHRPALTPAAPLTTALNPPVTATEEPVVSPGPTQTTLQQPLELTASQLPAGPTESPASKGVTASLLAIPHTPESSSLPVALQTPTPGMVSGAMETTRVTVIFAGSPNITVSSRSPPAPRFPLM

SEQ ID NO: 46056 - protein, 92 aa, Homo sapiens
  MAP TO AC018711.2; EXPRESSED IN BRAIN, SIGNAL = 1.3; EXPRESSED IN LUNG, SIGNAL = 1.8; EST_HUMAN HIT: BF025947.1, EVALUE 1.00e-07; SWISSPROT HIT: P34547, EVALUE 1.00e-02
VLQTRLVDAAKALNLVHCHCLDIFINQAFDMQRDLQITPKRLEYTRKKENELYESLMNIANRKQEEMKDMIVETLNTMKEELLDDATNMEFK

SEQ ID NO: 46057 - protein, 40 aa, Homo sapiens
  MAP TO AL049555.6; EXPRESSED IN BRAIN, SIGNAL = 4.6; EXPRESSED IN PLACENTA, SIGNAL = 1.4; EXPRESSED IN FETAL LIVER, SIGNAL = 1.9; EXPRESSED IN HELA, SIGNAL = 1.9; SWISSPROT HIT: P56117, EVALUE 3.70e+00; EST_HUMAN HIT: BE543311.1, EVALUE 4.00e-05
VIALVMDIFTDVDIFKEIVEASTRGVSVYILLDESNFNHF

SEQ ID NO: 46058 - protein, 76 aa, Homo sapiens
  MAP TO AC018507.2; EXPRESSED IN FETAL LIVER, SIGNAL = 1.6; EXPRESSED IN PLACENTA, SIGNAL = 2.1; EXPRESSED IN BRAIN, SIGNAL = 2.2; EXPRESSED IN LUNG, SIGNAL =   2; EXPRESSED IN ADULT LIVER, SIGNAL = 1.5; SWISSPROT HIT: Q08619, EVALUE 1.50e+00; EST_HUMAN HIT: AW955834.1, EVALUE 1.00e-35
MQVSIACTEHNLKSRNGEDRLLSKQSSTAPNVVNAARAKFRTVAIIARSLGTFTPQHHISLKESTAKQTGMKYRYA

SEQ ID NO: 46059 - protein, 43 aa, Homo sapiens
  MAP TO AC008481.4; EXPRESSED IN BRAIN, SIGNAL = 1.3; EXPRESSED IN BONE MARROW, SIGNAL = 2.8; EXPRESSED IN FETAL LIVER, SIGNAL = 2.8; EXPRESSED IN LUNG, SIGNAL = 3.1; EST_HUMAN HIT: AA081735.1, EVALUE 6.00e-07
WKWIIIKVFILIVFTLSKLRRRRKRRGWSCCLRGGRGRRGGGG

SEQ ID NO: 46060 - protein, 34 aa, Homo sapiens
  MAP TO AC007500.2; EXPRESSED IN BONE MARROW, SIGNAL = 1.5; EXPRESSED IN PLACENTA, SIGNAL = 1.6; EXPRESSED IN BRAIN, SIGNAL = 1.6; EXPRESSED IN ADULT LIVER, SIGNAL = 1.5; EXPRESSED IN FETAL LIVER, SIGNAL = 1.5; EXPRESSED IN LUNG, SIGNAL =   2
LTPRFWWSVLFSLHLLTQLILFLLVFILFFTLIQ

SEQ ID NO: 46061 - protein, 114 aa, Homo sapiens
  MAP TO AC009330.5; EXPRESSED IN PLACENTA, SIGNAL = 1.8; EXPRESSED IN BRAIN, SIGNAL = 1.6; EXPRESSED IN ADULT LIVER, SIGNAL =   2; EXPRESSED IN FETAL LIVER, SIGNAL = 2.1; EXPRESSED IN HELA, SIGNAL =   2; EXPRESSED IN LUNG, SIGNAL = 2.2; SWISSPROT HIT: P10272, EVALUE 4.00e-24; EST_HUMAN HIT: AV693656.1, EVALUE 3.00e-63
TRLLLKDIIPRFGLPLTLGSDNGPAFMAEVVQQLSQLLKIKWKLHIVYHPQSSGKVQWMNQTLKHLLKFCQEPHLRWDQVLPMAFLQVRCTLTKLTGLSPCEIVFGRPPPIINQ

SEQ ID NO: 46062 - protein, 43 aa, Homo sapiens
  MAP TO AL135905.2; EXPRESSED IN BRAIN, SIGNAL = 1.7; EXPRESSED IN PLACENTA, SIGNAL = 1.6; EXPRESSED IN ADULT LIVER, SIGNAL = 2.3; EXPRESSED IN FETAL LIVER, SIGNAL = 5.1; EXPRESSED IN HELA, SIGNAL = 7.1; EXPRESSED IN BONE MARROW, SIGNAL = 1.5; EXPRESSED IN LUNG, SIGNAL = 2.3; SWISSPROT HIT: P35831, EVALUE 5.50e-01; EST_HUMAN HIT: R61674.1, EVALUE 4.00e-21
DWPFDDGAPPSNQIVDDWLSLVKIKFREEPGCCIAVHCVAGLG

SEQ ID NO: 46063 - protein, 18 aa, Homo sapiens
  MAP TO AL135905.2; EXPRESSED IN BRAIN, SIGNAL = 1.7; EXPRESSED IN PLACENTA, SIGNAL = 1.6; EXPRESSED IN ADULT LIVER, SIGNAL = 2.3; EXPRESSED IN FETAL LIVER, SIGNAL = 5.1; EXPRESSED IN HELA, SIGNAL = 7.1; EXPRESSED IN BONE MARROW, SIGNAL = 1.5; EXPRESSED IN LUNG, SIGNAL = 2.3; EST_HUMAN HIT: BE004518.1, EVALUE 2.00e-03
IGLLMMVHHHPTRLLMTG

SEQ ID NO: 46064 - protein, 57 aa, Homo sapiens
  MAP TO AL138688.11; EXPRESSED IN ADULT LIVER, SIGNAL = 1.5; EXPRESSED IN BRAIN, SIGNAL = 1.5; EXPRESSED IN PLACENTA, SIGNAL = 3.2; EST_HUMAN HIT: AL045342.1, EVALUE 4.00e-25; SWISSPROT HIT: Q14202, EVALUE 5.00e-08
VPVPVFLPAPLDSSEKIPAAIEELKSKVSSDALDTELLTMTDMMSEDEGKTETTNIN

SEQ ID NO: 46065 - protein, 54 aa, Homo sapiens
  MAP TO AC018505.3; EXPRESSED IN BRAIN, SIGNAL = 1.6; EXPRESSED IN ADULT LIVER, SIGNAL = 1.8; EXPRESSED IN FETAL LIVER, SIGNAL = 1.7; EXPRESSED IN HELA, SIGNAL = 1.8; SWISSPROT HIT: P38570, EVALUE 2.70e+00
NYCIPTRISQAGKQGLREAACYTNSQCLSSTYCSWGKLTGIVSWKLQNVSKSHV

SEQ ID NO: 46066 - protein, 36 aa, Homo sapiens
  MAP TO AC007221.2; EXPRESSED IN FETAL LIVER, SIGNAL = 1.8; EXPRESSED IN ADULT LIVER, SIGNAL = 1.7; EXPRESSED IN BONE MARROW, SIGNAL = 1.5; EXPRESSED IN BRAIN, SIGNAL = 1.5; EST_HUMAN HIT: R70255.1, EVALUE 1.00e-05
VLHISETIDIIWSEGLHEKLTHQEMRFPSPDDFILL

SEQ ID NO: 46067 - protein, 19 aa, Homo sapiens
  MAP TO AC007221.2; EXPRESSED IN FETAL LIVER, SIGNAL = 1.8; EXPRESSED IN ADULT LIVER, SIGNAL = 1.7; EXPRESSED IN BONE MARROW, SIGNAL = 1.5; EXPRESSED IN BRAIN, SIGNAL = 1.5
SYISVKLLTSSGLKASMRN

SEQ ID NO: 46068 - protein, 106 aa, Homo sapiens
  MAP TO AC009263.6; EXPRESSED IN PLACENTA, SIGNAL = 1.5; EXPRESSED IN BRAIN, SIGNAL = 1.3; EST_HUMAN HIT: BE957781.2, EVALUE 1.50e-01
QMISLVSPSPAVMAVMENDDICMVLCVKVMDEPNHSGWNPSQGCSRSSLCCQLALLPSPMELGHSPAYLLGSPDKCACLFSRLTKWKHRESRDFLLFTAVYLQLTE

SEQ ID NO: 46069 - protein, 45 aa, Homo sapiens
  MAP TO AC007955.4; EXPRESSED IN BRAIN, SIGNAL = 1.3; EXPRESSED IN PLACENTA, SIGNAL = 1.6; SWISSPROT HIT: Q27178, EVALUE 4.80e+00; EST_HUMAN HIT: AI218001.1, EVALUE 3.00e-03
MAPWHFRTQQKQAIETRKNSSHPYTPEEAIKPSYEPLIPAESSLY

SEQ ID NO: 46070 - protein, 26 aa, Homo sapiens
  MAP TO AC007514.5; EXPRESSED IN PLACENTA, SIGNAL = 2.2; EXPRESSED IN ADULT LIVER, SIGNAL = 1.5; EXPRESSED IN FETAL LIVER, SIGNAL = 1.7; EXPRESSED IN HELA, SIGNAL = 1.7; EXPRESSED IN BRAIN, SIGNAL = 1.3
KNNNSNNNNNNYYYYYYCYFSFYQEY

SEQ ID NO: 46071 - protein, 53 aa, Homo sapiens
  MAP TO AC007608.2; EXPRESSED IN BRAIN, SIGNAL = 1.3; EXPRESSED IN PLACENTA, SIGNAL = 1.7; EXPRESSED IN ADULT LIVER, SIGNAL = 1.5; SWISSPROT HIT: P36639, EVALUE 8.00e+00; EST_HUMAN HIT: AI886823.1, EVALUE 5.70e-01
CSASSPKLLKIHLCGTSSIQGTPSLLTRGFHLISSWTSYRQDTMLKSSQDTTR

SEQ ID NO: 46072 - protein, 30 aa, Homo sapiens; identical to SEQ ID NO: 37714
  MAP TO AL034380.25; EXPRESSED IN BRAIN, SIGNAL = 1.3; EXPRESSED IN BONE MARROW, SIGNAL = 1.7; EST_HUMAN HIT: AA705222.1, EVALUE 3.00e-11

SEQ ID NO: 46073 - protein, 45 aa, Homo sapiens
  MAP TO AL034380.25; EXPRESSED IN BRAIN, SIGNAL = 1.3; EXPRESSED IN BONE MARROW, SIGNAL = 1.7; EST_HUMAN HIT: AA705222.1, EVALUE 5.00e-19; SWISSPROT HIT: Q12499, EVALUE 3.20e-01
EEEKKQNSQKFVARHQVRDNRDPKKQKAVEKERGNQIQKQKPFLW

SEQ ID NO: 46074 - protein, 70 aa, Homo sapiens
  MAP TO AC008752.3; EXPRESSED IN BRAIN, SIGNAL = 2.7; EXPRESSED IN PLACENTA, SIGNAL = 1.4; EXPRESSED IN BONE MARROW, SIGNAL =   2; EXPRESSED IN FETAL LIVER, SIGNAL = 1.6; EXPRESSED IN LUNG, SIGNAL = 3.4; EST_HUMAN HIT: BF314489.1, EVALUE 2.00e-28; SWISSPROT HIT: Q13526, EVALUE 2.00e-29
RVYYFNHITNASQWERPSGNSSSGGKNGQGEPARVRCSHLLVKHSQSRRPSSWRQEKITRTKEEALELIN

SEQ ID NO: 46075 - protein, 42 aa, Homo sapiens
  MAP TO AC008752.3; EXPRESSED IN BRAIN, SIGNAL = 2.7; EXPRESSED IN PLACENTA, SIGNAL = 1.4; EXPRESSED IN BONE MARROW, SIGNAL =   2; EXPRESSED IN FETAL LIVER, SIGNAL = 1.6; EXPRESSED IN LUNG, SIGNAL = 3.4; EST_HUMAN HIT: BE797127.1, EVALUE 1.00e-07
AECTTSTTSLTPASGSGPAATAAVVAKTGRGSLPGSAARTCW

SEQ ID NO: 46076 - protein, 54 aa, Homo sapiens
  MAP TO AC008430.3; EXPRESSED IN BRAIN, SIGNAL = 1.7; EXPRESSED IN HELA, SIGNAL = 1.9; EXPRESSED IN LUNG, SIGNAL = 2.1; SWISSPROT HIT: P79385, EVALUE 1.00e-11; EST_HUMAN HIT: AA112613.1, EVALUE 1.00e-18
CSGPLGIEGGIISNQQITASSTHRALFGLQKWYPYYARLNKKGLINAWTAAEND

SEQ ID NO: 46077 - protein, 45 aa, Homo sapiens
  MAP TO AC008430.3; EXPRESSED IN BRAIN, SIGNAL = 1.7; EXPRESSED IN HELA, SIGNAL = 1.9; EXPRESSED IN LUNG, SIGNAL = 2.1; EST_HUMAN HIT: AA112613.1, EVALUE 8.00e-12
NAQAHWELKVELYQTSKSQLPLLTELFLDSKNGIPTMHVLIRRGL

SEQ ID NO: 46078 - protein, 21 aa, Homo sapiens
  MAP TO AC011462.3; EXPRESSED IN BRAIN, SIGNAL = 1.8; EXPRESSED IN ADULT LIVER, SIGNAL = 1.5; EXPRESSED IN LUNG, SIGNAL =   2; EST_HUMAN HIT: BF206112.1, EVALUE 6.00e-05
SSSSFHLWMTSPSSQGPRRSL

SEQ ID NO: 46079 - protein, 44 aa, Homo sapiens
  MAP TO AC009263.6; EXPRESSED IN BRAIN, SIGNAL = 1.5; EXPRESSED IN BONE MARROW, SIGNAL = 1.5; EXPRESSED IN LUNG, SIGNAL = 3.3; EXPRESSED IN PLACENTA, SIGNAL = 4.2; SWISSPROT HIT: P33665, EVALUE 8.20e+00; EST_HUMAN HIT: BF340825.1, EVALUE 1.00e-14
HPRPSAARTAMEVLESGEQGVLQWDRKLSELSEPGDGEALMYHT

SEQ ID NO: 46080 - protein, 63 aa, Homo sapiens
  MAP TO AL135745.2; EXPRESSED IN BRAIN, SIGNAL = 2.8; EXPRESSED IN BONE MARROW, SIGNAL = 1.6; EXPRESSED IN FETAL LIVER, SIGNAL = 3.1; EXPRESSED IN LUNG, SIGNAL = 5.6; EXPRESSED IN PLACENTA, SIGNAL = 1.5; SWISSPROT HIT: P03873, EVALUE 2.60e+00; EST_HUMAN HIT: BE564327.1, EVALUE 7.70e+00
SKDIIMMNKQLLVYIMCKTLARHQENTQREYIIYTRMIYYLEEIRYMHLNTYIHFNKQIKTTR

SEQ ID NO: 46081 - protein, 40 aa, Homo sapiens
  MAP TO AC011455.3; EXPRESSED IN BRAIN, SIGNAL = 3.7; EXPRESSED IN BONE MARROW, SIGNAL = 1.6; EXPRESSED IN LUNG, SIGNAL = 2.8; SWISSPROT HIT: P53686, EVALUE 1.00e-02; EST_HUMAN HIT: BE798693.1, EVALUE 8.00e-18
TLERIAGLEQEDLVEAHGTFYTSHCVSASCRHEYPLSWMK

SEQ ID NO: 46082 - protein, 57 aa, Homo sapiens
  MAP TO AC004554.1; EXPRESSED IN LUNG, SIGNAL = 3.6; EXPRESSED IN ADULT LIVER, SIGNAL = 1.5; EXPRESSED IN BRAIN, SIGNAL = 2.5; EXPRESSED IN FETAL LIVER, SIGNAL = 1.9; EXPRESSED IN BONE MARROW, SIGNAL = 4.5; SWISSPROT HIT: Q23356, EVALUE 1.20e+00; EST_HUMAN HIT: BE885459.1, EVALUE 4.00e-26
TPKRRKAEPEALQSLRRSTRHSANCDRLSESSASPQPKRRQQDTSASMPKLFLHLEK

SEQ ID NO: 46083 - protein, 18 aa, Homo sapiens
  MAP TO AL138827.2; EXPRESSED IN PLACENTA, SIGNAL = 1.3; EXPRESSED IN BRAIN, SIGNAL = 1.4; EXPRESSED IN HELA, SIGNAL = 1.9; EXPRESSED IN ADULT LIVER, SIGNAL = 1.5; EXPRESSED IN FETAL LIVER, SIGNAL = 2.3
TSGMVCTRAWNGYAGRLE

SEQ ID NO: 46084 - protein, 34 aa, Homo sapiens
  MAP TO AL158153.2; EXPRESSED IN ADULT LIVER, SIGNAL = 1.8; EXPRESSED IN FETAL LIVER, SIGNAL = 1.9; EXPRESSED IN BRAIN, SIGNAL = 1.4; EXPRESSED IN BONE MARROW, SIGNAL = 1.5; EXPRESSED IN HELA, SIGNAL = 1.7
MNFAIRHTLLSKQGGKVKMGASEDKGVDVDVGEA

SEQ ID NO: 46085 - protein, 72 aa, Homo sapiens
  MAP TO AC020904.3; EXPRESSED IN LUNG, SIGNAL = 3.4; EXPRESSED IN PLACENTA, SIGNAL = 1.6; EXPRESSED IN BRAIN, SIGNAL = 2.4; EXPRESSED IN ADULT LIVER, SIGNAL = 1.6; EXPRESSED IN BONE MARROW, SIGNAL = 1.9; EST_HUMAN HIT: BE243764.1, EVALUE 7.00e-25; SWISSPROT HIT: P42701, EVALUE 4.00e-33
TWQWINPVDFQEEASLQEALVVEMSWDKGERTEPLEKTELPEGAPELALDTELSLEDGDRCKAKVLGPSGPD

SEQ ID NO: 46086 - protein, 21 aa, Homo sapiens
  MAP TO AC020904.3; EXPRESSED IN LUNG, SIGNAL = 3.4; EXPRESSED IN PLACENTA, SIGNAL = 1.6; EXPRESSED IN BRAIN, SIGNAL = 2.4; EXPRESSED IN ADULT LIVER, SIGNAL = 1.6; EXPRESSED IN BONE MARROW, SIGNAL = 1.9; SWISSPROT HIT: P03204, EVALUE 8.80e+00; EST_HUMAN HIT: BF525411.1, EVALUE 4.80e+00
LGSGSTQWTSRKRHPCRRPWW

SEQ ID NO: 46087 - protein, 70 aa, Homo sapiens [sequence omitted]

SEQ ID NO: 46088 - protein, 21 aa, Homo sapiens
  MAP TO AL121955.4; EXPRESSED IN BRAIN, SIGNAL = 1.3
VGNWMIWAVEKDLEGLLMAWM

SEQ ID NO: 46089 - protein, 91 aa, Homo sapiens
  MAP TO AP001205.1; EXPRESSED IN BRAIN, SIGNAL = 2.4; EXPRESSED IN ADULT LIVER, SIGNAL = 1.7; EXPRESSED IN BONE MARROW, SIGNAL = 7.1; EXPRESSED IN FETAL LIVER, SIGNAL = 6.2; EXPRESSED IN HELA, SIGNAL = 3.7; EXPRESSED IN LUNG, SIGNAL = 9.9; EXPRESSED IN PLACENTA, SIGNAL = 2.5; EST_HUMAN HIT: BE781074.1, EVALUE 2.00e-47; SWISSPROT HIT: P11940, EVALUE 3.00e-48
VMMEGGRSKGFGFVCFSSPEEATKAVTEMNGRIVATKPLYVALAQRKEERQAHLTNQYMQRMASVRAVPNPVINPYQPAPPSGYFMAAIPQ

SEQ ID NO: 46090 - protein, 29 aa, Homo sapiens
  MAP TO AP000957.2; EXPRESSED IN FETAL LIVER, SIGNAL = 2.5; EXPRESSED IN BRAIN, SIGNAL = 1.3; EXPRESSED IN HELA, SIGNAL = 2.8; EST_HUMAN HIT: BF698064.1, EVALUE 8.00e-04
WLCRCHRCQEPRSISHGQPHQVLRHHRGW

SEQ ID NO: 46091 - protein, 25 aa, Homo sapiens
  MAP TO AH009158.1; EXPRESSED IN BRAIN, SIGNAL = 1.4; EXPRESSED IN ADULT LIVER, SIGNAL =   2; EXPRESSED IN HELA, SIGNAL = 1.6; EXPRESSED IN PLACENTA, SIGNAL = 1.4; SWISSPROT HIT: P78314, EVALUE 2.30e+00; EST_HUMAN HIT: AF126045.1, EVALUE 3.60e-02
GPPKSSPPPCLTNSPGFLMANIPPA

SEQ ID NO: 46092 - protein, 59 aa, Homo sapiens
  MAP TO AL121964.16; EXPRESSED IN BRAIN, SIGNAL = 1.4; EXPRESSED IN BONE MARROW, SIGNAL = 1.7; EXPRESSED IN LUNG, SIGNAL =   2; SWISSPROT HIT: Q62073, EVALUE 6.00e-28; EST_HUMAN HIT: BF576025.1, EVALUE 7.00e-27
QELVAELDQDEKDQQNTSRLVQEHKKLLDENKSLSTYYQQCKKQLEVIRSQQQKRQGTS

SEQ ID NO: 46093 - protein, 40 aa, Homo sapiens
  MAP TO AF233390.1; EXPRESSED IN ADULT LIVER, SIGNAL = 1.7; EXPRESSED IN BRAIN, SIGNAL = 1.5; EXPRESSED IN PLACENTA, SIGNAL = 1.4; EXPRESSED IN LUNG, SIGNAL = 3.3
AGQGPAAAAARRTYLCTHRCGFFTSSWPCSWWPWLCWPLW

SEQ ID NO: 46094 - protein, 21 aa, Homo sapiens
  MAP TO AL159141.1; EXPRESSED IN BONE MARROW, SIGNAL = 1.5; EXPRESSED IN PLACENTA, SIGNAL = 5.2; EXPRESSED IN BRAIN, SIGNAL = 1.7; EXPRESSED IN ADULT LIVER, SIGNAL = 1.7; EST_HUMAN HIT: AA393627.1, EVALUE 1.70e-02
MVTFITATLWIAVFSYIMVWL

SEQ ID NO: 46095 - protein, 56 aa, Homo sapiens
  MAP TO AL159141.1; EXPRESSED IN BONE MARROW, SIGNAL = 1.5; EXPRESSED IN PLACENTA, SIGNAL = 5.2; EXPRESSED IN BRAIN, SIGNAL = 1.7; EXPRESSED IN ADULT LIVER, SIGNAL = 1.7
RPEGTRSSGCSPGPSSSSCASPFPTAASPAGRSSSWSPSSPPRCGSLCSPTSWCGW

SEQ ID NO: 46096 - protein, 44 aa, Homo sapiens
  MAP TO AJ246003.1; EXPRESSED IN FETAL LIVER, SIGNAL = 1.6; EXPRESSED IN LUNG, SIGNAL = 2.1; EXPRESSED IN BRAIN, SIGNAL = 1.5; EXPRESSED IN PLACENTA, SIGNAL = 1.8; EXPRESSED IN ADULT LIVER, SIGNAL = 1.6; SWISSPROT HIT: P32833, EVALUE 2.10e+00; EST_HUMAN HIT: BF345159.1, EVALUE 3.10e+00
GTPKTNRTNKPSTPTTATRKKKDLKNFRNVDSNLANLIMNEIVD

SEQ ID NO: 46097 - protein, 23 aa, Homo sapiens
  MAP TO AJ246003.1; EXPRESSED IN FETAL LIVER, SIGNAL = 1.6; EXPRESSED IN LUNG, SIGNAL = 2.1; EXPRESSED IN BRAIN, SIGNAL = 1.5; EXPRESSED IN PLACENTA, SIGNAL = 1.8; EXPRESSED IN ADULT LIVER, SIGNAL = 1.6
VLRKQIGQINLLPLQLLLVRKKT

SEQ ID NO: 46098 - protein, 25 aa, Homo sapiens
  MAP TO AL136226.2; EXPRESSED IN BRAIN, SIGNAL = 1.5; EXPRESSED IN PLACENTA, SIGNAL = 9.5; EXPRESSED IN ADULT LIVER, SIGNAL = 1.6; EXPRESSED IN HELA, SIGNAL = 3.6; EST_HUMAN HIT: BF060723.1, EVALUE 9.30e-01
HYILNSKISDEKSADNFLEDPWHVI

SEQ ID NO: 46099 - protein, 58 aa, Homo sapiens
  MAP TO AC024168.1; EXPRESSED IN PLACENTA, SIGNAL = 1.4; EXPRESSED IN LUNG, SIGNAL =   2; EXPRESSED IN BRAIN, SIGNAL = 1.3; EST_HUMAN HIT: AV721846.1, EVALUE 1.00e-27
MVPIPAGVFTMGTDDPQIKQDGEAPARRVTIDAFYMDAYEVSNTEFEKFVNSTGYLTE

SEQ ID NO: 46100 - protein, 17 aa, Homo sapiens
  MAP TO AC024168.1; EXPRESSED IN PLACENTA, SIGNAL = 1.4; EXPRESSED IN LUNG, SIGNAL =   2; EXPRESSED IN BRAIN, SIGNAL = 1.3; EST_HUMAN HIT: BE271837.1, EVALUE 6.00e-03
WSPSLLEYLQWAQMILR

SEQ ID NO: 46101 - protein, 79 aa, Homo sapiens
  MAP TO AC000134.14; EXPRESSED IN BRAIN, SIGNAL = 1.8; EST_HUMAN HIT: AA663739.1, EVALUE 1.00e-19; SWISSPROT HIT: P25391, EVALUE 7.00e-03
FRTTEPNGLLLFSQGRRAGGGAGSHSSAQRADYFAMELLDGHLYLLLDMGSGGIKLRASSRKVNDGEWCHVDFQRDGRK

SEQ ID NO: 46102 - protein, 32 aa, Homo sapiens
  MAP TO AC000134.14; EXPRESSED IN BRAIN, SIGNAL = 1.8; EST_HUMAN HIT: BF528907.1, EVALUE 3.00e-11
VVYKNNDFKLELSRLAKEGDPKMKLQGDLSFR

SEQ ID NO: 46103 - protein, 25 aa, Homo sapiens
  MAP TO AC000134.14; EXPRESSED IN BRAIN, SIGNAL = 1.8; EST_HUMAN HIT: BF528907.1, EVALUE 1.00e-07
PCRWSIRTMTSNWNYPAWQRKGTPR

SEQ ID NO: 46104 - protein, 19 aa, Homo sapiens
  MAP TO AL121654.1; EXPRESSED IN BRAIN, SIGNAL = 1.3; EXPRESSED IN ADULT LIVER, SIGNAL = 1.7
LCGGAPPLMWPRLMAKVGK

SEQ ID NO: 46105 - protein, 27 aa, Homo sapiens
  MAP TO AC013568.3; EXPRESSED IN PLACENTA, SIGNAL = 1.5; EXPRESSED IN BRAIN, SIGNAL = 1.5; EXPRESSED IN ADULT LIVER, SIGNAL = 1.6
YFLDLFLATSLGLNCWPAQWQKTACNL

SEQ ID NO: 46106 - protein, 41 aa, Homo sapiens
  MAP TO AL121603.2; EXPRESSED IN LUNG, SIGNAL =   6; EXPRESSED IN PLACENTA, SIGNAL = 3.7; EXPRESSED IN BRAIN, SIGNAL = 1.6
LNTGLHLLVIKWWVTIIIEITKFNLIKLFRPRLWVARKMIK

SEQ ID NO: 46107 - protein, 81 aa, Homo sapiens
  MAP TO AL109847.3; EXPRESSED IN PLACENTA, SIGNAL = 1.4; EXPRESSED IN BRAIN, SIGNAL = 1.3; SWISSPROT HIT: Q9VLZ7, EVALUE 6.40e+00; EST_HUMAN HIT: AW002060.1, EVALUE 5.00e-43
EVKDKNVQVVELPIVDSLHPRPPYLPLAVPEDLADRLVRVHGDPAVWWVSQFVKYLIRPQPWLEKEIEEATKKLGFKHPVI

SEQ ID NO: 46108 - protein, 25 aa, Homo sapiens
  MAP TO AL109847.3; EXPRESSED IN PLACENTA, SIGNAL = 1.4; EXPRESSED IN BRAIN, SIGNAL = 1.3; EST_HUMAN HIT: AW002060.1, EVALUE 2.00e-08
PPTALARKRNRRSHQEAWLQTSSYW

SEQ ID NO: 46109 - protein, 52 aa, Homo sapiens
  MAP TO AC012404.4; EXPRESSED IN PLACENTA, SIGNAL = 2.8; EXPRESSED IN BRAIN, SIGNAL = 1.8; EXPRESSED IN ADULT LIVER, SIGNAL = 1.4; EXPRESSED IN LUNG, SIGNAL = 3.2
FHTKKKKKKKNKKKKKKKKKRKRKRKRKKKKKKKKKKKKKKKKKKKKKKKAF

SEQ ID NO: 46110 - protein, 105 aa, Homo sapiens
  MAP TO AC009425.2; EXPRESSED IN BRAIN, SIGNAL = 1.5; EST_HUMAN HIT: BE256685.1, EVALUE 2.00e-24; SWISSPROT HIT: Q61772, EVALUE 2.00e-58
NLIFNINQTTVSLEWSPPADNGGRNDVTYRILCKRCSWEQGECVPCGSNIGYMPQQTGLEDNYVTVMDLLAHANYTFEVEAVNGVSDLSRSQRLFAAVSITTGQA

SEQ ID NO: 46111 - protein, 51 aa, Homo sapiens
  MAP TO AC022013.2; EXPRESSED IN BRAIN, SIGNAL = 1.3; EXPRESSED IN ADULT LIVER, SIGNAL = 1.5; EXPRESSED IN PLACENTA, SIGNAL = 1.6; EST_HUMAN HIT: BF105940.1, EVALUE 2.20e+00; SWISSPROT HIT: O31314, EVALUE 2.10e+00
INTGWKSQPQLPVLAFFSQLSPFTHSSGIWDPGLYTRQNSLWNHVDFNVNH

SEQ ID NO: 46112 - protein, 49 aa, Homo sapiens
  MAP TO AC022013.2; EXPRESSED IN BRAIN, SIGNAL = 1.3; EXPRESSED IN ADULT LIVER, SIGNAL = 1.5; EXPRESSED IN PLACENTA, SIGNAL = 1.6; SWISSPROT HIT: Q43814, EVALUE 2.10e+00
KSTPVGNHSPSFLFWPSSHNLVLSPTLLVSGTLASIPVRTHCGIMWTLM

SEQ ID NO: 46113 - protein, 67 aa, Homo sapiens
  MAP TO AC013528.3; EXPRESSED IN BRAIN, SIGNAL = 2.4; EXPRESSED IN BONE MARROW, SIGNAL = 2.5; EXPRESSED IN FETAL LIVER, SIGNAL = 1.6; EXPRESSED IN ADULT LIVER, SIGNAL = 1.5; EXPRESSED IN LUNG, SIGNAL = 2.3; EXPRESSED IN PLACENTA, SIGNAL = 2.4; EST_HUMAN HIT: AW009639.1, EVALUE 6.50e-01; SWISSPROT HIT: P08648, EVALUE 1.00e-01
GRTLAHTDSGLEALLGNQGALGDRIPAGAPRRVGETSALLLKPQALASIIPQPRADLASSDPCGHCQ

SEQ ID NO: 46114 - protein, 134 aa, Homo sapiens
  MAP TO AC006548.20; EXPRESSED IN ADULT LIVER, SIGNAL = 1.9; EXPRESSED IN PLACENTA, SIGNAL = 1.5; EXPRESSED IN BRAIN, SIGNAL = 1.6; EXPRESSED IN BONE MARROW, SIGNAL =   2; EXPRESSED IN FETAL LIVER, SIGNAL = 1.8; EXPRESSED IN HELA, SIGNAL = 1.8; EST_HUMAN HIT: AU140898.1, EVALUE 6.00e-37; SWISSPROT HIT: Q09312, EVALUE 2.00e+00
FLSLRSASFSQGSEAPFIMRRNTAMQNLAQHSGYSVDGVSGHIHGFHSLSKPSQHNAEFRGSTHRIPWSLASHGHTRGSLTGSEADNEGVYPFKAPRSTLFQEFGGHLVNNSGVPATPLSVHQIPRTVTLDKNL

SEQ ID NO: 46115 - protein, 77 aa, Homo sapiens
  MAP TO AL133271.11; EXPRESSED IN BRAIN, SIGNAL = 1.3; EXPRESSED IN FETAL LIVER, SIGNAL = 1.8; EST_HUMAN HIT: AI126454.1, EVALUE 7.00e-09
FSMTTPNRTSHNQRFKSCTNWAMEFCLICHIRLTSHQLTTTSSSKATIFFREKTSTSSSMQEMLSMSSSNTKAWIST

SEQ ID NO: 46116 - protein, 35 aa, Homo sapiens
  MAP TO AC010931.5; EXPRESSED IN PLACENTA, SIGNAL = 1.4; EXPRESSED IN BRAIN, SIGNAL = 1.7; EXPRESSED IN HELA, SIGNAL =   2; EXPRESSED IN LUNG, SIGNAL = 3.1; EST_HUMAN HIT: BE162161.1, EVALUE 5.00e-06; SWISSPROT HIT: Q62839, EVALUE 9.00e-06
ESKDLAGRLQYSLQRIQELERALCAVSTQQQEEDR

SEQ ID NO: 46117 - protein, 35 aa, Homo sapiens
  MAP TO AC010931.5; EXPRESSED IN PLACENTA, SIGNAL = 1.4; EXPRESSED IN BRAIN, SIGNAL = 1.7; EXPRESSED IN HELA, SIGNAL =   2; EXPRESSED IN LUNG, SIGNAL = 3.1; EST_HUMAN HIT: BE163037.1, EVALUE 4.40e-02; SWISSPROT HIT: O08365, EVALUE 4.90e+00
KSPRIWLAACNTPYSVFKNWSGLSVLCLHSSRKRT

SEQ ID NO: 46118 - protein, 123 aa, Homo sapiens
  MAP TO AC008132.34; EXPRESSED IN BONE MARROW, SIGNAL = 4.8; EXPRESSED IN LUNG, SIGNAL = 5.1; EXPRESSED IN PLACENTA, SIGNAL = 1.9; EXPRESSED IN BRAIN, SIGNAL = 2.8; EXPRESSED IN FETAL LIVER, SIGNAL = 1.8; EST_HUMAN HIT: AL042278.1, EVALUE 4.00e-41; SWISSPROT HIT: P52591, EVALUE 1.00e-04
ALKESGAGMPEQDKDPRVQENPGDQRRVPEVTGDAPSAFRPLRDNRGLSPFVPGPGPLQTDLHAQRSEIRYNQTSQTSWTSSCTNRNAISSSYSSTGGLPGLKRRRGPASSHCQLTLSSSKTV

SEQ ID NO: 46119 - protein, 58 aa, Homo sapiens
  MAP TO AC023490.4; EXPRESSED IN BONE MARROW, SIGNAL = 3.9; EXPRESSED IN LUNG, SIGNAL = 2.3; EXPRESSED IN BRAIN, SIGNAL = 1.9; EST_HUMAN HIT: R42199.1, EVALUE 2.70e+00; SWISSPROT HIT: Q14693, EVALUE 3.10e-01
ASEVPPFTVDASEVPPFTVDASEVLLSAQTSLTPSYAHPTDDSQHIPSPSPLRFIQDL

SEQ ID NO: 46120 - protein, 25 aa, Homo sapiens
  MAP TO AC008545.3; EXPRESSED IN BRAIN, SIGNAL = 1.6; EXPRESSED IN PLACENTA, SIGNAL = 1.7; EXPRESSED IN FETAL LIVER, SIGNAL = 1.6; EST_HUMAN HIT: BF183455.1, EVALUE 6.10e+00
SHLGQGPGPPKTVRPPLVARPRWRR

SEQ ID NO: 46121 - protein, 68 aa, Homo sapiens
  MAP TO AC010618.4; EXPRESSED IN BRAIN, SIGNAL = 2.8; EXPRESSED IN PLACENTA, SIGNAL = 5.4; EXPRESSED IN BONE MARROW, SIGNAL =   3; EXPRESSED IN HELA, SIGNAL =   3; EXPRESSED IN ADULT LIVER, SIGNAL = 1.6; EXPRESSED IN FETAL LIVER, SIGNAL = 2.1; EXPRESSED IN LUNG, SIGNAL = 7.9; EST_HUMAN HIT: AW630291.1, EVALUE 9.00e-34; SWISSPROT HIT: Q03018, EVALUE 5.10e-01
YVGRKRMQVEHPEKAVPRVRNLVEADYSYWTLAYVISLQGARKLLAAEPLSKMLPVDEFLPVMFDKHP

SEQ ID NO: 46122 - protein, 18 aa, Homo sapiens
  MAP TO AC010618.4; EXPRESSED IN BRAIN, SIGNAL = 2.8; EXPRESSED IN PLACENTA, SIGNAL = 5.4; EXPRESSED IN BONE MARROW, SIGNAL =   3; EXPRESSED IN HELA, SIGNAL =   3; EXPRESSED IN ADULT LIVER, SIGNAL = 1.6; EXPRESSED IN FETAL LIVER, SIGNAL = 2.1; EXPRESSED IN LUNG, SIGNAL = 7.9; EST_HUMAN HIT: BE904159.1, EVALUE 1.00e-04
MWAGSGCRWSTPRRLCLA

SEQ ID NO: 46123 - protein, 131 aa, Homo sapiens
  MAP TO AL117667.2; EXPRESSED IN BRAIN, SIGNAL = 1.6; SWISSPROT HIT: Q03555, EVALUE 2.00e-23
ECFQFILPALPHAIDLLRDAIVKVKEVHDELEDLPSPPPPLSPPPTTSPHKQTEDKGVQCEEEEEEKKDSGVASTEDSSSSHITAAAIAAKVSLMRVTQRPKGPTGKCTGFICFASHPSLHLILLQRTLKK

SEQ ID NO: 46124 - protein, 60 aa, Homo sapiens
  MAP TO AC018720.2; EXPRESSED IN BRAIN, SIGNAL =   2; EXPRESSED IN PLACENTA, SIGNAL = 2.6; EXPRESSED IN BONE MARROW, SIGNAL = 1.9; EXPRESSED IN LUNG, SIGNAL = 4.3; EXPRESSED IN ADULT LIVER, SIGNAL = 1.4; EST_HUMAN HIT: BF369855.1, EVALUE 6.00e-28; SWISSPROT HIT: P47974, EVALUE 2.30e-01
HTPGAESPGPPNCGSSSDGAAQASRCSISASTLTKCWPTQSMLQGQAELLSDSFPQKAEG

SEQ ID NO: 46125 - protein, 33 aa, Homo sapiens
  MAP TO AC018720.2; EXPRESSED IN BRAIN, SIGNAL =   2; EXPRESSED IN PLACENTA, SIGNAL = 2.6; EXPRESSED IN BONE MARROW, SIGNAL = 1.9; EXPRESSED IN LUNG, SIGNAL = 4.3; EXPRESSED IN ADULT LIVER, SIGNAL = 1.4; EST_HUMAN HIT: BF369855.1, EVALUE 1.00e-03
GTPLGLSLQGPPTVVAPAMVLPRPLGAPSPPPH

SEQ ID NO: 46126 - protein, 53 aa, Homo sapiens
  MAP TO AL138750.5; EXPRESSED IN BRAIN, SIGNAL = 1.6; EXPRESSED IN PLACENTA, SIGNAL = 1.6; EXPRESSED IN ADULT LIVER, SIGNAL = 1.6; EXPRESSED IN LUNG, SIGNAL = 2.3; SWISSPROT HIT: P37660, EVALUE 2.70e+00
MNENEEICRQMCIPLTSSRYLGPAIRTGIMAVNVMKNLKGIWVMITQCHDTIT

SEQ ID NO: 46127 - protein, 76 aa, Homo sapiens
  MAP TO AC018558.2; EXPRESSED IN BRAIN, SIGNAL = 1.6; EXPRESSED IN HELA, SIGNAL = 1.8; EXPRESSED IN ADULT LIVER, SIGNAL = 1.8; EXPRESSED IN FETAL LIVER, SIGNAL = 1.7; EST_HUMAN HIT: AI798672.1, EVALUE 4.00e-27; SWISSPROT HIT: P72533, EVALUE 2.40e+00
TSYLTLETSHMNVKKIDRSQINLNNVRKPSFCSHIFKDTWHCTLEMDLIKVLYVKKPLIFPMYLIYVREITPNRKP

SEQ ID NO: 46128 - protein, 28 aa, Homo sapiens
  MAP TO AC025286.1; EXPRESSED IN ADULT LIVER, SIGNAL = 1.8; EXPRESSED IN BRAIN, SIGNAL = 1.6; EXPRESSED IN PLACENTA, SIGNAL = 1.4; EXPRESSED IN BONE MARROW, SIGNAL = 2.1; EXPRESSED IN HELA, SIGNAL = 2.2; EXPRESSED IN LUNG, SIGNAL = 2.8
VPKVLGAEYSSPLRKSVLWTDEKDKREA

SEQ ID NO: 46129 - protein, 37 aa, Homo sapiens
  MAP TO AL157885.2; EXPRESSED IN BRAIN, SIGNAL = 1.6; EXPRESSED IN PLACENTA, SIGNAL = 1.4; EXPRESSED IN FETAL LIVER, SIGNAL = 1.7
CMETKTLQKKSGIVSSEGANESTLPQLAAMIITLSLQ

SEQ ID NO: 46130 - protein, 29 aa, Homo sapiens
  MAP TO AC011455.3; EXPRESSED IN BRAIN, SIGNAL = 1.3; EXPRESSED IN HELA, SIGNAL = 1.7; SWISSPROT HIT: P15278, EVALUE 2.90e+00
LTRCLAEVVTEVLTVGQVQRGPCTALLHK

SEQ ID NO: 46131 - protein, 127 aa, Homo sapiens
  MAP TO AC005678.1; EXPRESSED IN BRAIN, SIGNAL = 1.9; EXPRESSED IN PLACENTA, SIGNAL = 2.4; SWISSPROT HIT: O43309, EVALUE 6.00e-72; EST_HUMAN HIT: AV689461.1, EVALUE 1.00e-39
QAHMDQDEPLEVKIEEEKYTTRQDWDLRKNNTHSREVFRQYFRQFCYQETSGPREALSRLRELCHQWLRPETHTKEQILELLVLEQFLTILPEELQAWVQEQHPESGEEVVTVLEDLERELDEPGEQ

SEQ ID NO: 46132 - protein, 40 aa, Homo sapiens
  MAP TO AC011497.3; EXPRESSED IN BRAIN, SIGNAL = 1.7; EXPRESSED IN BONE MARROW, SIGNAL = 1.6; EXPRESSED IN FETAL LIVER, SIGNAL = 2.4; SWISSPROT HIT: P16423, EVALUE 6.30e+00; EST_HUMAN HIT: AW847812.1, EVALUE 5.00e-11
MSVMLAEKSLERLWKVVTEAEMPAIPVLSAIAEAESPKPT

SEQ ID NO: 46133 - protein, 53 aa, Homo sapiens
  MAP TO AC011625.2; EXPRESSED IN PLACENTA, SIGNAL = 8.5; EXPRESSED IN BRAIN, SIGNAL = 1.3; EXPRESSED IN ADULT LIVER, SIGNAL = 1.5; EXPRESSED IN BONE MARROW, SIGNAL = 1.6; SWISSPROT HIT: P11721, EVALUE 3.60e+00
LPQLEEVLQPQQLADALVQAPTGNQPVLLVVYEEHLVDIVGGGQGLIAGLDDA

SEQ ID NO: 46134 - protein, 61 aa, Homo sapiens
  MAP TO AC011625.2; EXPRESSED IN PLACENTA, SIGNAL = 8.5; EXPRESSED IN BRAIN, SIGNAL = 1.3; EXPRESSED IN ADULT LIVER, SIGNAL = 1.5; EXPRESSED IN BONE MARROW, SIGNAL = 1.6
TRLCHESHALELDLPSLPPPHGGHGLLHFAHPAASPAVPEAAVICHIPRRARRGFQSPGGG

SEQ ID NO: 46135 - protein, 43 aa, Homo sapiens
  MAP TO AC002036.1; EXPRESSED IN BRAIN, SIGNAL = 1.3; EXPRESSED IN PLACENTA, SIGNAL = 1.7; EXPRESSED IN ADULT LIVER, SIGNAL = 1.4; EST_HUMAN HIT: AU124141.1, EVALUE 6.00e-10; SWISSPROT HIT: P57080, EVALUE 2.00e-11
ETFGQYPLQVNGYRNLDECLEGAMVEGDVELLPSDHSVKYGQE

SEQ ID NO: 46136 - protein, 29 aa, Homo sapiens
  MAP TO AC008967.3; EXPRESSED IN BRAIN, SIGNAL = 1.3; EXPRESSED IN BONE MARROW, SIGNAL = 3.5; EXPRESSED IN ADULT LIVER, SIGNAL = 1.4; EXPRESSED IN LUNG, SIGNAL = 2.9; EXPRESSED IN FETAL LIVER, SIGNAL = 1.6; EST_HUMAN HIT: AA569592.1, EVALUE 1.00e-09
MEGLSDVASFATKLKNTLIQYHSIEEDKW

SEQ ID NO: 46137 - protein, 28 aa, Homo sapiens
  MAP TO AC008967.3; EXPRESSED IN BRAIN, SIGNAL = 1.3; EXPRESSED IN BONE MARROW, SIGNAL = 3.5; EXPRESSED IN ADULT LIVER, SIGNAL = 1.4; EXPRESSED IN LUNG, SIGNAL = 2.9; EXPRESSED IN FETAL LIVER, SIGNAL = 1.6
WKACLMLLLLQLNLKTLSSSTIALKKIS

SEQ ID NO: 46138 - protein, 78 aa, Homo sapiens
  MAP TO AC023753.5; EXPRESSED IN PLACENTA, SIGNAL = 1.4; EXPRESSED IN BRAIN, SIGNAL = 1.3; EXPRESSED IN FETAL LIVER, SIGNAL = 1.6; EST_HUMAN HIT: AA180321.1, EVALUE 3.90e-01; SWISSPROT HIT: P51360, EVALUE 6.00e-01
SGEFGYHFFKRILPDLPLNLTPVYQGFLLHVLPYPLGHALVIKLNALYCGHLFIHMSLLLEYRLLEIKDCYAFLIYAY

SEQ ID NO: 46139 - protein, 17 aa, Homo sapiens
  MAP TO AC023753.5; EXPRESSED IN PLACENTA, SIGNAL = 1.4; EXPRESSED IN BRAIN, SIGNAL = 1.3; EXPRESSED IN FETAL LIVER, SIGNAL = 1.6
LENLVITSSRESCLTCL

SEQ ID NO: 46140 - protein, 39 aa, Homo sapiens
  MAP TO AC023078.2; EXPRESSED IN BRAIN, SIGNAL = 1.9; EXPRESSED IN PLACENTA, SIGNAL =   2; EXPRESSED IN BONE MARROW, SIGNAL = 1.5; EXPRESSED IN HELA, SIGNAL = 2.1; EXPRESSED IN LUNG, SIGNAL = 1.8; EXPRESSED IN ADULT LIVER, SIGNAL = 2.1; EXPRESSED IN FETAL LIVER, SIGNAL = 1.7; EST_HUMAN HIT: BE734169.1, EVALUE 9.00e-09; SWISSPROT HIT: P31695, EVALUE 3.70e+00
WVMLAKGPTCMNTGVHSRVCIRWPPPSFPAMSSCLRGCS

SEQ ID NO: 46141 - protein, 55 aa, Homo sapiens
  MAP TO AL136143.6; EXPRESSED IN BRAIN, SIGNAL = 1.4; EXPRESSED IN PLACENTA, SIGNAL = 1.5; EXPRESSED IN ADULT LIVER, SIGNAL = 1.6; EST_HUMAN HIT: F36457.1, EVALUE 3.70e+00
MVSFPGSTETSGLGTKHTTELCQEREKGKWTLEGSQQRPATSFHILMTSFVFGLQ

SEQ ID NO: 46142 - protein, 46 aa, Homo sapiens
  MAP TO AL136143.6; EXPRESSED IN BRAIN, SIGNAL = 1.4; EXPRESSED IN PLACENTA, SIGNAL = 1.5; EXPRESSED IN ADULT LIVER, SIGNAL = 1.6; SWISSPROT HIT: Q80930, EVALUE 1.20e+00; EST_HUMAN HIT: BE247350.1, EVALUE 7.90e-01
WSASPAAQRPQAWGPNTRRSCVRRERKGSGRWKAASSVRQPPSTFS

SEQ ID NO: 46143 - protein, 31 aa, Homo sapiens
  MAP TO AC010636.3; EXPRESSED IN LUNG, SIGNAL = 3.2; EXPRESSED IN PLACENTA, SIGNAL = 1.5; EXPRESSED IN BRAIN, SIGNAL = 1.4; EXPRESSED IN ADULT LIVER, SIGNAL = 1.6; EXPRESSED IN BONE MARROW, SIGNAL = 1.7; EST_HUMAN HIT: BE781790.1, EVALUE 7.00e-11; SWISSPROT HIT: P35789, EVALUE 1.00e-09
IVVSKPDLITCLEQGKKPLTMKKHEMVANPS

SEQ ID NO: 46144 - protein, 19 aa, Homo sapiens
  MAP TO AC010636.3; EXPRESSED IN LUNG, SIGNAL = 3.2; EXPRESSED IN PLACENTA, SIGNAL = 1.5; EXPRESSED IN BRAIN, SIGNAL = 1.4; EXPRESSED IN ADULT LIVER, SIGNAL = 1.6; EXPRESSED IN BONE MARROW, SIGNAL = 1.7; EST_HUMAN HIT: BE781790.1, EVALUE 6.00e-03
VLLSLSQTSSPVWSKEKNL

SEQ ID NO: 46145 - protein, 26 aa, Homo sapiens
  MAP TO AC019224.2; EXPRESSED IN BRAIN, SIGNAL = 1.8; EXPRESSED IN PLACENTA, SIGNAL = 1.7; EXPRESSED IN FETAL LIVER, SIGNAL = 1.8; EXPRESSED IN HELA, SIGNAL = 1.8; EXPRESSED IN ADULT LIVER, SIGNAL = 1.6; EST_HUMAN HIT: AA403061.1, EVALUE 8.00e+00; SWISSPROT HIT: O75031, EVALUE 2.00e-08
MSKSRNPRLQTAAQELLEDLRTLEHN

SEQ ID NO: 46146 - protein, 89 aa, Homo sapiens
  MAP TO AC018552.2; EXPRESSED IN ADULT LIVER, SIGNAL = 2.2; EXPRESSED IN BRAIN, SIGNAL = 1.6; SWISSPROT HIT: P19198, EVALUE 5.70e+00; EST_HUMAN HIT: AA928677.1, EVALUE 2.60e-01
EETLELVHPEQLKRRQSVHPPVQALQPWAPQSWAGQSWPPPPHISGGLLNIDNRLSKCCLDTYIDIFIYINKKKKETTKIRVGISFVHQ

SEQ ID NO: 46147 - protein, 44 aa, Homo sapiens
  MAP TO AC023890.3; EXPRESSED IN LUNG, SIGNAL = 2.3; EXPRESSED IN BRAIN, SIGNAL = 1.7; EXPRESSED IN PLACENTA, SIGNAL = 1.7; EXPRESSED IN ADULT LIVER, SIGNAL =   2; EXPRESSED IN FETAL LIVER, SIGNAL = 1.7; EXPRESSED IN HELA, SIGNAL = 2.4; SWISSPROT HIT: P45816, EVALUE 4.80e+00; EST_HUMAN HIT: BE545503.1, EVALUE 7.00e-19
GADPSPSPSPSLRCHSARLCMPMTLRTQTNSALMPMTLLILSKK

SEQ ID NO: 46148 - protein, 55 aa, Homo sapiens
  MAP TO AC003692.1; EXPRESSED IN BRAIN, SIGNAL = 1.8; EXPRESSED IN BONE MARROW, SIGNAL = 3.2; EXPRESSED IN FETAL LIVER, SIGNAL = 1.9; EXPRESSED IN LUNG, SIGNAL = 1.7; EXPRESSED IN PLACENTA, SIGNAL = 2.9; SWISSPROT HIT: P80303, EVALUE 4.00e-13; EST_HUMAN HIT: BF032109.1, EVALUE 5.00e-12
ATSDLEHYDKTRHEEFKKYEMMKEHERREYLKTLNEEKRKEEESKFEEMKKKHEN

SEQ ID NO: 46149 - protein, 38 aa, Homo sapiens; identical to SEQ ID NO: 45282
  MAP TO AC022377.1; EXPRESSED IN PLACENTA, SIGNAL = 1.7; EXPRESSED IN BRAIN, SIGNAL =   2; EXPRESSED IN ADULT LIVER, SIGNAL = 1.6; EXPRESSED IN BONE MARROW, SIGNAL = 1.5; EXPRESSED IN LUNG, SIGNAL = 2.6; EST_HUMAN HIT: BF061639.1, EVALUE 6.00e-16; SWISSPROT HIT: P42780, EVALUE 6.40e+00

SEQ ID NO: 46150 - protein, 30 aa, Homo sapiens
  MAP TO AC022377.1; EXPRESSED IN PLACENTA, SIGNAL = 1.7; EXPRESSED IN BRAIN, SIGNAL =   2; EXPRESSED IN ADULT LIVER, SIGNAL = 1.6; EXPRESSED IN BONE MARROW, SIGNAL = 1.5; EXPRESSED IN LUNG, SIGNAL = 2.6; EST_HUMAN HIT: AW673469.1, EVALUE 7.00e-13; SWISSPROT HIT: O00303, EVALUE 6.50e+00
SRARPPAVRLAHPWTAPQPTPRAPWCPVPA

SEQ ID NO: 46151 - protein, 60 aa, Homo sapiens
  MAP TO AC008962.4; EXPRESSED IN BRAIN, SIGNAL = 1.4; EXPRESSED IN ADULT LIVER, SIGNAL = 4.8; EXPRESSED IN FETAL LIVER, SIGNAL = 1.6; EXPRESSED IN LUNG, SIGNAL = 2.2; EST_HUMAN HIT: AV693999.1, EVALUE 3.00e-16; SWISSPROT HIT: Q16696, EVALUE 4.00e-18
MLASGLLLVTLLACLTVMVLMSVWRQRKSRGKLPPGPTPLPFIGNYLQLNTEQMYNSLMK

SEQ ID NO: 46152 - protein, 56 aa, Homo sapiens
  MAP TO AC002400.1; EXPRESSED IN PLACENTA, SIGNAL = 1.5; EXPRESSED IN BRAIN, SIGNAL = 1.7; EXPRESSED IN BONE MARROW, SIGNAL = 2.3; EXPRESSED IN LUNG, SIGNAL =   4; EST_HUMAN HIT: AW500794.1, EVALUE 9.00e-27; SWISSPROT HIT: O43747, EVALUE 3.60e-02
SLPPLIVYDRNGFRILLHFSQTGAPGHPEVQVLLLTMMSTAPQPVWDIMFQVAVPK

SEQ ID NO: 46153 - protein, 29 aa, Homo sapiens
  MAP TO AC002400.1; EXPRESSED IN PLACENTA, SIGNAL = 1.5; EXPRESSED IN BRAIN, SIGNAL = 1.7; EXPRESSED IN BONE MARROW, SIGNAL = 2.3; EXPRESSED IN LUNG, SIGNAL =   4; EST_HUMAN HIT: AW503803.1, EVALUE 2.00e-11
LCMTGMDSEFCSTSPRREPLGTQRYRCCS

SEQ ID NO: 46154 - protein, 45 aa, Homo sapiens [sequence omitted]

SEQ ID NO: 46155 - protein, 44 aa, Homo sapiens [sequence omitted]

SEQ ID NO: 46156 - protein, 34 aa, Homo sapiens
  MAP TO AC022063.3; EXPRESSED IN BONE MARROW, SIGNAL = 2.5; EXPRESSED IN ADULT LIVER, SIGNAL = 1.7; EXPRESSED IN BRAIN, SIGNAL = 2.1
TGHVAVVKEVKAEKESEFVQHLISVLGKSTFNGH

SEQ ID NO: 46157 - protein, 34 aa, Homo sapiens
  MAP TO AC023074.2; EXPRESSED IN BRAIN, SIGNAL = 1.5; EXPRESSED IN ADULT LIVER, SIGNAL = 1.5
CIFSYLSSEQKSVQSRPSPCLWAALCGCAALCCL

SEQ ID NO: 46158 - protein, 35 aa, Homo sapiens
  MAP TO AC008636.4; EXPRESSED IN ADULT LIVER, SIGNAL = 1.7; EXPRESSED IN LUNG, SIGNAL = 2.7; EXPRESSED IN BRAIN, SIGNAL = 1.7; EXPRESSED IN BONE MARROW, SIGNAL = 1.8; EXPRESSED IN HELA, SIGNAL = 1.7
MAGVSSNMAAGSSKASGPTEKGGSHGIFMTVISAV

SEQ ID NO: 46159 - protein, 30 aa, Homo sapiens
  MAP TO AL157882.1; EXPRESSED IN HELA, SIGNAL = 1.7; EXPRESSED IN LUNG, SIGNAL = 5.6; EXPRESSED IN BRAIN, SIGNAL = 1.5; EST_HUMAN HIT: H69501.1, EVALUE 2.60e+00
MTGVSGSKWASSWAPMQLSQMLAVAALGQI

SEQ ID NO: 46160 - protein, 43 aa, Homo sapiens [sequence omitted]

SEQ ID NO: 46161 - protein, 43 aa, Homo sapiens [sequence omitted]

SEQ ID NO: 46162 - protein, 20 aa, Homo sapiens
  MAP TO AC013379.4; EXPRESSED IN FETAL LIVER, SIGNAL = 1.6; EXPRESSED IN BRAIN, SIGNAL = 1.8; EXPRESSED IN PLACENTA, SIGNAL = 2.1; EXPRESSED IN ADULT LIVER, SIGNAL = 1.5; EXPRESSED IN BONE MARROW, SIGNAL = 1.8; EST_HUMAN HIT: Z25385.1, EVALUE 2.00e-03
TALGVEAMVLDVRDDSIGNQ

SEQ ID NO: 46163 - protein, 77 aa, Homo sapiens
  MAP TO AC013379.4; EXPRESSED IN FETAL LIVER, SIGNAL = 1.6; EXPRESSED IN BRAIN, SIGNAL = 1.8; EXPRESSED IN PLACENTA, SIGNAL = 2.1; EXPRESSED IN ADULT LIVER, SIGNAL = 1.5; EXPRESSED IN BONE MARROW, SIGNAL = 1.8; EST_HUMAN HIT: AW246185.1, EVALUE 5.00e-30
APWPGECCAGASVGWEILRCNLLGRDLLGPRTPSQTSPLFPGCAHPSRGWGSGRSSRRLPHREASAQAQLQKQGWTQ

SEQ ID NO: 46164 - protein, 156 aa, Homo sapiens
  MAP TO AC025289.1; EXPRESSED IN BRAIN, SIGNAL = 1.7; EXPRESSED IN LUNG, SIGNAL = 2.1; EST_HUMAN HIT: BF086811.1, EVALUE 3.00e-52; SWISSPROT HIT: P02197, EVALUE 7.30e+00
SSSLEDQNTVNGPVQIVNVKTLFRNSCFSEDQMAKPIKAFTADFVRQLLIGLPNQALGLTLCSFISALGVDIIAQVEAKDFGAESKVSVDDLCKKAVEHNIQIGKFSQLVMNRATVLASSYDTAWKKHDLVRRLETSISSCKTSLQRVQLHIAMFQ

SEQ ID NO: 46165 - protein, 41 aa, Homo sapiens
  MAP TO AC011449.3; EXPRESSED IN FETAL LIVER, SIGNAL = 1.8; EXPRESSED IN LUNG, SIGNAL = 2.2; EXPRESSED IN PLACENTA, SIGNAL = 1.5; EXPRESSED IN BRAIN, SIGNAL = 1.8; EXPRESSED IN ADULT LIVER, SIGNAL = 1.7; EXPRESSED IN HELA, SIGNAL = 2.1; SWISSPROT HIT: Q61085, EVALUE 1.00e-08; EST_HUMAN HIT: BE811306.1, EVALUE 3.00e-17
ACRTPSRDEAGVELLMTYFIQLGFVESRFFPPTRQMGLLFT

SEQ ID NO: 46166 - protein, 80 aa, Homo sapiens
  MAP TO AC018633.2; EXPRESSED IN BONE MARROW, SIGNAL = 2.9; EXPRESSED IN HELA, SIGNAL = 1.9; EXPRESSED IN LUNG, SIGNAL = 3.2; EXPRESSED IN BRAIN, SIGNAL = 1.9; EXPRESSED IN PLACENTA, SIGNAL = 1.6; EXPRESSED IN FETAL LIVER, SIGNAL = 1.9; EST_HUMAN HIT: BF677485.1, EVALUE 2.00e-17; SWISSPROT HIT: Q06814, EVALUE 9.50e-01
SSESDWETLDPSVLEDPNLKEREQLGSDQTNLFPKDSVPSESLPITVQPQANTGQVVLIPGLISGLEEDQYGMPLAIFTK

SEQ ID NO: 46167 - protein, 27 aa, Homo sapiens
  MAP TO AL135787.3; EXPRESSED IN BRAIN, SIGNAL = 1.4; EXPRESSED IN ADULT LIVER, SIGNAL = 4.6; EXPRESSED IN FETAL LIVER, SIGNAL = 3.4; EXPRESSED IN HELA, SIGNAL = 2.2; EST_HUMAN HIT: AA595480.1, EVALUE 7.00e-09; SWISSPROT HIT: Q14914, EVALUE 5.00e-10
MEAFVVYRWQGDARQKALKDLLKWVLE

SEQ ID NO: 46168 - protein, 17 aa, Homo sapiens
  MAP TO AL135787.3; EXPRESSED IN BRAIN, SIGNAL = 1.4; EXPRESSED IN ADULT LIVER, SIGNAL = 4.6; EXPRESSED IN FETAL LIVER, SIGNAL = 3.4; EXPRESSED IN HELA, SIGNAL = 2.2; EST_HUMAN HIT: AA595480.1, EVALUE 2.90e-02
WKLLSSTAGKEMPAKKL

SEQ ID NO: 46169 - protein, 55 aa, Homo sapiens
  MAP TO AC009275.5; EXPRESSED IN LUNG, SIGNAL = 3.3; EXPRESSED IN PLACENTA, SIGNAL = 2.7; EXPRESSED IN BRAIN, SIGNAL = 1.4; EXPRESSED IN HELA, SIGNAL = 2.9; SWISSPROT HIT: P15121, EVALUE 4.00e-26; EST_HUMAN HIT: BE257210.1, EVALUE 5.00e-25
PPGQVTEAVKVAIDVGYRHIDCAHVYQNENEVGVAIQEKLREQVVKREELFIVSK

SEQ ID NO: 46170 - protein, 71 aa, Homo sapiens
  MAP TO AC010352.4; EXPRESSED IN BRAIN, SIGNAL = 1.6; EXPRESSED IN LUNG, SIGNAL = 3.2; SWISSPROT HIT: O75962, EVALUE 1.00e-36; EST_HUMAN HIT: AI651284.1, EVALUE 1.00e-35
MLVTHDYTAVKEDEINVYQGEVVQILASNQQNMFLVFRAATDQCPAAEGWIPGFVLGHTSAVIVENPDGTL

SEQ ID NO: 46171 - protein, 20 aa, Homo sapiens
  MAP TO AL138829.2; EXPRESSED IN FETAL LIVER, SIGNAL = 1.7; EXPRESSED IN BRAIN, SIGNAL = 1.7; EXPRESSED IN PLACENTA, SIGNAL = 1.6; EXPRESSED IN ADULT LIVER, SIGNAL = 1.9; EXPRESSED IN BONE MARROW, SIGNAL = 1.5; EXPRESSED IN HELA, SIGNAL = 1.8; EXPRESSED IN LUNG, SIGNAL = 2.2
DLPSSCSGPKTPPLVLLVWH

SEQ ID NO: 46172 - protein, 52 aa, Homo sapiens
  MAP TO AF236875.1; EXPRESSED IN BRAIN, SIGNAL = 1.7; EXPRESSED IN PLACENTA, SIGNAL = 1.5; EXPRESSED IN ADULT LIVER, SIGNAL = 1.5; SWISSPROT HIT: Q9ZDM5, EVALUE 3.60e+00; EST_HUMAN HIT: BF330594.1, EVALUE 2.00e-15
HLLKMNKSSSDLEKVSQGSAESLSPSFRGVHVSFTTGSTDSLASDFRTCSDG

SEQ ID NO: 46173 - protein, 70 aa, Homo sapiens
  MAP TO AL138831.2; EXPRESSED IN BRAIN, SIGNAL = 1.5; EXPRESSED IN PLACENTA, SIGNAL = 1.4; EXPRESSED IN FETAL LIVER, SIGNAL = 1.9; EXPRESSED IN ADULT LIVER, SIGNAL = 1.5; EXPRESSED IN BONE MARROW, SIGNAL = 2.1; EXPRESSED IN LUNG, SIGNAL = 2.3; EST_HUMAN HIT: BE045890.1, EVALUE 3.00e-20; SWISSPROT HIT: Q13523, EVALUE 3.00e-21
KYKYLAEDSNMSVPSEPSSPQSSTRTRSPSPDDILERVAADVKEYERENVDTFEASVKAKHNLMTVEQNN

SEQ ID NO: 46174 - protein, 37 aa, Homo sapiens
  MAP TO AL138831.2; EXPRESSED IN BRAIN, SIGNAL = 1.5; EXPRESSED IN PLACENTA, SIGNAL = 1.4; EXPRESSED IN FETAL LIVER, SIGNAL = 1.9; EXPRESSED IN ADULT LIVER, SIGNAL = 1.5; EXPRESSED IN BONE MARROW, SIGNAL = 2.1; EXPRESSED IN LUNG, SIGNAL = 2.3; EST_HUMAN HIT: BE045890.1, EVALUE 4.00e-16
NINTLLKIATCLCHLNQAAPRAVREHDHHLQMTFWSE

SEQ ID NO: 46175 - protein, 45 aa, Homo sapiens
  MAP TO AC008860.5; EXPRESSED IN BRAIN, SIGNAL = 1.6; EXPRESSED IN LUNG, SIGNAL = 2.2; SWISSPROT HIT: P16871, EVALUE 2.00e-06; EST_HUMAN HIT: BF672285.1, EVALUE 2.00e-05
LRISGKTQCACALCHSLHLSMFSDFRIKPIVWPSLPDHKKTLEHL

SEQ ID NO: 46176 - protein, 31 aa, Homo sapiens
  MAP TO AL138688.11; EXPRESSED IN BRAIN, SIGNAL = 1.8; EXPRESSED IN BONE MARROW, SIGNAL = 2.7; EXPRESSED IN LUNG, SIGNAL = 1.9; EST_HUMAN HIT: AU130521.1, EVALUE 2.00e-12
TKTGVGPFNPGRMNVAGDVFQNGESATHHNP

SEQ ID NO: 46177 - protein, 72 aa, Homo sapiens
  MAP TO AC008764.4; EXPRESSED IN ADULT LIVER, SIGNAL = 1.4; EXPRESSED IN BRAIN, SIGNAL = 1.8; EXPRESSED IN LUNG, SIGNAL = 1.7; SWISSPROT HIT: Q02817, EVALUE 4.30e-01; EST_HUMAN HIT: AW590795.1, EVALUE 2.00e-26
WGPLTTTLATACLILASTSTRLGLDPSTLTSALPPMASTGSPHTCGDRAHPTSTTMTPAWSPMCPTSISLLG

SEQ ID NO: 46178 - protein, 51 aa, Homo sapiens
  MAP TO AC008850.4; EXPRESSED IN ADULT LIVER, SIGNAL = 2.5; EXPRESSED IN BONE MARROW, SIGNAL =   4; EXPRESSED IN LUNG, SIGNAL =  10; EXPRESSED IN PLACENTA, SIGNAL = 1.7; EXPRESSED IN BRAIN, SIGNAL = 1.3; EXPRESSED IN FETAL LIVER, SIGNAL = 1.9; SWISSPROT HIT: P97449, EVALUE 4.00e-14; EST_HUMAN HIT: AU140225.1, EVALUE 1.00e-11
LVAIPDFEAGAMENWGLLTFREETLLYDSNTSSMADRKLVTKIIAHELAHQ

SEQ ID NO: 46179 - protein, 40 aa, Homo sapiens
  MAP TO AC008850.4; EXPRESSED IN ADULT LIVER, SIGNAL = 2.5; EXPRESSED IN BONE MARROW, SIGNAL =   4; EXPRESSED IN LUNG, SIGNAL =  10; EXPRESSED IN PLACENTA, SIGNAL = 1.7; EXPRESSED IN BRAIN, SIGNAL = 1.3; EXPRESSED IN FETAL LIVER, SIGNAL = 1.9; SWISSPROT HIT: P19474, EVALUE 3.70e+00
IWWLFLTLKQEQWKIGVCSPSERRHFCMTVTLLQWRIESW

SEQ ID NO: 46180 - protein, 111 aa, Homo sapiens; identical to SEQ ID NO: 46038
  MAP TO AF223391.1; EXPRESSED IN BRAIN, SIGNAL = 1.6; EST_HUMAN HIT: AI932384.1, EVALUE 1.30e-02; SWISSPROT HIT: Q15878, EVALUE 1.00e-36

SEQ ID NO: 46181 - protein, 19 aa, Homo sapiens
  MAP TO AF223391.1; EXPRESSED IN BRAIN, SIGNAL = 1.6; EST_HUMAN HIT: BE734057.1, EVALUE 7.30e-01
ATSPSPTWPCTKTPTPQTV

SEQ ID NO: 46182 - protein, 85 aa, Homo sapiens
  MAP TO AC008397.4; EXPRESSED IN BRAIN, SIGNAL = 1.7; EXPRESSED IN LUNG, SIGNAL = 2.4; EXPRESSED IN ADULT LIVER, SIGNAL = 1.8; SWISSPROT HIT: P43175, EVALUE 8.80e+00; EST_HUMAN HIT: AA079410.1, EVALUE 2.00e-32
SPAPVCVQLVVHVGVSGMATTVTLEKCGHNKGYKGLDNCRFCPGSQCCVEDGPESIDSIIDMDAVCKRVTTLGLDVSVTISQDAG

SEQ ID NO: 46183 - protein, 69 aa, Homo sapiens
  MAP TO AC008397.4; EXPRESSED IN BRAIN, SIGNAL = 1.7; EXPRESSED IN LUNG, SIGNAL = 2.4; EXPRESSED IN ADULT LIVER, SIGNAL = 1.8; SWISSPROT HIT: P02845, EVALUE 5.10e+00; EST_HUMAN HIT: AW001242.1, EVALUE 1.00e-11
WWCMWGCQAWRPQSHWRNVDTTRATRGWTTAAFAPAPSAAWRTGLKALTPSSTWMLCASESPRWAWMCR

SEQ ID NO: 46184 - protein, 37 aa, Homo sapiens
  MAP TO AL117344.12; EXPRESSED IN BRAIN, SIGNAL = 1.6; EXPRESSED IN BONE MARROW, SIGNAL = 1.7; EXPRESSED IN ADULT LIVER, SIGNAL = 1.4; EXPRESSED IN FETAL LIVER, SIGNAL =  12; EXPRESSED IN LUNG, SIGNAL = 3.7
LACPRRTPFASLGFAFFISERCRWPLSFRPSPSDLRF

SEQ ID NO: 46185 - protein, 46 aa, Homo sapiens
  MAP TO AC008764.4; EXPRESSED IN PLACENTA, SIGNAL = 1.6; EXPRESSED IN BRAIN, SIGNAL = 1.6; EXPRESSED IN BONE MARROW, SIGNAL = 1.5; EXPRESSED IN ADULT LIVER, SIGNAL = 1.5; EST_HUMAN HIT: AA465388.1, EVALUE 2.00e-18; SWISSPROT HIT: P52177, EVALUE 8.00e-07
VYLSLIPIISGVLLATVTELSFDMWGLVSALAATLCFSLQNIFSKK

SEQ ID NO: 46186 - protein, 45 aa, Homo sapiens
  MAP TO AC008764.4; EXPRESSED IN PLACENTA, SIGNAL = 1.6; EXPRESSED IN BRAIN, SIGNAL = 1.6; EXPRESSED IN BONE MARROW, SIGNAL = 1.5; EXPRESSED IN ADULT LIVER, SIGNAL = 1.5; EST_HUMAN HIT: AA884264.1, EVALUE 1.00e-13
YTCHSSPSSAVSCWPPSPSCLLTCGDSSAPSPPRCASRFRTFSPK

SEQ ID NO: 46187 - protein, 61 aa, Homo sapiens
  MAP TO AC018500.2; EXPRESSED IN BRAIN, SIGNAL = 1.3; EXPRESSED IN BONE MARROW, SIGNAL = 1.7; EXPRESSED IN LUNG, SIGNAL = 1.8; EST_HUMAN HIT: BE882280.1, EVALUE 3.00e-17; SWISSPROT HIT: P11345, EVALUE 3.00e-18
MPSLSKDYYHCMEYNNDLYLFQRPRGQRDSSYYWEIEASEVMLSTRIGSGSFGTVYKGKWH

SEQ ID NO: 46188 - protein, 35 aa, Homo sapiens
  MAP TO AC018500.2; EXPRESSED IN BRAIN, SIGNAL = 1.3; EXPRESSED IN BONE MARROW, SIGNAL = 1.7; EXPRESSED IN LUNG, SIGNAL = 1.8
CPHYQKIITIAWSIIMISTCFRGLVDREIQAIIGK

SEQ ID NO: 46189 - protein, 50 aa, Homo sapiens
  MAP TO AC008481.4; EXPRESSED IN BRAIN, SIGNAL = 1.3; EXPRESSED IN FETAL LIVER, SIGNAL = 2.2; EXPRESSED IN ADULT LIVER, SIGNAL = 1.7; EXPRESSED IN BONE MARROW, SIGNAL = 2.1; EXPRESSED IN HELA, SIGNAL = 2.7; EXPRESSED IN LUNG, SIGNAL = 5.5; EXPRESSED IN PLACENTA, SIGNAL = 2.8; EST_HUMAN HIT: AU125849.1, EVALUE 5.00e-06; SWISSPROT HIT: P14314, EVALUE 4.00e-07
CCDGTDEYNSGVICENTCKYVGDSTPPITPPQDFAWLHPVNRAHSLFCFS

SEQ ID NO: 46190 - protein, 40 aa, Homo sapiens
  MAP TO AC008481.4; EXPRESSED IN BRAIN, SIGNAL = 1.3; EXPRESSED IN FETAL LIVER, SIGNAL = 2.2; EXPRESSED IN ADULT LIVER, SIGNAL = 1.7; EXPRESSED IN BONE MARROW, SIGNAL = 2.1; EXPRESSED IN HELA, SIGNAL = 2.7; EXPRESSED IN LUNG, SIGNAL = 5.5; EXPRESSED IN PLACENTA, SIGNAL = 2.8; EST_HUMAN HIT: BF373194.1, EVALUE 1.40e-02; SWISSPROT HIT: P34631, EVALUE 1.30e+00
TAAMEQTSTTAASSVRTPASTWVTVPLPSPHPKTLPGSTQ

SEQ ID NO: 46191 - protein, 47 aa, Homo sapiens
  MAP TO AC002038.1; EXPRESSED IN BRAIN, SIGNAL = 1.6; EXPRESSED IN PLACENTA, SIGNAL = 1.7; EXPRESSED IN ADULT LIVER, SIGNAL = 1.8; EXPRESSED IN FETAL LIVER, SIGNAL = 1.6; EST_HUMAN HIT: BE786235.1, EVALUE 2.00e-11
MLLAGFTIRNVPFINEHVHVPNAWSSILRSIALNIILIRAGLGLDPQ

SEQ ID NO: 46192 - protein, 31 aa, Homo sapiens
  MAP TO AC023078.2; EXPRESSED IN BRAIN, SIGNAL = 1.3; EXPRESSED IN LUNG, SIGNAL = 1.7
NGNHHQNLYQAKRFAAGGSCLILMAAEVAAE

SEQ ID NO: 46193 - protein, 21 aa, Homo sapiens
  MAP TO AC023078.2; EXPRESSED IN BRAIN, SIGNAL = 1.3; EXPRESSED IN LUNG, SIGNAL = 1.7
EMVTIIRTFIKPNALLLEGLA

SEQ ID NO: 46194 - protein, 62 aa, Homo sapiens
  MAP TO AC024049.2; EXPRESSED IN BRAIN, SIGNAL = 1.6; EXPRESSED IN PLACENTA, SIGNAL = 1.5; EXPRESSED IN ADULT LIVER, SIGNAL = 1.5; EXPRESSED IN FETAL LIVER, SIGNAL = 1.5; EST_HUMAN HIT: AA868675.1, EVALUE 7.00e-31; SWISSPROT HIT: P08960, EVALUE 2.60e+00
TAARADDCGCDEFVPVTTAALQVLGGSSLDAHPFCLLPGLVHCRSSRSAEVPPPPLFGVLAS

SEQ ID NO: 46195 - protein, 70 aa, Homo sapiens
  MAP TO AC002059.3; EXPRESSED IN PLACENTA, SIGNAL = 2.3; EXPRESSED IN BRAIN, SIGNAL = 2.3; EXPRESSED IN BONE MARROW, SIGNAL = 2.4; EXPRESSED IN FETAL LIVER, SIGNAL =   2; EXPRESSED IN LUNG, SIGNAL = 2.7; EST_HUMAN HIT: AW885982.1, EVALUE 9.00e-05; SWISSPROT HIT: Q10567, EVALUE 3.00e-22
IGGTNFVAPPTAAVPANLGAPIGSGLSDLFDLTSGVGTLSGSYVAPKAVSHLSSVLAGAERSYGDWHVGS

SEQ ID NO: 46196 - protein, 41 aa, Homo sapiens
  MAP TO AC002059.3; EXPRESSED IN PLACENTA, SIGNAL = 2.3; EXPRESSED IN BRAIN, SIGNAL = 2.3; EXPRESSED IN BONE MARROW, SIGNAL = 2.4; EXPRESSED IN FETAL LIVER, SIGNAL =   2; EXPRESSED IN LUNG, SIGNAL = 2.7
CLLTPTSDSFPPFPDWGHQLRGTSNSSSTSQSWSTHRQWPE

SEQ ID NO: 46197 - protein, 65 aa, Homo sapiens
  MAP TO AC000159.6; EXPRESSED IN ADULT LIVER, SIGNAL = 1.5; EXPRESSED IN FETAL LIVER, SIGNAL = 1.8; EXPRESSED IN LUNG, SIGNAL = 2.4; EXPRESSED IN BRAIN, SIGNAL = 2.2; EXPRESSED IN PLACENTA, SIGNAL = 1.7; EXPRESSED IN BONE MARROW, SIGNAL = 1.8; EST_HUMAN HIT: AA338665.1, EVALUE 9.00e-30; SWISSPROT HIT: Q15173, EVALUE 4.00e-32
VPASELHELLSRKLAQCGVMFDFLDCVADLKGKEVKRAALNELVECVGSTRGVLIEPVYPDIIRM

SEQ ID NO: 46198 - protein, 27 aa, Homo sapiens
  MAP TO AC000159.6; EXPRESSED IN ADULT LIVER, SIGNAL = 1.5; EXPRESSED IN FETAL LIVER, SIGNAL = 1.8; EXPRESSED IN LUNG, SIGNAL = 2.4; EXPRESSED IN BRAIN, SIGNAL = 2.2; EXPRESSED IN PLACENTA, SIGNAL = 1.7; EXPRESSED IN BONE MARROW, SIGNAL = 1.8
CPLLPRCAGFRAARAAEPEAGPVWGDV

SEQ ID NO: 46199 - protein, 23 aa, Homo sapiens
  MAP TO AL035682.16; EXPRESSED IN PLACENTA, SIGNAL = 1.5; EXPRESSED IN BRAIN, SIGNAL = 2.3; EXPRESSED IN LUNG, SIGNAL = 1.2; EXPRESSED IN ADULT LIVER, SIGNAL = 2.3; EXPRESSED IN HELA, SIGNAL = 1.5; EST_HUMAN HIT: AW245422.1, EVALUE 4.00e-05
VRERLAQLVKNVTTPSMPLVNLK

SEQ ID NO: 46200 - protein, 51 aa, Homo sapiens
  MAP TO AC012535.3; EXPRESSED IN ADULT LIVER, SIGNAL = 1.5; EXPRESSED IN BRAIN, SIGNAL = 1.4; EXPRESSED IN PLACENTA, SIGNAL = 2.4; EST_HUMAN HIT: AW863215.1, EVALUE 6.60e+00; SWISSPROT HIT: P06439, EVALUE 1.20e+00
IQTILFAKCPTRKEQLCRTCGRRRETEDLRHLCLMSNCYQSQLGELDTSPL

SEQ ID NO: 46201 - protein, 33 aa, Homo sapiens
  MAP TO AC012535.3; EXPRESSED IN ADULT LIVER, SIGNAL = 1.5; EXPRESSED IN BRAIN, SIGNAL = 1.4; EXPRESSED IN PLACENTA, SIGNAL = 2.4
FRQSSLPNVQQERSSYAELVVEGGKLRTLDISV

SEQ ID NO: 46202 - protein, 61 aa, Homo sapiens
  MAP TO AC011375.3; EXPRESSED IN BRAIN, SIGNAL = 2.8; EXPRESSED IN BONE MARROW, SIGNAL = 4.2; EXPRESSED IN LUNG, SIGNAL = 2.5; SWISSPROT HIT: Q14687, EVALUE 1.00e-04; EST_HUMAN HIT: AI745330.1, EVALUE 6.00e-27
NLDSEKEKELERQARIEASLREREREVQKARSEQTKEIDREREQHKREEAIQNFKALLSDM

SEQ ID NO: 46203 - protein, 24 aa, Homo sapiens
  MAP TO AC016728.2; EXPRESSED IN BRAIN, SIGNAL = 1.3; EST_HUMAN HIT: AW503208.1, EVALUE 3.20e-01
RMGIQSSMTANKLSSRLMPHKIIS

SEQ ID NO: 46204 - protein, 101 aa, Homo sapiens
  MAP TO AC018500.2; EXPRESSED IN BRAIN, SIGNAL = 1.7; EXPRESSED IN PLACENTA, SIGNAL = 1.3; EXPRESSED IN LUNG, SIGNAL = 2.6; EST_HUMAN HIT: BE254058.1, EVALUE 3.00e-56; SWISSPROT HIT: P47973, EVALUE 1.20e-01
LSGMAERKTQPSMVSNPGSCSDPQPSPEMKPHSYLDAIRSGLDDVEASSSYSNEQQLCPYAAAGECRFGDACVYLHGEVCEICRLQVLHPFDPEQRKAHEK

SEQ ID NO: 46205 - protein, 81 aa, Homo sapiens
  MAP TO AC010618.4; EXPRESSED IN PLACENTA, SIGNAL = 1.8; EXPRESSED IN BRAIN, SIGNAL = 1.7; EXPRESSED IN BONE MARROW, SIGNAL = 2.4; EXPRESSED IN FETAL LIVER, SIGNAL = 1.6; EXPRESSED IN HELA, SIGNAL = 2.8; EXPRESSED IN LUNG, SIGNAL = 5.6; EST_HUMAN HIT: BE965909.2, EVALUE 2.00e-34; SWISSPROT HIT: P52764, EVALUE 3.80e+00
SEYKAHFSLRNLHAFSVEPLLIYPTHYTGDDGYVSDTETSVVWNNEHVKTDWDRAKSQKMREQQALSREAKNSDVLQSPLD

SEQ ID NO: 46206 - protein, 33 aa, Homo sapiens
  MAP TO AC010618.4; EXPRESSED IN PLACENTA, SIGNAL = 1.8; EXPRESSED IN BRAIN, SIGNAL = 1.7; EXPRESSED IN BONE MARROW, SIGNAL = 2.4; EXPRESSED IN FETAL LIVER, SIGNAL = 1.6; EXPRESSED IN HELA, SIGNAL = 2.8; EXPRESSED IN LUNG, SIGNAL = 5.6; EST_HUMAN HIT: AW630291.1, EVALUE 2.00e-13; SWISSPROT HIT: P33076, EVALUE 3.80e+00
PSTRPTSPSATCMPSLWSRCSSTPHTTQETMAM

SEQ ID NO: 46207 - protein, 60 aa, Homo sapiens
  MAP TO AL132986.2; EXPRESSED IN PLACENTA, SIGNAL = 2.4; EXPRESSED IN BRAIN, SIGNAL = 1.5; EXPRESSED IN FETAL LIVER, SIGNAL = 1.8; EXPRESSED IN HELA, SIGNAL = 2.1; EXPRESSED IN BONE MARROW, SIGNAL = 3.4; EXPRESSED IN LUNG, SIGNAL = 5.1; EST_HUMAN HIT: AW605200.1, EVALUE 7.00e-29; SWISSPROT HIT: P12814, EVALUE 6.00e-30
EIGRISIEMHGTLEDQLSHLRQYEKSIVNYKPKIDQLEGDHQLIQEALIFDNKHTNYTME

SEQ ID NO: 46208 - protein, 65 aa, Homo sapiens
  MAP TO AC007225.2; EXPRESSED IN PLACENTA, SIGNAL = 1.4; EXPRESSED IN BRAIN, SIGNAL = 1.9; EXPRESSED IN BONE MARROW, SIGNAL = 3.2; EXPRESSED IN FETAL LIVER, SIGNAL = 1.7; EXPRESSED IN HELA, SIGNAL = 2.4; EXPRESSED IN LUNG, SIGNAL =   4; EST_HUMAN HIT: AU124131.1, EVALUE 5.00e-21; SWISSPROT HIT: P34110, EVALUE 2.00e-09
ISDSMDFVLLNFAEMNKLWVRMQHQGHSRDREKRERERQELRILVGTNLVRLSQLEGVNVERYKQ

SEQ ID NO: 46209 - protein, 25 aa, Homo sapiens
  MAP TO AC012568.3; EXPRESSED IN BRAIN, SIGNAL = 1.4; EXPRESSED IN LUNG, SIGNAL = 1.8; EST_HUMAN HIT: BF038801.1, EVALUE 1.00e-07
VAKAFWMAIGGDRDEIEGLSSDEEH

SEQ ID NO: 46210 - protein, 25 aa, Homo sapiens
  MAP TO AC012568.3; EXPRESSED IN BRAIN, SIGNAL = 1.4; EXPRESSED IN LUNG, SIGNAL = 1.8; EST_HUMAN HIT: AI905536.1, EVALUE 1.00e-08; SWISSPROT HIT: O05161, EVALUE 8.70e+00
WPKHSGWQSGETEMKLKAFHLMKST

SEQ ID NO: 46211 - protein, 56 aa, Homo sapiens
  MAP TO AC010489.4; EXPRESSED IN BRAIN, SIGNAL = 2.1; SWISSPROT HIT: P20002, EVALUE 5.00e-29; EST_HUMAN HIT: AI590078.1, EVALUE 6.00e-28
MAEGEITTFTALTEKFNLPPGNYKKPKLLYCSNGGHFLRILPDGTVDGTRDRSDQH

SEQ ID NO: 46212 - protein, 17 aa, Homo sapiens
  MAP TO AC010489.4; EXPRESSED IN BRAIN, SIGNAL = 2.1; EST_HUMAN HIT: AI590078.1, EVALUE 6.00e-03
AAAAEPWLKGKSPPSQP

SEQ ID NO: 46213 - protein, 56 aa, Homo sapiens
  MAP TO AL133454.2; EXPRESSED IN FETAL LIVER, SIGNAL = 2.2; EXPRESSED IN HELA, SIGNAL =   2; EXPRESSED IN ADULT LIVER, SIGNAL = 1.8; EXPRESSED IN BRAIN, SIGNAL = 1.8; EST_HUMAN HIT: BE872183.1, EVALUE 2.50e-01; SWISSPROT HIT: P48280, EVALUE 2.40e-01
MPLWPIMVITSTLALMVSPSGLCHSKILSLLWILGNIAPWKHLLSTPACVPSPVHS

SEQ ID NO: 46214 - protein, 73 aa, Homo sapiens
  MAP TO AL139289.4; EXPRESSED IN BONE MARROW, SIGNAL = 2.5; EXPRESSED IN LUNG, SIGNAL = 2.5; EXPRESSED IN PLACENTA, SIGNAL = 2.1; EXPRESSED IN BRAIN, SIGNAL = 2.1; EXPRESSED IN ADULT LIVER, SIGNAL = 1.4; EXPRESSED IN FETAL LIVER, SIGNAL = 2.1; EXPRESSED IN HELA, SIGNAL = 1.7; EST_HUMAN HIT: BE834350.1, EVALUE 1.00e-38; SWISSPROT HIT: P49191, EVALUE 4.80e-01
IQFVLVSLHISQYYFMSSCNYQYPVIIHLIWMYGTIFFMLFSNFWYHSYTKGKRLPRALQQNGAPGIAKVKAN

SEQ ID NO: 46215 - protein, 68 aa, Homo sapiens
  MAP TO AL139289.4; EXPRESSED IN BONE MARROW, SIGNAL = 2.5; EXPRESSED IN LUNG, SIGNAL = 2.5; EXPRESSED IN PLACENTA, SIGNAL = 2.1; EXPRESSED IN BRAIN, SIGNAL = 2.1; EXPRESSED IN ADULT LIVER, SIGNAL = 1.4; EXPRESSED IN FETAL LIVER, SIGNAL = 2.1; EXPRESSED IN HELA, SIGNAL = 1.7; EST_HUMAN HIT: BE834350.1, EVALUE 6.00e-35; SWISSPROT HIT: Q14517, EVALUE 1.20e+00
SSLSWSHCTSPSTTLCPAVTTSTQSLFTSSGCMAPSSSCCSPTSGITLIPRASGCPVHFSKMELQVLP

SEQ ID NO: 46216 - protein, 63 aa, Homo sapiens
  MAP TO AC018500.2; EXPRESSED IN BRAIN, SIGNAL = 1.7; EXPRESSED IN PLACENTA, SIGNAL = 1.7; EXPRESSED IN BONE MARROW, SIGNAL = 1.6; EXPRESSED IN ADULT LIVER, SIGNAL = 2.1; SWISSPROT HIT: P01415, EVALUE 7.10e+00; EST_HUMAN HIT: H47097.1, EVALUE 1.00e-01
CLETKGHTRVGRQLSSCLTAAVSVRSRLRIVLCPALPFCTSPVFPTFLFPCLVSIIWIPSIRI

SEQ ID NO: 46217 - protein, 42 aa, Homo sapiens
  MAP TO AC009399.5; EXPRESSED IN BRAIN, SIGNAL = 1.3; EXPRESSED IN PLACENTA, SIGNAL = 1.6; EXPRESSED IN BONE MARROW, SIGNAL = 1.5; EXPRESSED IN ADULT LIVER, SIGNAL = 1.5; EXPRESSED IN LUNG, SIGNAL = 2.6; EST_HUMAN HIT: BE295638.1, EVALUE 8.00e-16
EAELEEVLTFYTQKNKSASVFLGTHSKISKNNNNYSDSGAKG

SEQ ID NO: 46218 - protein, 35 aa, Homo sapiens
  MAP TO AC007954.6; EXPRESSED IN BRAIN, SIGNAL = 1.9; EXPRESSED IN PLACENTA, SIGNAL = 1.8; EXPRESSED IN BONE MARROW, SIGNAL = 1.6; EXPRESSED IN FETAL LIVER, SIGNAL = 1.6; EXPRESSED IN LUNG, SIGNAL = 2.4; EXPRESSED IN ADULT LIVER, SIGNAL = 1.7; EXPRESSED IN HELA, SIGNAL = 1.7; SWISSPROT HIT: Q62447, EVALUE 1.70e+00; EST_HUMAN HIT: AA938175.1, EVALUE 8.00e-14
SPPLMAPPCIWTFAKVKEFKSKLGKEKNSRLVVKR

SEQ ID NO: 46219 - protein, 69 aa, Homo sapiens
  MAP TO AL034380.25; EXPRESSED IN BRAIN, SIGNAL = 1.9; EXPRESSED IN PLACENTA, SIGNAL = 1.8; EXPRESSED IN LUNG, SIGNAL = 3.2; EXPRESSED IN BONE MARROW, SIGNAL = 6.1; SWISSPROT HIT: P47136, EVALUE 1.00e+01; EST_HUMAN HIT: AU140888.1, EVALUE 2.00e-25
VNKNKKWRELATNLNVGTSSSAASSLKKQYIQCLYAFECKIERGEDPPPDIFAAADSKKSQPKIQPPSP

SEQ ID NO: 46220 - protein, 61 aa, Homo sapiens
  MAP TO AL136080.6; EXPRESSED IN BRAIN, SIGNAL = 1.7; EXPRESSED IN PLACENTA, SIGNAL = 1.7; EXPRESSED IN ADULT LIVER, SIGNAL = 2.2; EXPRESSED IN FETAL LIVER, SIGNAL = 1.7; EXPRESSED IN HELA, SIGNAL = 1.7; EXPRESSED IN BONE MARROW, SIGNAL = 1.6
GDGGQGFPGEKGLPGLPGEKGHPGPPGLPGNGLPGLPGPRGLPGDKGKDGLPGQQGLPGSK

SEQ ID NO: 46221 - protein, 28 aa, Homo sapiens
  MAP TO AL135787.3; EXPRESSED IN BONE MARROW, SIGNAL = 2.6; EXPRESSED IN FETAL LIVER, SIGNAL =   2; EXPRESSED IN LUNG, SIGNAL = 3.3; EXPRESSED IN BRAIN, SIGNAL = 2.2; EXPRESSED IN PLACENTA, SIGNAL = 2.1; EXPRESSED IN ADULT LIVER, SIGNAL =   2; EXPRESSED IN HELA, SIGNAL = 1.7; EST_HUMAN HIT: BF031132.1, EVALUE 1.00e-10
SLRQLQSFNSTVCRMPARMPCWWVFQLE

SEQ ID NO: 46222 - protein, 92 aa, Homo sapiens
  MAP TO AL121985.13; EXPRESSED IN PLACENTA, SIGNAL = 1.7; EXPRESSED IN BRAIN, SIGNAL = 1.5; SWISSPROT HIT: P10265, EVALUE 1.00e-35; EST_HUMAN HIT: AV732728.1, EVALUE 1.00e-23
FSGTTTPTVPSTSGNKPVTTVQQLSPATSGSAAVDLCTIQAVSLLPGEPPQKIPTGVYGPLPEETVGLILGRSRLNLKGVQIHTGVVDSDYK

SEQ ID NO: 46223 - protein, 113 aa, Homo sapiens
  MAP TO AC008397.4; EXPRESSED IN BRAIN, SIGNAL = 1.6; EXPRESSED IN ADULT LIVER, SIGNAL = 1.5; EXPRESSED IN LUNG, SIGNAL = 1.7; SWISSPROT HIT: P47135, EVALUE 4.80e-01; EST_HUMAN HIT: BF529892.1, EVALUE 6.30e-01
MGNPSLLQRSGTTSMVSHVPLYPSSARRALSSPFQTEAVPNPLQKTVSGNMAPSSRWDAMGPKNSYRSVHGRIVPELLESSVARVRPLQYVQRQPSQASARSGANPTHRPSAE

SEQ ID NO: 46224 - protein, 77 aa, Homo sapiens
  MAP TO AC008397.4; EXPRESSED IN BRAIN, SIGNAL = 1.6; EXPRESSED IN ADULT LIVER, SIGNAL = 1.5; EXPRESSED IN LUNG, SIGNAL = 1.7; EST_HUMAN HIT: AL045034.1, EVALUE 7.00e-03; SWISSPROT HIT: Q08826, EVALUE 4.10e+00
WGILVFFRGQGPPAWSHMCHYIRPRLEGHCPVPSRQKLSPIHSRKQCLETWLRAAAGTPWALKIPTDPCMVGLFQNC

SEQ ID NO: 46225 - protein, 68 aa, Homo sapiens
  MAP TO AL137190.2; EXPRESSED IN BRAIN, SIGNAL = 2.7; EXPRESSED IN LUNG, SIGNAL = 1.9; EST_HUMAN HIT: AI970398.1, EVALUE 3.00e-33; SWISSPROT HIT: P22544, EVALUE 3.40e+00
LPMMGGAFMDSPNEDFSTEYSLFNSSANVHAAANGQGQPEDPPRSSNDAVLLWIAIIATLGNIVVVGV

SEQ ID NO: 46226 - protein, 58 aa, Homo sapiens [sequence omitted]

SEQ ID NO: 46227 - protein, 39 aa, Homo sapiens
  MAP TO AC008655.3; EXPRESSED IN LUNG, SIGNAL =  40; EXPRESSED IN BRAIN, SIGNAL = 1.3; EST_HUMAN HIT: BF513122.1, EVALUE 6.00e-16; SWISSPROT HIT: O96009, EVALUE 5.00e-17
LHHRFDPKASSSFQANGTKFAIQYGTGRVDGILSEDKLT

SEQ ID NO: 46228 - protein, 29 aa, Homo sapiens
  MAP TO AC008655.3; EXPRESSED IN LUNG, SIGNAL =  40; EXPRESSED IN BRAIN, SIGNAL = 1.3; EST_HUMAN HIT: BF513122.1, EVALUE 1.00e-10
GYTTDLIPKPLAPSRPMGPSLPFNMELGG

SEQ ID NO: 46229 - protein, 29 aa, Homo sapiens
  MAP TO AC015971.2; EXPRESSED IN PLACENTA, SIGNAL = 1.5; EXPRESSED IN BRAIN, SIGNAL = 1.4; EXPRESSED IN LUNG, SIGNAL = 1.7
VRKSHKAKEMLAYMLVIGPWRVVIVTGRM

SEQ ID NO: 46230 - protein, 46 aa, Homo sapiens
  MAP TO AC013557.3; EXPRESSED IN BRAIN, SIGNAL = 1.3; EXPRESSED IN BONE MARROW, SIGNAL = 3.1; EXPRESSED IN LUNG, SIGNAL =   2; EXPRESSED IN FETAL LIVER, SIGNAL = 2.5; EXPRESSED IN HELA, SIGNAL = 3.3; EST_HUMAN HIT: BE565059.1, EVALUE 1.80e-02
LLTPLWIRSSENCFSPHTNLTSSSSFGSLHFSSTDSGPSTSGSKKS

SEQ ID NO: 46231 - protein, 44 aa, Homo sapiens
  MAP TO AC013557.3; EXPRESSED IN BRAIN, SIGNAL = 1.3; EXPRESSED IN BONE MARROW, SIGNAL = 3.1; EXPRESSED IN LUNG, SIGNAL =   2; EXPRESSED IN FETAL LIVER, SIGNAL = 2.5; EXPRESSED IN HELA, SIGNAL = 3.3; EST_HUMAN HIT: BE266237.1, EVALUE 7.00e-19; SWISSPROT HIT: P52181, EVALUE 4.80e+00
STRASRRSCSDLTPTSTLCQKIGSTRRLTSSSWNLRCWAQSLWS

SEQ ID NO: 46232 - protein, 30 aa, Homo sapiens
  MAP TO AP001206.1; EXPRESSED IN ADULT LIVER, SIGNAL = 1.5; EXPRESSED IN BRAIN, SIGNAL = 1.5; EXPRESSED IN BONE MARROW, SIGNAL = 1.5; EXPRESSED IN FETAL LIVER, SIGNAL = 1.7; EXPRESSED IN LUNG, SIGNAL =   2
DGLDENNMAQNPLFNLKIISAGTMMFESLP

SEQ ID NO: 46233 - protein, 41 aa, Homo sapiens
  MAP TO AC018720.2; EXPRESSED IN BRAIN, SIGNAL = 1.5; EXPRESSED IN BONE MARROW, SIGNAL = 8.2; EXPRESSED IN LUNG, SIGNAL = 2.7; EXPRESSED IN FETAL LIVER, SIGNAL = 2.4; EST_HUMAN HIT: AI284244.1, EVALUE 1.90e-02
LSQPDLCLLISASSAQRDLPTVLRLQLSALQLGNDPQVEEL

SEQ ID NO: 46234 - protein, 37 aa, Homo sapiens
  MAP TO AC018720.2; EXPRESSED IN BRAIN, SIGNAL = 1.5; EXPRESSED IN BONE MARROW, SIGNAL = 8.2; EXPRESSED IN LUNG, SIGNAL = 2.7; EXPRESSED IN FETAL LIVER, SIGNAL = 2.4
CLSLISASSSLPLQPSGISLLCSDSSSLHCSWETIPR

SEQ ID NO: 46235 - protein, 50 aa, Homo sapiens
  MAP TO AL158800.1; EXPRESSED IN ADULT LIVER, SIGNAL = 1.5; EXPRESSED IN BRAIN, SIGNAL = 1.3; EXPRESSED IN PLACENTA, SIGNAL = 1.3
VTTRWPFGTSVQETSAKCFLKTLAATKITHVLPITENLYRQSKPLIVPSQ

SEQ ID NO: 46236 - protein, 41 aa, Homo sapiens
  MAP TO AC023890.3; EXPRESSED IN BONE MARROW, SIGNAL = 2.2; EXPRESSED IN LUNG, SIGNAL = 2.9; EXPRESSED IN PLACENTA, SIGNAL = 2.2; EXPRESSED IN BRAIN, SIGNAL = 1.5; EXPRESSED IN HELA, SIGNAL = 1.8; EXPRESSED IN FETAL LIVER, SIGNAL =   2; EST_HUMAN HIT: AI924812.1, EVALUE 2.00e-14; SWISSPROT HIT: O95067, EVALUE 1.00e-15
NLKQQYYTGYTENEVLEVMQHMAKNVVKVNENLTKFIVSTT

SEQ ID NO: 46237 - protein, 49 aa, Homo sapiens
  MAP TO AL133211.1; EXPRESSED IN BONE MARROW, SIGNAL = 1.7; EXPRESSED IN LUNG, SIGNAL =   2; EXPRESSED IN BRAIN, SIGNAL = 1.8; EST_HUMAN HIT: AW968744.1, EVALUE 2.00e-08
TSSAASSPLKKEQPLFTLRQVGMICERLLKEREEKVREEYEEILNTKLA

SEQ ID NO: 46238 - protein, 34 aa, Homo sapiens
  MAP TO AC016289.3; EXPRESSED IN ADULT LIVER, SIGNAL = 1.4; EXPRESSED IN BRAIN, SIGNAL = 1.5; EXPRESSED IN FETAL LIVER, SIGNAL = 1.6; EXPRESSED IN HELA, SIGNAL = 1.8; EXPRESSED IN LUNG, SIGNAL = 2.4; SWISSPROT HIT: Q15172, EVALUE 9.80e-01
ISANIFRTLPPSDNPDFDPEEDEPTLEASWPHIQ

SEQ ID NO: 46239 - protein, 33 aa, Homo sapiens
  MAP TO AC016289.3; EXPRESSED IN ADULT LIVER, SIGNAL = 1.4; EXPRESSED IN BRAIN, SIGNAL = 1.5; EXPRESSED IN FETAL LIVER, SIGNAL = 1.6; EXPRESSED IN HELA, SIGNAL = 1.8; EXPRESSED IN LUNG, SIGNAL = 2.4; EST_HUMAN HIT: AU141220.1, EVALUE 6.00e-11
SVLTSSVHFLQVIIQILIQKRMNPRLRPLGLTY

SEQ ID NO: 46240 - protein, 129 aa, Homo sapiens
  MAP TO AC002467.1; EXPRESSED IN BRAIN, SIGNAL = 1.4; EXPRESSED IN BONE MARROW, SIGNAL = 2.2; EXPRESSED IN LUNG, SIGNAL = 2.3; EST_HUMAN HIT: AI939634.1, EVALUE 6.00e-45
CSDPVQRIEQCTRGSLFMCSIVQGCKRTYLSQRDLQAHINHRHMRAGKPVTRASLENVHPPIAPPPTEIPERFIMPPDKHHMSHIPPKQHIMMPPPPLQHVPHEHYNQPHEDIRAPPAELSMAPPPPRS

SEQ ID NO: 46241 - protein, 49 aa, Homo sapiens
  MAP TO AL121716.16; EXPRESSED IN ADULT LIVER, SIGNAL = 1.8; EXPRESSED IN PLACENTA, SIGNAL = 1.9; EXPRESSED IN BRAIN, SIGNAL = 1.4; EXPRESSED IN FETAL LIVER, SIGNAL = 1.8; EXPRESSED IN HELA, SIGNAL = 1.8; EST_HUMAN HIT: BE816078.1, EVALUE 4.00e-23; SWISSPROT HIT: Q9Y3R5, EVALUE 2.00e-16
AHNAPSYRACVQLLSSLSGYQYTRRAWKKEAFDLFMDPSFFQMDASCVN

SEQ ID NO: 46242 - protein, 49 aa, Homo sapiens
  MAP TO AL121716.16; EXPRESSED IN ADULT LIVER, SIGNAL = 1.8; EXPRESSED IN PLACENTA, SIGNAL = 1.9; EXPRESSED IN BRAIN, SIGNAL = 1.4; EXPRESSED IN FETAL LIVER, SIGNAL = 1.8; EXPRESSED IN HELA, SIGNAL = 1.8; EST_HUMAN HIT: BE010882.1, EVALUE 7.00e-21; SWISSPROT HIT: P47435, EVALUE 8.10e+00
KVRTRRLRWFFFLVVHIMPLVIELVSSCSAVLVGISTHGELGKKKLLTS

SEQ ID NO: 46243 - protein, 29 aa, Homo sapiens
  MAP TO AL157826.2; EXPRESSED IN BRAIN, SIGNAL = 1.4; EXPRESSED IN FETAL LIVER, SIGNAL = 1.7; EXPRESSED IN HELA, SIGNAL =   2; EXPRESSED IN ADULT LIVER, SIGNAL = 1.5; EXPRESSED IN PLACENTA, SIGNAL = 1.4
LHPIIFQAQQFYLCCLHENEERPSRCEYV

SEQ ID NO: 46244 - protein, 17 aa, Homo sapiens
  MAP TO AL157826.2; EXPRESSED IN BRAIN, SIGNAL = 1.4; EXPRESSED IN FETAL LIVER, SIGNAL = 1.7; EXPRESSED IN HELA, SIGNAL =   2; EXPRESSED IN ADULT LIVER, SIGNAL = 1.5; EXPRESSED IN PLACENTA, SIGNAL = 1.4
PSSNHFSSPTILPLLSS

SEQ ID NO: 46245 - protein, 71 aa, Homo sapiens
  MAP TO AC013533.3; EXPRESSED IN BRAIN, SIGNAL = 1.7; EXPRESSED IN PLACENTA, SIGNAL = 2.9; EXPRESSED IN FETAL LIVER, SIGNAL = 1.9; EXPRESSED IN BONE MARROW, SIGNAL = 1.9; EXPRESSED IN LUNG, SIGNAL = 4.1; EST_HUMAN HIT: BE909250.1, EVALUE 2.00e-24; SWISSPROT HIT: P56546, EVALUE 2.00e-25
RTGQAVAVRAKAFGFSVIFYDPYLQDGIERSLGVQRVYTLQDLLYQSDCVSLHCNLNEHNHHLINDFTIKQ

SEQ ID NO: 46246 - protein, 69 aa, Homo sapiens
  MAP TO AC013533.3; EXPRESSED IN BRAIN, SIGNAL = 1.7; EXPRESSED IN PLACENTA, SIGNAL = 2.9; EXPRESSED IN FETAL LIVER, SIGNAL = 1.9; EXPRESSED IN BONE MARROW, SIGNAL = 1.9; EXPRESSED IN LUNG, SIGNAL = 4.1; SWISSPROT HIT: P09577, EVALUE 1.80e+00; EST_HUMAN HIT: AA313730.1, EVALUE 4.00e-28
VARGRRLQFEPRPLDSASYFMTPTCRMGSSGPWACRGSTPCRICCIRATASPCTAISTNITTTSSMTLP

SEQ ID NO: 46247 - protein, 45 aa, Homo sapiens
  MAP TO AC007845.12; EXPRESSED IN PLACENTA, SIGNAL = 1.5; EXPRESSED IN BRAIN, SIGNAL = 1.4; EST_HUMAN HIT: BF149173.1, EVALUE 2.00e-20; SWISSPROT HIT: Q9PB06, EVALUE 2.80e+00
KRNGTQKQERKQQQHAHLGFRDGIGQGGAGPRGTVMGDQLGRDVF

SEQ ID NO: 46248 - protein, 45 aa, Homo sapiens
  MAP TO AC007845.12; EXPRESSED IN PLACENTA, SIGNAL = 1.5; EXPRESSED IN BRAIN, SIGNAL = 1.4; EST_HUMAN HIT: BF149173.1, EVALUE 5.00e-04
EERDAEAGEKAAAARTPGLQRRHRPRRGRATGNCDGRPAWKGCIH

SEQ ID NO: 46249 - protein, 42 aa, Homo sapiens
  MAP TO AC023118.2; EXPRESSED IN BRAIN, SIGNAL = 1.4
MLLNTGVCEWKFFKIHRVTLQIFQLAFSSNNPASGTSSSNFN

SEQ ID NO: 46250 - protein, 43 aa, Homo sapiens
  MAP TO AL133341.9; EXPRESSED IN BRAIN, SIGNAL = 1.6; EXPRESSED IN PLACENTA, SIGNAL = 1.4; EXPRESSED IN ADULT LIVER, SIGNAL = 1.5; EXPRESSED IN HELA, SIGNAL = 1.8; EST_HUMAN HIT: BF343612.1, EVALUE 1.80e+00
MAKKSERFEALEGFNVPSVWAMWKVRRKRILLIPEAWKRTPSS

SEQ ID NO: 46251 - protein, 24 aa, Homo sapiens
  MAP TO AL133341.9; EXPRESSED IN BRAIN, SIGNAL = 1.6; EXPRESSED IN PLACENTA, SIGNAL = 1.4; EXPRESSED IN ADULT LIVER, SIGNAL = 1.5; EXPRESSED IN HELA, SIGNAL = 1.8
WPKSQRDLKLWKDSMCLLFGPCGK

SEQ ID NO: 46252 - protein, 41 aa, Homo sapiens
  MAP TO AC023154.3; EXPRESSED IN BRAIN, SIGNAL =  62; EXPRESSED IN ADULT LIVER, SIGNAL = 1.5; EST_HUMAN HIT: T56807.1, EVALUE 4.80e-01; SWISSPROT HIT: P17980, EVALUE 1.90e-01
MCGTGILPDAAAAEAPGLPKEDHLEGFLEVQAKKEAVKDDI

SEQ ID NO: 46253 - protein, 36 aa, Homo sapiens
  MAP TO AC023154.3; EXPRESSED IN BRAIN, SIGNAL =  62; EXPRESSED IN ADULT LIVER, SIGNAL = 1.5; EST_HUMAN HIT: BF689195.1, EVALUE 3.00e-05
CVGRGFYLMQLQQRPQGSPKKTTWKASWRCRPRRKL

SEQ ID NO: 46254 - protein, 44 aa, Homo sapiens
  MAP TO AC023314.3; EXPRESSED IN BRAIN, SIGNAL = 2.1
YHIEHFFKLDFMEISQQLWKVDRIGIIGQMRTLRLSSHVHKEAK

SEQ ID NO: 46255 - protein, 20 aa, Homo sapiens
  MAP TO AC023314.3; EXPRESSED IN BRAIN, SIGNAL = 2.1
ITLSTFSNLILWKSPNNSGR

SEQ ID NO: 46256 - protein, 45 aa, Homo sapiens
  MAP TO AC019205.2; EXPRESSED IN LUNG, SIGNAL = 2.2; EXPRESSED IN BRAIN, SIGNAL = 1.3; EST_HUMAN HIT: AI637624.1, EVALUE 1.00e-19; SWISSPROT HIT: P24782, EVALUE 9.00e-14
KVRILIATDLASRGLDVHDVTHVYNFDFPRNIEEYVHRIGRTGRA

SEQ ID NO: 46257 - protein, 45 aa, Homo sapiens
  MAP TO AC020714.2; EXPRESSED IN BRAIN, SIGNAL = 2.3; EXPRESSED IN PLACENTA, SIGNAL =   2; EXPRESSED IN HELA, SIGNAL = 1.6; EXPRESSED IN ADULT LIVER, SIGNAL = 2.4; EXPRESSED IN BONE MARROW, SIGNAL = 2.3; EXPRESSED IN FETAL LIVER, SIGNAL =   2; EXPRESSED IN LUNG, SIGNAL = 3.9; EST_HUMAN HIT: R55626.1, EVALUE 3.00e-10
PDRLKQFSVAPRHFEEMIPPERPRIAFQTPLPPLSAPSVPPIPSV

SEQ ID NO: 46258 - protein, 51 aa, Homo sapiens
  MAP TO AC010849.3; EXPRESSED IN BRAIN, SIGNAL = 2.7; EXPRESSED IN PLACENTA, SIGNAL = 1.4; EXPRESSED IN ADULT LIVER, SIGNAL = 1.6; EST_HUMAN HIT: BE677533.1, EVALUE 7.60e-01; SWISSPROT HIT: P34194, EVALUE 2.70e+00
LFFGCIEFLIYFSILSQQVFMTKSLLWLQWLAQFVLMSVPETMWSWCIPSS

SEQ ID NO: 46259 - protein, 36 aa, Homo sapiens
  MAP TO AC018698.3; EXPRESSED IN ADULT LIVER, SIGNAL = 1.6; EXPRESSED IN PLACENTA, SIGNAL = 1.4; EXPRESSED IN BRAIN, SIGNAL = 1.6; EXPRESSED IN BONE MARROW, SIGNAL = 1.7; EXPRESSED IN FETAL LIVER, SIGNAL = 1.9; EXPRESSED IN HELA, SIGNAL =   2; SWISSPROT HIT: P16499, EVALUE 8.40e+00
DPYSTNILVFAESATMLDAKMENRKNVFPDIMEYSK

SEQ ID NO: 46260 - protein, 57 aa, Homo sapiens
  MAP TO AC005678.1; EXPRESSED IN BRAIN, SIGNAL = 1.3; EXPRESSED IN FETAL LIVER, SIGNAL = 1.9; EXPRESSED IN HELA, SIGNAL = 1.8; EST_HUMAN HIT: AV689461.1, EVALUE 1.00e-21; SWISSPROT HIT: O43309, EVALUE 2.00e-22
EMHTKEQILELLVLEQFLTILPEELQAWVRQHRPVSGEEAVTVLEDLERELDDPGEQ

SEQ ID NO: 46261 - protein, 62 aa, Homo sapiens
  MAP TO AL034380.25; EXPRESSED IN BRAIN, SIGNAL = 1.7; EST_HUMAN HIT: AW374815.1, EVALUE 6.00e-11; SWISSPROT HIT: P38822, EVALUE 4.50e+00
NYKRPMDGTYGPPAKRHEGEMYSVPYSTGQGQPQQQQLPPAQPQPASQQQAAQPSPQQDVYN

SEQ ID NO: 46262 - protein, 85 aa, Homo sapiens
  MAP TO AL034380.25; EXPRESSED IN BRAIN, SIGNAL = 1.7; EST_HUMAN HIT: BE734000.1, EVALUE 3.00e-24
TSPLLVSALELQAANGWHIWPSCQAARRGDVQRAIQHWAGAASAAAVAPSPAPACQPATSCPAFPSARCIQPVWQCLSCHCHSCY

SEQ ID NO: 46263 - protein, 28 aa, Homo sapiens
  MAP TO AC021881.2; EXPRESSED IN BRAIN, SIGNAL = 1.3; EST_HUMAN HIT: AW083969.1, EVALUE 1.80e-01; SWISSPROT HIT: Q05622, EVALUE 3.80e+00
CRRKAMKFVGICSLPVCGLLGTRPHSRR

SEQ ID NO: 46264 - protein, 37 aa, Homo sapiens
  MAP TO AC023820.2; EXPRESSED IN BRAIN, SIGNAL = 2.3; EST_HUMAN HIT: AW794227.1, EVALUE 9.60e+00; SWISSPROT HIT: Q10337, EVALUE 6.40e+00
FSEGSHIWTAFLDYASIFHHVIAGCEEESDLLNKSVH

SEQ ID NO: 46265 - protein, 31 aa, Homo sapiens
  MAP TO AC023820.2; EXPRESSED IN BRAIN, SIGNAL = 2.3; SWISSPROT HIT: P52519, EVALUE 8.50e+00
SQKAVTSGQHSLTTHQYSIMSLPAVRRKVTS

SEQ ID NO: 46266 - protein, 42 aa, Homo sapiens
  MAP TO AC019219.2; EXPRESSED IN BRAIN, SIGNAL =  18; SWISSPROT HIT: Q08779, EVALUE 3.70e+00
NGVQQLRSIYLVQVIENEWAWRMNRFTRTRGWMENQLLFKQH

SEQ ID NO: 46267 - protein, 54 aa, Homo sapiens
  MAP TO AC019205.2; EXPRESSED IN BRAIN, SIGNAL = 1.5; SWISSPROT HIT: P32715, EVALUE 1.40e-01; EST_HUMAN HIT: BF243707.1, EVALUE 6.40e+00
MLSAFQRLFRVLFVIETVSEYGVLIFIYGWPFLQTLAMLLIGTVSFHLWIRRNR

SEQ ID NO: 46268 - protein, 18 aa, Homo sapiens
  MAP TO AC019205.2; EXPRESSED IN BRAIN, SIGNAL = 1.5
ARNAKCCRPSRGCSESYL

SEQ ID NO: 46269 - protein, 88 aa, Homo sapiens
  MAP TO AC016026.12; EXPRESSED IN BRAIN, SIGNAL = 1.5; SWISSPROT HIT: Q08432, EVALUE 5.10e+00; EST_HUMAN HIT: BE244316.1, EVALUE 4.00e-13
MEERKHETMNPAHVLFDRFVQATTCKGTLKAFQELCDHLELKPKDYRSFYHKLKSKLNYWKAKALWAKLDKRGSHKDYKKGKACTNTK

SEQ ID NO: 46270 - protein, 42 aa, Homo sapiens
  MAP TO AC002045.1; EXPRESSED IN PLACENTA, SIGNAL = 2.1; EXPRESSED IN BRAIN, SIGNAL = 1.6; EXPRESSED IN ADULT LIVER, SIGNAL = 1.5; EXPRESSED IN LUNG, SIGNAL =   2; SWISSPROT HIT: Q9XZD5, EVALUE 8.30e+00; EST_HUMAN HIT: AI732639.1, EVALUE 9.30e+00
IIAIHPVTQTKSPNNIFESFSITPYIQPIATFSFIYLLKSRP

SEQ ID NO: 46271 - protein, 42 aa, Homo sapiens
  MAP TO AC002045.1; EXPRESSED IN PLACENTA, SIGNAL = 2.1; EXPRESSED IN BRAIN, SIGNAL = 1.6; EXPRESSED IN ADULT LIVER, SIGNAL = 1.5; EXPRESSED IN LUNG, SIGNAL =   2
SSPFTQLPKPRARTTSLSPSPSHPTFNQLPPSLLYTSLSHGL

SEQ ID NO: 46272 - protein, 66 aa, Homo sapiens
  MAP TO AC011462.3; EXPRESSED IN BRAIN, SIGNAL = 1.4; EXPRESSED IN LUNG, SIGNAL = 2.5; EST_HUMAN HIT: AW890299.1, EVALUE 3.10e+00
LPTSPPAWARLSRCPLLTGTSSSGGWGPCPVGTALKRGAARLGGPPPPPRSLTSPPTPRTSAASCC

SEQ ID NO: 46273 - protein, 27 aa, Homo sapiens
  MAP TO AC023392.2; EXPRESSED IN PLACENTA, SIGNAL =   2; EXPRESSED IN FETAL LIVER, SIGNAL = 1.8; EXPRESSED IN BRAIN, SIGNAL = 1.4; EXPRESSED IN BONE MARROW, SIGNAL = 1.5; EXPRESSED IN ADULT LIVER, SIGNAL = 1.5
IQDGHQSSRPHPQQDRQREKEQPIISL

SEQ ID NO: 46274 - protein, 27 aa, Homo sapiens
  MAP TO AC023392.2; EXPRESSED IN PLACENTA, SIGNAL =   2; EXPRESSED IN FETAL LIVER, SIGNAL = 1.8; EXPRESSED IN BRAIN, SIGNAL = 1.4; EXPRESSED IN BONE MARROW, SIGNAL = 1.5; EXPRESSED IN ADULT LIVER, SIGNAL = 1.5; SWISSPROT HIT: O88011, EVALUE 8.60e+00
PRWTPELKTTSTAGQTKRERTAHHLPL

SEQ ID NO: 46275 - protein, 31 aa, Homo sapiens
  MAP TO AL157996.1; EXPRESSED IN BRAIN, SIGNAL = 1.4; EXPRESSED IN PLACENTA, SIGNAL = 1.3
FFIIKESFLLYYSESEKKSFETNKYFNIHPK

SEQ ID NO: 46276 - protein, 30 aa, Homo sapiens
  MAP TO AL157996.1; EXPRESSED IN BRAIN, SIGNAL = 1.4; EXPRESSED IN PLACENTA, SIGNAL = 1.3
FSSSKRAFCFTTLRAKKRALKPINTSIYIL

SEQ ID NO: 46277 - protein, 31 aa, Homo sapiens
  MAP TO AC020559.2; EXPRESSED IN BRAIN, SIGNAL = 1.3
MELVEDKSGNKMILILVGENKTTGRPTEMGD

SEQ ID NO: 46278 - protein, 39 aa, Homo sapiens
  MAP TO AL121981.8; EXPRESSED IN BRAIN, SIGNAL = 2.1; EXPRESSED IN PLACENTA, SIGNAL = 1.4; EXPRESSED IN ADULT LIVER, SIGNAL = 1.4
EVLVTPRKFEDVGSDLESFPRFPFYNLGGSDRERGPSRP

SEQ ID NO: 46279 - protein, 38 aa, Homo sapiens
  MAP TO AL121981.8; EXPRESSED IN BRAIN, SIGNAL = 2.1; EXPRESSED IN PLACENTA, SIGNAL = 1.4; EXPRESSED IN ADULT LIVER, SIGNAL = 1.4; SWISSPROT HIT: P47403, EVALUE 8.40e+00; EST_HUMAN HIT: BE957547.2, EVALUE 4.30e+00
RSSSPRGSSKTWAVTWKASRDSPSITWVAQTGSGVPAG

SEQ ID NO: 46280 - protein, 28 aa, Homo sapiens
  MAP TO AF223391.1; EXPRESSED IN BRAIN, SIGNAL = 1.7; EXPRESSED IN PLACENTA, SIGNAL = 1.4; EXPRESSED IN ADULT LIVER, SIGNAL = 1.7; EST_HUMAN HIT: BE263507.1, EVALUE 2.00e+00
CSFQCMDMVYWRKILRPCPNPSMKSTWN

SEQ ID NO: 46281 - protein, 46 aa, Homo sapiens
  MAP TO AC006530.4; EXPRESSED IN LUNG, SIGNAL = 1.9; EXPRESSED IN BRAIN, SIGNAL = 1.8; EXPRESSED IN PLACENTA, SIGNAL = 2.2; SWISSPROT HIT: P49770, EVALUE 2.00e-20; EST_HUMAN HIT: BE280791.1, EVALUE 2.00e-19
VIIGTKTILANGALRAVTGTHTLALAAKHHSTPLIVCAPMFKLSPQ

SEQ ID NO: 46282 - protein, 44 aa, Homo sapiens
  MAP TO AC006530.4; EXPRESSED IN LUNG, SIGNAL = 1.9; EXPRESSED IN BRAIN, SIGNAL = 1.8; EXPRESSED IN PLACENTA, SIGNAL = 2.2; EST_HUMAN HIT: BE280791.1, EVALUE 2.00e-18
PGQWGPESCDRNSHSGTGSKTPFHPTHRLCTYVQTFSTGKCVCL

SEQ ID NO: 46283 - protein, 62 aa, Homo sapiens; identical to SEQ ID NO: 36411
  MAP TO AC008045.5; EXPRESSED IN BRAIN, SIGNAL = 1.6; EXPRESSED IN PLACENTA, SIGNAL = 1.4; EXPRESSED IN ADULT LIVER, SIGNAL = 2.3; EXPRESSED IN LUNG, SIGNAL = 2.4; EST_HUMAN HIT: BE348399.1, EVALUE 1.00e-09; SWISSPROT HIT: Q21313, EVALUE 4.00e-07

SEQ ID NO: 46284 - protein, 39 aa, Homo sapiens
  MAP TO AC008045.5; EXPRESSED IN BRAIN, SIGNAL = 1.6; EXPRESSED IN PLACENTA, SIGNAL = 1.4; EXPRESSED IN ADULT LIVER, SIGNAL = 2.3; EXPRESSED IN LUNG, SIGNAL = 2.4; EST_HUMAN HIT: BE348399.1, EVALUE 9.00e-07; SWISSPROT HIT: P55200, EVALUE 4.30e-01
CLRTRSRAAVMKSPSPLRPGSVTASSCTRASRLTMSTWL

SEQ ID NO: 46285 - protein, 47 aa, Homo sapiens
  MAP TO AC011449.3; EXPRESSED IN PLACENTA, SIGNAL = 1.5; EXPRESSED IN BRAIN, SIGNAL = 1.6; EXPRESSED IN ADULT LIVER, SIGNAL = 1.8; EXPRESSED IN FETAL LIVER, SIGNAL = 1.6; EST_HUMAN HIT: BE208545.1, EVALUE 2.00e-19; SWISSPROT HIT: P05659, EVALUE 6.20e+00
KSQKKIEVLKKQVEKAMGNEMSAHQYLANLVGLAENITQERDSLMCL

SEQ ID NO: 46286 - protein, 36 aa, Homo sapiens
  MAP TO AC011449.3; EXPRESSED IN PLACENTA, SIGNAL = 1.5; EXPRESSED IN BRAIN, SIGNAL = 1.6; EXPRESSED IN ADULT LIVER, SIGNAL = 1.8; EXPRESSED IN FETAL LIVER, SIGNAL = 1.6; EST_HUMAN HIT: BF155567.1, EVALUE 6.00e-06
NLKRKLRSSKSRWKKPWGTKCLLISTWQTLLAWQKT

SEQ ID NO: 46287 - protein, 128 aa, Homo sapiens
  MAP TO AC007954.6; EXPRESSED IN BRAIN, SIGNAL = 1.6; EXPRESSED IN PLACENTA, SIGNAL = 1.7; EXPRESSED IN LUNG, SIGNAL = 1.6; EXPRESSED IN ADULT LIVER, SIGNAL = 1.8; EST_HUMAN HIT: AA281401.1, EVALUE 2.00e-19; SWISSPROT HIT: O43708, EVALUE 1.00e-03
GWPNFSFTAYSSWETKASTAPAIRVRAVTVASGRACPLEWGNGDCLCGASGNSSSSLTALSRPGCHILTSSHAQSVTQLGAHFITMEAKAQKALCPLPAPRIRCLCGLPTALEQILQSTAGIYCVGDE

SEQ ID NO: 46288 - protein, 75 aa, Homo sapiens
  MAP TO AC012614.3; EXPRESSED IN ADULT LIVER, SIGNAL = 1.5; EXPRESSED IN FETAL LIVER, SIGNAL = 1.6; EXPRESSED IN BRAIN, SIGNAL = 1.6; EXPRESSED IN PLACENTA, SIGNAL = 1.3; EST_HUMAN HIT: AW797339.1, EVALUE 4.10e+00
QPCCSVPNSPLTPSLPTSFFSPSSQSSFLLFLENIKFTPTRGTWHSVWTLILFSLFPHSMLKGCLLQEALPDHLI

SEQ ID NO: 46289 - protein, 34 aa, Homo sapiens
  MAP TO AC012614.3; EXPRESSED IN ADULT LIVER, SIGNAL = 1.5; EXPRESSED IN FETAL LIVER, SIGNAL = 1.6; EXPRESSED IN BRAIN, SIGNAL = 1.6; EXPRESSED IN PLACENTA, SIGNAL = 1.3
CFQGRARRMIGMKERRRTWAKMGLEASWGQSSRA

SEQ ID NO: 46290 - protein, 52 aa, Homo sapiens
  MAP TO AL136418.1; EXPRESSED IN PLACENTA, SIGNAL =   2; EXPRESSED IN BRAIN, SIGNAL = 1.8; EXPRESSED IN BONE MARROW, SIGNAL = 2.3; EXPRESSED IN FETAL LIVER, SIGNAL = 1.9; EXPRESSED IN LUNG, SIGNAL = 2.8; EST_HUMAN HIT: BE439748.1, EVALUE 2.00e-25
EEEEYETKGGRRRTWDDDYVLKRQFSALVPAFDPRPGRTNVQQTTDLEIPPP

SEQ ID NO: 46291 - protein, 20 aa, Homo sapiens
  MAP TO AL136418.1; EXPRESSED IN PLACENTA, SIGNAL =   2; EXPRESSED IN BRAIN, SIGNAL = 1.8; EXPRESSED IN BONE MARROW, SIGNAL = 2.3; EXPRESSED IN FETAL LIVER, SIGNAL = 1.9; EXPRESSED IN LUNG, SIGNAL = 2.8; EST_HUMAN HIT: BE439748.1, EVALUE 2.00e-04
KKKSTKLKEDAGEHGMMIMC

SEQ ID NO: 46292 - protein, 157 aa, Homo sapiens
  MAP TO AL135787.3; EXPRESSED IN BRAIN, SIGNAL = 1.5; EXPRESSED IN PLACENTA, SIGNAL = 2.2; EXPRESSED IN HELA, SIGNAL = 1.7; EXPRESSED IN FETAL LIVER, SIGNAL = 1.9; EXPRESSED IN ADULT LIVER, SIGNAL = 1.5; EXPRESSED IN LUNG, SIGNAL = 1.8; SWISSPROT HIT: P28934, EVALUE 8.30e+00; EST_HUMAN HIT: BE148650.1, EVALUE 9.00e-58
FFSWWNSYNKAISYLATVPKYRIQATEIAKQQGLLKKAKEKGKNKKSKEEIRDEEENIIKNIIKSKIDIKGGYQKPQICDLLLFQIILAPFHLCSYIVWYCRWIYNFNIKGKEYGEEERLYIIRKSMKMSKSQFDSLEDHQKETFLKRELWIKENYE

SEQ ID NO: 46293 - protein, 64 aa, Homo sapiens
  MAP TO AC002400.1; EXPRESSED IN PLACENTA, SIGNAL = 2.5; EXPRESSED IN BRAIN, SIGNAL = 1.7; EXPRESSED IN BONE MARROW, SIGNAL = 1.6; SWISSPROT HIT: Q61670, EVALUE 7.70e+00; EST_HUMAN HIT: BE393994.1, EVALUE 2.60e+00
ENKYKEEEWLVDFHYKFYLAYKTKLALSLGVGEGTRQPLFCNNDAALPGPVAEGLVGKTGSVER

SEQ ID NO: 46294 - protein, 29 aa, Homo sapiens
  MAP TO AL138761.3; EXPRESSED IN BRAIN, SIGNAL = 1.7; EXPRESSED IN HELA, SIGNAL = 1.6; EXPRESSED IN ADULT LIVER, SIGNAL = 1.4; EXPRESSED IN FETAL LIVER, SIGNAL = 1.7
FLSRYLALLFPLSLSPLDEENNSGVKLKY

SEQ ID NO: 46295 - protein, 24 aa, Homo sapiens
  MAP TO AL138761.3; EXPRESSED IN BRAIN, SIGNAL = 1.7; EXPRESSED IN HELA, SIGNAL = 1.6; EXPRESSED IN ADULT LIVER, SIGNAL = 1.4; EXPRESSED IN FETAL LIVER, SIGNAL = 1.7
SSLAILLSSSLCLSLHWTKRTTQG

SEQ ID NO: 46296 - protein, 44 aa, Homo sapiens
  MAP TO AL138717.2; EXPRESSED IN BRAIN, SIGNAL = 1.5; EXPRESSED IN PLACENTA, SIGNAL = 1.8; EXPRESSED IN FETAL LIVER, SIGNAL = 2.1; EXPRESSED IN HELA, SIGNAL = 1.9; EXPRESSED IN ADULT LIVER, SIGNAL = 1.5; EXPRESSED IN BONE MARROW, SIGNAL = 1.7; EXPRESSED IN LUNG, SIGNAL =   3; SWISSPROT HIT: P33296, EVALUE 3.00e-10; EST_HUMAN HIT: AW139747.1, EVALUE 2.00e-21
DNLFEWHFTVRGPPDSDFDGGVYHGRIVLPPEYPMKPPSIILLT

SEQ ID NO: 46297 - protein, 26 aa, Homo sapiens
  MAP TO AL138717.2; EXPRESSED IN BRAIN, SIGNAL = 1.5; EXPRESSED IN PLACENTA, SIGNAL = 1.8; EXPRESSED IN FETAL LIVER, SIGNAL = 2.1; EXPRESSED IN HELA, SIGNAL = 1.9; EXPRESSED IN ADULT LIVER, SIGNAL = 1.5; EXPRESSED IN BONE MARROW, SIGNAL = 1.7; EXPRESSED IN LUNG, SIGNAL =   3; EST_HUMAN HIT: AA809901.1, EVALUE 8.00e-08
ITFLNGTSRLEGPQTPILMEEFITGG

SEQ ID NO: 46298 - protein, 26 aa, Homo sapiens
  MAP TO AL121809.1; EXPRESSED IN PLACENTA, SIGNAL = 1.8; EXPRESSED IN BRAIN, SIGNAL = 1.7; EXPRESSED IN BONE MARROW, SIGNAL = 1.6; EXPRESSED IN FETAL LIVER, SIGNAL =   2; EXPRESSED IN HELA, SIGNAL = 2.1; EXPRESSED IN ADULT LIVER, SIGNAL =   2
LRICFSYPVQSIYEVINAPVCCHIQL

SEQ ID NO: 46299 - protein, 28 aa, Homo sapiens
  MAP TO AC011025.4; EXPRESSED IN BRAIN, SIGNAL = 1.7; EXPRESSED IN BONE MARROW, SIGNAL = 7.1; EXPRESSED IN LUNG, SIGNAL = 4.4; EST_HUMAN HIT: AW793306.1, EVALUE 8.00e-10; SWISSPROT HIT: P37840, EVALUE 6.00e-11
NEEGAPQEGILEDMPVDPDNEAYEMPSE

SEQ ID NO: 46300 - protein, 28 aa, Homo sapiens
  MAP TO AC011025.4; EXPRESSED IN BRAIN, SIGNAL = 1.7; EXPRESSED IN BONE MARROW, SIGNAL = 7.1; EXPRESSED IN LUNG, SIGNAL = 4.4; EST_HUMAN HIT: AW793306.1, EVALUE 1.00e-10
MKKEPHRKEFWKICLWILTMRLMKCLLR

SEQ ID NO: 46301 - protein, 47 aa, Homo sapiens
  MAP TO AL159141.1; EXPRESSED IN LUNG, SIGNAL = 3.5; EXPRESSED IN BRAIN, SIGNAL = 1.4; EXPRESSED IN PLACENTA, SIGNAL = 1.5; EXPRESSED IN BONE MARROW, SIGNAL = 2.6; EXPRESSED IN FETAL LIVER, SIGNAL = 1.6; EST_HUMAN HIT: AU119105.1, EVALUE 2.00e-21
LLAKERKRKRKMACGFVCQPTRKTAFLTAGASASWRSSSKHARCGCS

SEQ ID NO: 46302 - protein, 38 aa, Homo sapiens
  MAP TO AC016372.2; EXPRESSED IN BRAIN, SIGNAL = 1.4; EXPRESSED IN ADULT LIVER, SIGNAL = 2.9
AICCLFTSILNLDVRVSSLNRVLNAALESLTALTISRL

SEQ ID NO: 46303 - protein, 42 aa, Homo sapiens
  MAP TO AC009936.4; EXPRESSED IN BRAIN, SIGNAL = 6.4; EXPRESSED IN PLACENTA, SIGNAL =   2; EXPRESSED IN HELA, SIGNAL = 2.1; EXPRESSED IN ADULT LIVER, SIGNAL = 5.1; EXPRESSED IN BONE MARROW, SIGNAL = 2.4; EXPRESSED IN FETAL LIVER, SIGNAL = 2.9; EXPRESSED IN LUNG, SIGNAL =   6; EST_HUMAN HIT: AA493542.1, EVALUE 5.00e-07
KRLGPDAKMGVGDELVSLVLSVVRLQEHIQHAVCYSGEHDEV

SEQ ID NO: 46304 - protein, 51 aa, Homo sapiens
  MAP TO AL117375.12; EXPRESSED IN PLACENTA, SIGNAL = 1.5; EXPRESSED IN BRAIN, SIGNAL = 1.5; EXPRESSED IN BONE MARROW, SIGNAL = 1.6; EXPRESSED IN HELA, SIGNAL = 1.7; EXPRESSED IN ADULT LIVER, SIGNAL = 1.6; EXPRESSED IN FETAL LIVER, SIGNAL = 1.7; SWISSPROT HIT: P53904, EVALUE 1.20e+00
LSFPTILSHYILLHAISQNLMHHGYARKNSADKVEKGTMISSDQSYAIEVC

SEQ ID NO: 46305 - protein, 66 aa, Homo sapiens
  MAP TO AL121948.7; EXPRESSED IN BRAIN, SIGNAL = 1.5; EXPRESSED IN PLACENTA, SIGNAL = 1.3; EXPRESSED IN ADULT LIVER, SIGNAL = 1.5; SWISSPROT HIT: Q61045, EVALUE 1.00e-33; EST_HUMAN HIT: AW879919.1, EVALUE 7.00e-12
VIHCSGYLKIRQYSLDMSPFDGCYQNVGLVAVGHSLPPSAVTEIKLHSNMFMFRASLDMKLIFLDS

SEQ ID NO: 46306 - protein, 38 aa, Homo sapiens
  MAP TO AL133163.2; EXPRESSED IN BONE MARROW, SIGNAL = 2.1; EXPRESSED IN BRAIN, SIGNAL = 1.3; EXPRESSED IN PLACENTA, SIGNAL = 1.4; EXPRESSED IN FETAL LIVER, SIGNAL = 1.6; EXPRESSED IN HELA, SIGNAL =   2; EST_HUMAN HIT: BE385954.1, EVALUE 5.00e-14
MHLFGFSLFPFNFQLSKEFHFLFIYSLFEQLRIILLYN

SEQ ID NO: 46307 - protein, 45 aa, Homo sapiens
  MAP TO AL122127.3; EXPRESSED IN PLACENTA, SIGNAL = 1.9; EXPRESSED IN BRAIN, SIGNAL =   2; EXPRESSED IN BONE MARROW, SIGNAL = 1.5; EXPRESSED IN HELA, SIGNAL =   2; EXPRESSED IN ADULT LIVER, SIGNAL =   2; EXPRESSED IN FETAL LIVER, SIGNAL = 2.1; EST_HUMAN HIT: AA932868.1, EVALUE 1.40e+00; SWISSPROT HIT: P30431, EVALUE 4.80e+00
TAQGASVPADLGAALSPPPVCGEVLALVGEETFFPLLPILGSLAG

SEQ ID NO: 46308 - protein, 28 aa, Homo sapiens
  MAP TO AC009399.5; EXPRESSED IN BRAIN, SIGNAL = 1.9; EXPRESSED IN PLACENTA, SIGNAL = 1.5; EST_HUMAN HIT: AA614255.1, EVALUE 2.00e-10
RMQHTHGFKAFHILPQTFLLPAEYAEFC

SEQ ID NO: 46309 - protein, 21 aa, Homo sapiens
  MAP TO AC009399.5; EXPRESSED IN BRAIN, SIGNAL = 1.9; EXPRESSED IN PLACENTA, SIGNAL = 1.5; EST_HUMAN HIT: AU131383.1, EVALUE 2.00e-06; SWISSPROT HIT: P27460, EVALUE 6.70e+00
NAAYTWIQGFSHPPPDLPPAS

SEQ ID NO: 46310 - protein, 53 aa, Homo sapiens
  MAP TO AL157789.1; EXPRESSED IN BRAIN, SIGNAL = 1.3; EXPRESSED IN BONE MARROW, SIGNAL = 1.7; EXPRESSED IN LUNG, SIGNAL = 1.8
ETIMSTFRSNMLSLLQSICHSVGWMFTLISLLLTSIKSPTPRSTFTSSNRIAG

SEQ ID NO: 46311 - protein, 57 aa, Homo sapiens
  MAP TO AC007376.8; EXPRESSED IN PLACENTA, SIGNAL = 1.5; EXPRESSED IN BRAIN, SIGNAL = 1.5; EST_HUMAN HIT: AA120843.1, EVALUE 5.50e-01
PGTGCSCHHHHSHRHHHSHHHYTILITIIITTTTDIVWNMYLCLFPNLMLNCNPSYC

SEQ ID NO: 46312 - protein, 30 aa, Homo sapiens
  MAP TO AC007376.8; EXPRESSED IN PLACENTA, SIGNAL = 1.5; EXPRESSED IN BRAIN, SIGNAL = 1.5
AVIIITAIVIIILIIITPSSSPSSSPPPLI

SEQ ID NO: 46313 - protein, 53 aa, Homo sapiens
  MAP TO AC008962.4; EXPRESSED IN BRAIN, SIGNAL = 1.6; EXPRESSED IN BONE MARROW, SIGNAL = 1.6; EXPRESSED IN LUNG, SIGNAL = 1.7; EXPRESSED IN ADULT LIVER, SIGNAL = 1.7; EXPRESSED IN FETAL LIVER, SIGNAL = 1.6; EST_HUMAN HIT: BE818421.1, EVALUE 2.00e-22; SWISSPROT HIT: P24903, EVALUE 1.00e-25
EPFDPTFVLSRSVSNIICSVLFGSRFDYDDERLLTIIRLINDNFQIMSSPWGE

SEQ ID NO: 46314 - protein, 88 aa, Homo sapiens
  MAP TO AC011467.3; EXPRESSED IN BRAIN, SIGNAL = 1.3; EXPRESSED IN PLACENTA, SIGNAL = 1.4; EXPRESSED IN BONE MARROW, SIGNAL = 1.5; EXPRESSED IN HELA, SIGNAL = 1.8; EXPRESSED IN ADULT LIVER, SIGNAL = 1.9; EXPRESSED IN FETAL LIVER, SIGNAL = 1.6; EST_HUMAN HIT: AW178177.1, EVALUE 2.00e-16; SWISSPROT HIT: P15261, EVALUE 1.50e+00
ALGCGAGVQSHVGPVTVTTGPDSVTAADAAGLCRVLRAVGWGGSECRLTPHPYKFHVEPYGETGWLLTRAAASPPNSAPSLSTRTTLH

SEQ ID NO: 46315 - protein, 58 aa, Homo sapiens; identical to SEQ ID NO: 45333
  MAP TO AC018505.3; EXPRESSED IN PLACENTA, SIGNAL = 1.7; EXPRESSED IN BRAIN, SIGNAL =   3; EXPRESSED IN ADULT LIVER, SIGNAL = 1.6; EXPRESSED IN BONE MARROW, SIGNAL = 2.4; EXPRESSED IN FETAL LIVER, SIGNAL = 1.7; EXPRESSED IN LUNG, SIGNAL = 4.4; EST_HUMAN HIT: AI906278.1, EVALUE 3.00e-16

SEQ ID NO: 46316 - protein, 28 aa, Homo sapiens
  MAP TO AC018505.3; EXPRESSED IN PLACENTA, SIGNAL = 1.7; EXPRESSED IN BRAIN, SIGNAL =   3; EXPRESSED IN ADULT LIVER, SIGNAL = 1.6; EXPRESSED IN BONE MARROW, SIGNAL = 2.4; EXPRESSED IN FETAL LIVER, SIGNAL = 1.7; EXPRESSED IN LUNG, SIGNAL = 4.4; EST_HUMAN HIT: AI906278.1, EVALUE 6.00e-06
RSSRSRKASCGPACPSALASKRSRATEH

SEQ ID NO: 46317 - protein, 50 aa, Homo sapiens
  MAP TO AL121933.9; EXPRESSED IN BRAIN, SIGNAL = 1.6; EXPRESSED IN ADULT LIVER, SIGNAL = 1.4; SWISSPROT HIT: O00628, EVALUE 4.00e-26; EST_HUMAN HIT: AA188053.1, EVALUE 5.00e-25
FDWNDGLFDVTWSENNEHVLITCSGDGSLQLWDTAKAAGPLQVYKEHAQE

SEQ ID NO: 46318 - protein, 78 aa, Homo sapiens
  MAP TO AC022014.2; EXPRESSED IN BRAIN, SIGNAL = 2.7; EXPRESSED IN BONE MARROW, SIGNAL = 1.7; EXPRESSED IN ADULT LIVER, SIGNAL = 1.7; EXPRESSED IN LUNG, SIGNAL = 2.9; SWISSPROT HIT: P41594, EVALUE 2.00e-46; EST_HUMAN HIT: AA758567.1, EVALUE 8.00e-39
DGWADRYDVTDGYQREAVGGITIKLQSPDVKWFDDYYLKLRPETNHRNPWFQEFWQHRFQCRLEGFPQENSKYNKTCN

SEQ ID NO: 46319 - protein, 80 aa, Homo sapiens
  MAP TO AC010358.5; EXPRESSED IN BRAIN, SIGNAL = 1.6; EST_HUMAN HIT: BE166508.1, EVALUE 7.00e-13
KQYRKVLYCVVIIQKNYRAFLLRRRFLHLKKAAIVFQKQLRGQIARRVYRQLLAEKREQEEKKKQEEEEKKKREEEERYS

SEQ ID NO: 46320 - protein, 60 aa, Homo sapiens
  MAP TO AC011375.3; EXPRESSED IN BRAIN, SIGNAL = 1.4; SWISSPROT HIT: Q53213, EVALUE 3.10e-01; EST_HUMAN HIT: AI218274.1, EVALUE 1.00e-28
VRSSDVSWSDTRRTLRKDHRWESGSLLEREEKEKLFNEHIEALTKKKREHFRQLLDETSA

SEQ ID NO: 46321 - protein, 59 aa, Homo sapiens
  MAP TO AC011375.3; EXPRESSED IN BRAIN, SIGNAL = 1.4; SWISSPROT HIT: P96371, EVALUE 1.60e+00; EST_HUMAN HIT: AI745330.1, EVALUE 1.00e-29
YVLQMCHGLILVGPSEKITAGNLDPYWKERRKRSFLMNTLKHLPKKRESTLGNFWMKLL

SEQ ID NO: 46322 - protein, 51 aa, Homo sapiens
  MAP TO AC011991.2; EXPRESSED IN BRAIN, SIGNAL = 1.9; EXPRESSED IN PLACENTA, SIGNAL = 1.7; EXPRESSED IN ADULT LIVER, SIGNAL = 1.5; SWISSPROT HIT: P00350, EVALUE 8.00e+00
DEQEMEARQSRCNHLLACCVVNINPDYTNEHSYPRLDKEGSRSPFLKNCMQ

SEQ ID NO: 46323 - protein, 85 aa, Homo sapiens [sequence omitted]

SEQ ID NO: 46324 - protein, 63 aa, Homo sapiens
  MAP TO AC018497.4; EXPRESSED IN BRAIN, SIGNAL = 1.4; EST_HUMAN HIT: AA355574.1, EVALUE 7.00e-07; SWISSPROT HIT: P08164, EVALUE 5.90e+00
TQGLLAQTPPFKFPIQQHQSRDHILIRNLRKGNLNLLVRALICASYQLSGQSGLLRRGWTHHT

SEQ ID NO: 46325 - protein, 50 aa, Homo sapiens
  MAP TO AC017116.2; EXPRESSED IN ADULT LIVER, SIGNAL =   2; EXPRESSED IN FETAL LIVER, SIGNAL = 1.9; EXPRESSED IN PLACENTA, SIGNAL = 1.6; EXPRESSED IN BRAIN, SIGNAL =   2; EXPRESSED IN BONE MARROW, SIGNAL = 1.8; EXPRESSED IN HELA, SIGNAL = 1.7; EXPRESSED IN LUNG, SIGNAL = 3.4; SWISSPROT HIT: Q03696, EVALUE 2.00e-03; EST_HUMAN HIT: AA705929.1, EVALUE 1.00e+00
SHIVRGNHTQSALLAGLRKFVLYELQVLAFTRIGNGVPSTPLILERTKDD

SEQ ID NO: 46326 - protein, 63 aa, Homo sapiens
  MAP TO AC017116.2; EXPRESSED IN ADULT LIVER, SIGNAL =   2; EXPRESSED IN FETAL LIVER, SIGNAL = 1.9; EXPRESSED IN PLACENTA, SIGNAL = 1.6; EXPRESSED IN BRAIN, SIGNAL =   2; EXPRESSED IN BONE MARROW, SIGNAL = 1.8; EXPRESSED IN HELA, SIGNAL = 1.7; EXPRESSED IN LUNG, SIGNAL = 3.4; SWISSPROT HIT: Q63003, EVALUE 4.00e-01; EST_HUMAN HIT: BF699031.1, EVALUE 4.50e+00
SCSGPKTWIPSPGATSCEGTTRSRPCWQACASSCSTSSRCWRSPASGTGSPARPSSWSAPKTM

SEQ ID NO: 46327 - protein, 42 aa, Homo sapiens
  MAP TO AC012614.3; EXPRESSED IN BRAIN, SIGNAL = 1.4; EST_HUMAN HIT: AI640285.1, EVALUE 1.00e-09
LVASCPRASDSKFFSSGTRTGSPCSSACRQSIVGPCESCKQN

SEQ ID NO: 46328 - protein, 39 aa, Homo sapiens
  MAP TO AC018765.4; EXPRESSED IN HELA, SIGNAL = 1.8; EXPRESSED IN FETAL LIVER, SIGNAL = 1.8; EXPRESSED IN ADULT LIVER, SIGNAL = 1.5; EXPRESSED IN BRAIN, SIGNAL = 1.3; SWISSPROT HIT: P11369, EVALUE 9.00e-06; EST_HUMAN HIT: N73380.1, EVALUE 9.00e-09
IQNSGMDKNSPTIYCLQETHLTHNDSHKLKVKGWKKAFH

SEQ ID NO: 46329 - protein, 56 aa, Homo sapiens
  MAP TO AC018764.3; EXPRESSED IN BRAIN, SIGNAL = 2.4; SWISSPROT HIT: Q05071, EVALUE 7.90e+00; EST_HUMAN HIT: BE883109.1, EVALUE 2.00e-25
VFYFLKDQDLSILSTSYQFAKEIAMACSAALCPHLKTLKSNGMNKIGLRVSIDTDM

SEQ ID NO: 46330 - protein, 48 aa, Homo sapiens
  MAP TO AC008638.4; EXPRESSED IN BRAIN, SIGNAL = 2.5; EST_HUMAN HIT: AW028343.1, EVALUE 4.00e-12
IQKATVDQTGSRPPNGDHDPFFGKNMALGSALEVLLGPTTELVIASCH

SEQ ID NO: 46331 - protein, 33 aa, Homo sapiens
  MAP TO AC011447.2; EXPRESSED IN BRAIN, SIGNAL = 1.3; EST_HUMAN HIT: AL138026.1, EVALUE 4.00e-06; SWISSPROT HIT: O05097, EVALUE 2.20e+00
VPEQVLEKVTVPKQICLLQYVDDLLISGKDIKE

SEQ ID NO: 46332 - protein, 30 aa, Homo sapiens
  MAP TO AC021888.2; EXPRESSED IN BRAIN, SIGNAL = 1.3
PQRNWRMFLTLKRNTRSAVTPAFRPKGKLI

SEQ ID NO: 46333 - protein, 60 aa, Homo sapiens
  MAP TO AC011375.3; EXPRESSED IN BRAIN, SIGNAL = 2.6; EXPRESSED IN PLACENTA, SIGNAL = 1.8; EXPRESSED IN HELA, SIGNAL = 2.3; EXPRESSED IN ADULT LIVER, SIGNAL = 2.2; EXPRESSED IN BONE MARROW, SIGNAL = 1.6; EXPRESSED IN FETAL LIVER, SIGNAL = 2.2; EXPRESSED IN LUNG, SIGNAL =   2
VIVLYRRDCVPLMPKLLYVRKDGNLCLLSFPFARGGRAGFLFFWYGCWGFWRWNLVRKTL

SEQ ID NO: 46334 - protein, 49 aa, Homo sapiens
  MAP TO AC011375.3; EXPRESSED IN BRAIN, SIGNAL = 2.6; EXPRESSED IN PLACENTA, SIGNAL = 1.8; EXPRESSED IN HELA, SIGNAL = 2.3; EXPRESSED IN ADULT LIVER, SIGNAL = 2.2; EXPRESSED IN BONE MARROW, SIGNAL = 1.6; EXPRESSED IN FETAL LIVER, SIGNAL = 2.2; EXPRESSED IN LUNG, SIGNAL =   2; SWISSPROT HIT: P75796, EVALUE 1.60e+00; EST_HUMAN HIT: AV693085.1, EVALUE 3.00e+00
KHQLATQRVFLTRFHLQNPQHPYQKKRNPALPPLAKGKLRRQRFPSFLT

SEQ ID NO: 46335 - protein, 44 aa, Homo sapiens
  MAP TO AC017024.3; EXPRESSED IN BRAIN, SIGNAL = 1.4; EXPRESSED IN PLACENTA, SIGNAL = 1.5; EXPRESSED IN FETAL LIVER, SIGNAL = 1.5; EXPRESSED IN BONE MARROW, SIGNAL = 1.5; EXPRESSED IN HELA, SIGNAL =   2; EST_HUMAN HIT: BE064410.1, EVALUE 3.00e-10
MMRNMVRPVNFISMSPLPHFFSHKLSILVSDNAVLNTIMVDKAF

SEQ ID NO: 46336 - protein, 76 aa, Homo sapiens
  MAP TO AL121694.3; EXPRESSED IN BRAIN, SIGNAL = 1.8; EXPRESSED IN ADULT LIVER, SIGNAL = 1.5; EXPRESSED IN PLACENTA, SIGNAL =  10; SWISSPROT HIT: P06198, EVALUE 3.30e+00
EKQEELARKHARFVLSLNQTMEKKATTTVYINETYTKINLKREDIALQKKCIQEAEELMEKERAEYLIRKQELTAQ

SEQ ID NO: 46337 - protein, 42 aa, Homo sapiens
  MAP TO AC012177.2; EXPRESSED IN BRAIN, SIGNAL = 1.8; EXPRESSED IN FETAL LIVER, SIGNAL = 1.5; EXPRESSED IN ADULT LIVER, SIGNAL = 1.5
SLDSQEFLAIGVGLILKVYWNCKGFKGSELQQHHSTDDETEA

SEQ ID NO: 46338 - protein, 145 aa, Homo sapiens
  MAP TO AC006111.2; EXPRESSED IN ADULT LIVER, SIGNAL = 1.5; EXPRESSED IN PLACENTA, SIGNAL = 1.7; EXPRESSED IN BRAIN, SIGNAL = 1.6; SWISSPROT HIT: P32115, EVALUE 2.60e+00; EST_HUMAN HIT: AV763000.1, EVALUE 2.30e+00
GAISIYMEYGDLLPRGDMHESCVLPPWGMVRRENWEAHPGTQQSHMLPKELTADLSSQAQASCIHQTQRPHGGPFRPQVCETQLLMGGKRPLWATSFEDRQPIQFLLQHRRLHNGILWHRRYGHFGGQVLLPISTFWVKQKKHTF

SEQ ID NO: 46339 - protein, 20 aa, Homo sapiens
  MAP TO AC006111.2; EXPRESSED IN ADULT LIVER, SIGNAL = 1.5; EXPRESSED IN PLACENTA, SIGNAL = 1.7; EXPRESSED IN BRAIN, SIGNAL = 1.6; EST_HUMAN HIT: AW105627.1, EVALUE 6.30e+00
FFCFTQKVLIGRRTCPPKCP

SEQ ID NO: 46340 - protein, 34 aa, Homo sapiens
  MAP TO AC018801.2; EXPRESSED IN BRAIN, SIGNAL = 1.5; SWISSPROT HIT: P87129, EVALUE 6.50e+00; EST_HUMAN HIT: AW023178.1, EVALUE 6.00e-12
EKNLDDKAYRNIKELENYAENTQSSLLYLTLEIL

SEQ ID NO: 46341 - protein, 28 aa, Homo sapiens
  MAP TO AC018801.2; EXPRESSED IN BRAIN, SIGNAL = 1.5; EST_HUMAN HIT: AW023178.1, EVALUE 6.00e-10
KKIWMTKHIVISRNWKIMLKTHRALFFT

SEQ ID NO: 46342 - protein, 68 aa, Homo sapiens
  MAP TO AL049776.3; EXPRESSED IN BRAIN, SIGNAL = 1.6; EXPRESSED IN LUNG, SIGNAL =   2; EXPRESSED IN ADULT LIVER, SIGNAL = 1.8; SWISSPROT HIT: O59651, EVALUE 7.60e+00; EST_HUMAN HIT: R70913.1, EVALUE 2.00e-23
EEEEEEENRMSEEAEKQYQQNKLQTDSIVQTDQPETVISSSFVNVNFEMEGDSEVIMESKQNPVSVPP

SEQ ID NO: 46343 - protein, 20 aa, Homo sapiens
  MAP TO AL049776.3; EXPRESSED IN BRAIN, SIGNAL = 1.6; EXPRESSED IN LUNG, SIGNAL =   2; EXPRESSED IN ADULT LIVER, SIGNAL = 1.8; EST_HUMAN HIT: AI817096.1, EVALUE 1.00e-04
HCSDRSTRDSDIQLICECQF

SEQ ID NO: 46344 - protein, 51 aa, Homo sapiens
  MAP TO AC008430.3; EXPRESSED IN BRAIN, SIGNAL = 1.9; EXPRESSED IN LUNG, SIGNAL = 2.3; EST_HUMAN HIT: AA455377.1, EVALUE 4.00e-23; SWISSPROT HIT: Q08431, EVALUE 5.00e-10
LGMKSGHIQDYQITASSIFRTLNMDMFTWEPRKARLDKQGKVNAWTSGHND

SEQ ID NO: 46345 - protein, 34 aa, Homo sapiens
  MAP TO AC008764.4; EXPRESSED IN BRAIN, SIGNAL = 1.3; EXPRESSED IN PLACENTA, SIGNAL = 1.4; EXPRESSED IN BONE MARROW, SIGNAL = 1.8; EXPRESSED IN LUNG, SIGNAL = 3.6; SWISSPROT HIT: P52178, EVALUE 1.50e-01; EST_HUMAN HIT: BF342728.1, EVALUE 2.00e-11
MVITVSLIMLRNPVTSTNVLGMMTAILGVFLYNK

SEQ ID NO: 46346 - protein, 36 aa, Homo sapiens
  MAP TO AC008764.4; EXPRESSED IN BRAIN, SIGNAL = 1.3; EXPRESSED IN PLACENTA, SIGNAL = 1.4; EXPRESSED IN BONE MARROW, SIGNAL = 1.8; EXPRESSED IN LUNG, SIGNAL = 3.6; EST_HUMAN HIT: BE744311.1, EVALUE 5.00e-07
PTSTSGPGRSCSWLSAASVTLPRMLSPSASSTSLAP

SEQ ID NO: 46347 - protein, 30 aa, Homo sapiens
  MAP TO AC023068.3; EXPRESSED IN ADULT LIVER, SIGNAL = 1.6; EXPRESSED IN BRAIN, SIGNAL = 1.6; EXPRESSED IN PLACENTA, SIGNAL = 1.5; EXPRESSED IN BONE MARROW, SIGNAL = 1.5
MYSVEEVAALKKGWFKSKNLRHEPPKDLGT

SEQ ID NO: 46348 - protein, 39 aa, Homo sapiens
  MAP TO AC011463.3; EXPRESSED IN PLACENTA, SIGNAL = 1.9; EXPRESSED IN BRAIN, SIGNAL = 1.5; EXPRESSED IN ADULT LIVER, SIGNAL = 1.6; EST_HUMAN HIT: BE871647.1, EVALUE 4.20e+00
KPAGWRRKHIQIPSTRSWEKTGYGSGIPGSSEVTAPLMK

SEQ ID NO: 46349 - protein, 71 aa, Homo sapiens
  MAP TO AC010395.3; EXPRESSED IN BRAIN, SIGNAL = 1.7; EXPRESSED IN PLACENTA, SIGNAL = 1.3; EXPRESSED IN FETAL LIVER, SIGNAL = 2.3; EXPRESSED IN BONE MARROW, SIGNAL = 3.4; EXPRESSED IN LUNG, SIGNAL =   2; SWISSPROT HIT: P22189, EVALUE 3.90e+00; EST_HUMAN HIT: BE179143.1, EVALUE 5.00e-37
NWEKKVMVKRMKIENDLALYFYVYCHLCKICIPCNLLEFFPAFLIHWIPWGPWNFPVLYLFLFYGDQCHAE

SEQ ID NO: 46350 - protein, 50 aa, Homo sapiens
  MAP TO AL132796.2; EXPRESSED IN BRAIN, SIGNAL = 1.4; EXPRESSED IN PLACENTA, SIGNAL = 1.5
NSVSLIAVFKFAALLAFPTLLLVLFSFKAFNILICALKSANLFLSVFSMR

SEQ ID NO: 46351 - protein, 50 aa, Homo sapiens
  MAP TO AL121716.16; EXPRESSED IN HELA, SIGNAL = 2.2; EXPRESSED IN PLACENTA, SIGNAL = 1.5; EXPRESSED IN BRAIN, SIGNAL = 1.5; EXPRESSED IN ADULT LIVER, SIGNAL = 1.5; EXPRESSED IN BONE MARROW, SIGNAL = 1.6; EXPRESSED IN FETAL LIVER, SIGNAL = 1.9; SWISSPROT HIT: Q09687, EVALUE 1.00e-04; EST_HUMAN HIT: AU127032.1, EVALUE 2.00e-14
ANGIGALKLREMEHYFSQGLSVQLFNDGSKGKLNHLCGADFVKSHQKPPQ

SEQ ID NO: 46352 - protein, 151 aa, Homo sapiens
  MAP TO AC010473.3; EXPRESSED IN LUNG, SIGNAL = 3.6; EXPRESSED IN BRAIN, SIGNAL = 1.4; EXPRESSED IN PLACENTA, SIGNAL =   2; SWISSPROT HIT: Q13402, EVALUE 7.20e-02; EST_HUMAN HIT: BE257612.1, EVALUE 3.00e-53
AHEAVIHGHHPAPEENLQVLAALRLQYLQGDYTLHAAIPPLEEVYSLQRLKARISQSTKTFTPCERLEKRRTSFLEGTLRRSFRTGSVVRQKVEEEQMLDMWIKEEVSSARASIIDKWRKFQGMNQEQAMAKYMALIKEWPGYGSTLFDVE

SEQ ID NO: 46353 - protein, 26 aa, Homo sapiens
  MAP TO AC010473.3; EXPRESSED IN LUNG, SIGNAL = 3.6; EXPRESSED IN BRAIN, SIGNAL = 1.4; EXPRESSED IN PLACENTA, SIGNAL =   2; SWISSPROT HIT: P00514, EVALUE 3.90e+00; EST_HUMAN HIT: BE257612.1, EVALUE 2.00e-08
DSRPASASQPKPSPLVNGWRRGGRAS

SEQ ID NO: 46354 - protein, 25 aa, Homo sapiens
  MAP TO AL158848.1; EXPRESSED IN BRAIN, SIGNAL = 1.5; EXPRESSED IN PLACENTA, SIGNAL = 1.5; EXPRESSED IN ADULT LIVER, SIGNAL = 1.6; EXPRESSED IN LUNG, SIGNAL = 2.3; EXPRESSED IN BONE MARROW, SIGNAL = 1.7; EST_HUMAN HIT: AL135164.1, EVALUE 7.00e-10; SWISSPROT HIT: P70398, EVALUE 6.60e+00
CPAAKEYFKENSHHWSWAVQWLQKK

SEQ ID NO: 46355 - protein, 24 aa, Homo sapiens
  MAP TO AL158848.1; EXPRESSED IN BRAIN, SIGNAL = 1.5; EXPRESSED IN PLACENTA, SIGNAL = 1.5; EXPRESSED IN ADULT LIVER, SIGNAL = 1.6; EXPRESSED IN LUNG, SIGNAL = 2.3; EXPRESSED IN BONE MARROW, SIGNAL = 1.7; EST_HUMAN HIT: BF132291.1, EVALUE 2.00e-06; SWISSPROT HIT: P33317, EVALUE 8.70e+00
VLQLRSTSRRIPTTGAGLCSGYRR

SEQ ID NO: 46356 - protein, 87 aa, Homo sapiens
  MAP TO AC007845.12; EXPRESSED IN BRAIN, SIGNAL = 1.7; EXPRESSED IN BONE MARROW, SIGNAL = 1.8; EST_HUMAN HIT: AA663747.1, EVALUE 1.00e-25; SWISSPROT HIT: Q61670, EVALUE 5.00e-02
PFPLPDQHWSDSPSDADRELRLPCPAEGEAELELRVSEDEEKLPASPKHQERGEPVFDGRNNFQNSYEGHMHTRVAQGPGASEQSHG

SEQ ID NO: 46357 - protein, 31 aa, Homo sapiens
  MAP TO AC007340.3; EXPRESSED IN BRAIN, SIGNAL = 1.5; EXPRESSED IN FETAL LIVER, SIGNAL = 1.6; EXPRESSED IN HELA, SIGNAL = 1.9; EXPRESSED IN ADULT LIVER, SIGNAL = 1.4; EST_HUMAN HIT: AA459115.1, EVALUE 1.00e-04
KSLKQVLQEVFQKALLSEMTAPCVLLSQKTF

SEQ ID NO: 46358 - protein, 31 aa, Homo sapiens
  MAP TO AC012535.3; EXPRESSED IN BRAIN, SIGNAL = 1.8; EXPRESSED IN PLACENTA, SIGNAL = 1.5; EXPRESSED IN ADULT LIVER, SIGNAL = 1.9; EXPRESSED IN BONE MARROW, SIGNAL = 1.7; EXPRESSED IN FETAL LIVER, SIGNAL = 1.7; EXPRESSED IN HELA, SIGNAL = 1.7; EXPRESSED IN LUNG, SIGNAL = 4.8
LPAAGGWGGVMAKERTVSSFGANNSGRSGPE

SEQ ID NO: 46359 - protein, 57 aa, Homo sapiens
  MAP TO AC011449.3; EXPRESSED IN BRAIN, SIGNAL = 1.3; EXPRESSED IN PLACENTA, SIGNAL = 1.9; EXPRESSED IN ADULT LIVER, SIGNAL = 1.4; SWISSPROT HIT: Q61085, EVALUE 4.00e-05; EST_HUMAN HIT: AI908168.1, EVALUE 5.00e-25
MAHHEESVREASLCKKLRSIEVLQKVLCAAQERSRLTYAQHQEEDDLLNLIDAPSVV

SEQ ID NO: 46360 - protein, 55 aa, Homo sapiens
  MAP TO AC011449.3; EXPRESSED IN BRAIN, SIGNAL = 1.3; EXPRESSED IN PLACENTA, SIGNAL = 1.9; EXPRESSED IN ADULT LIVER, SIGNAL = 1.4; SWISSPROT HIT: Q51548, EVALUE 2.40e-01; EST_HUMAN HIT: AI908168.1, EVALUE 3.00e-28
GSPTCAEPWLITRSRCGRPASARSCGALRCYRRCCVPHRNAPGSRTPSTRRRMTC

SEQ ID NO: 46361 - protein, 90 aa, Homo sapiens
  MAP TO AC000056.1; EXPRESSED IN BRAIN, SIGNAL = 1.6; EXPRESSED IN FETAL LIVER, SIGNAL = 1.8; SWISSPROT HIT: P12366, EVALUE 3.10e+00
ELQQSQNSKITSTVLTEKLHISMLSVPWKQHLDVFHQNCFEKWSKAEFTFVRKKYKKHKRHHMLMEVAQDLESEDLFESQPYPCYLCDAG

SEQ ID NO: 46362 - protein, 68 aa, Homo sapiens
  MAP TO AC007954.6; EXPRESSED IN BRAIN, SIGNAL = 1.8; SWISSPROT HIT: P30098, EVALUE 1.30e+00; EST_HUMAN HIT: AW162821.1, EVALUE 7.00e-06
DEDLINKCGDDARIYIVFQYHLIIFVLIICIPSLGIILPINYTGSVLGRQSSAGPGAAAGPERQPGKP

SEQ ID NO: 46363 - protein, 77 aa, Homo sapiens
  MAP TO AL132668.2; EXPRESSED IN BRAIN, SIGNAL = 1.3; EXPRESSED IN PLACENTA, SIGNAL =   2; SWISSPROT HIT: P27401, EVALUE 4.00e-09; EST_HUMAN HIT: BE149334.1, EVALUE 2.00e-26
PRKIVNQKPYCIPGGTVEISATIKDLKDAGVVIFTTSLFNSPIWPVQKTDGSWRMTVGYRRLNQVVTPIAAAVPDVV

SEQ ID NO: 46364 - protein, 63 aa, Homo sapiens; identical to SEQ ID NO: 42455
  MAP TO AC018836.2; EXPRESSED IN BRAIN, SIGNAL = 1.8; EXPRESSED IN LUNG, SIGNAL = 3.3; EXPRESSED IN PLACENTA, SIGNAL = 1.3; EST_HUMAN HIT: AI906278.1, EVALUE 6.00e-17

SEQ ID NO: 46365 - protein, 28 aa, Homo sapiens
  MAP TO AC018836.2; EXPRESSED IN BRAIN, SIGNAL = 1.8; EXPRESSED IN LUNG, SIGNAL = 3.3; EXPRESSED IN PLACENTA, SIGNAL = 1.3; EST_HUMAN HIT: AI906278.1, EVALUE 6.00e-06
RSSRSRKASCGPACPSALASKRSRATEH

SEQ ID NO: 46366 - protein, 53 aa, Homo sapiens
  MAP TO AC004549.1; EXPRESSED IN BRAIN, SIGNAL = 2.4; EXPRESSED IN PLACENTA, SIGNAL = 3.3; EXPRESSED IN BONE MARROW, SIGNAL = 2.4; EXPRESSED IN ADULT LIVER, SIGNAL = 1.5; EXPRESSED IN FETAL LIVER, SIGNAL = 2.2; SWISSPROT HIT: P32432, EVALUE 2.10e-02; EST_HUMAN HIT: AW084514.1, EVALUE 1.00e-26
NVNGIKYHAKNGHRTQIRVRKPFKCRCGKSYKTAQGLRHHTINFHPPVSAEII

SEQ ID NO: 46367 - protein, 46 aa, Homo sapiens
  MAP TO AC019239.3; EXPRESSED IN BRAIN, SIGNAL = 1.5; EXPRESSED IN PLACENTA, SIGNAL = 1.4
ENAGSPASEGAQICTGISETLNAKHSFQLEFERVGSEKSQGDFLQA

SEQ ID NO: 46368 - protein, 21 aa, Homo sapiens
  MAP TO AC019239.3; EXPRESSED IN BRAIN, SIGNAL = 1.5; EXPRESSED IN PLACENTA, SIGNAL = 1.4
VKMQVPQHQKVLRSVLAFLKL

SEQ ID NO: 46369 - protein, 59 aa, Homo sapiens
  MAP TO AL158052.2; EXPRESSED IN BRAIN, SIGNAL = 2.5; EST_HUMAN HIT: BE255549.1, EVALUE 1.00e-28; SWISSPROT HIT: Q9PBB7, EVALUE 3.10e-01
LVPERPSQVQAQPLTAGKHGRGQVDRRGAADRDAIGPGLGALQRLAQPLQHAHHPDRLD

SEQ ID NO: 46370 - protein, 33 aa, Homo sapiens
  MAP TO AC011025.4; EXPRESSED IN PLACENTA, SIGNAL = 1.6; EXPRESSED IN BRAIN, SIGNAL = 1.8; EXPRESSED IN ADULT LIVER, SIGNAL = 1.4; EXPRESSED IN FETAL LIVER, SIGNAL = 1.6; EXPRESSED IN HELA, SIGNAL = 2.1
RFHLLPCHCYSCSNPGCPSGSNSNDYRHFLLMS

SEQ ID NO: 46371 - protein, 89 aa, Homo sapiens
  MAP TO AC000029.17; EXPRESSED IN BRAIN, SIGNAL = 1.7; EST_HUMAN HIT: AW949592.1, EVALUE 3.00e-23; SWISSPROT HIT: Q9WUU6, EVALUE 8.90e+00
QAGPGPSSSAKANVLEIVLYDDVCHRVEDKLDVTGVGGAGEVGVDLLGLLVAVQVFKLPLDVDSGLLVRVLALVLGKADGERDAADLLC

SEQ ID NO: 46372 - protein, 35 aa, Homo sapiens
  MAP TO AC021881.2; EXPRESSED IN HELA, SIGNAL = 1.8; EXPRESSED IN BRAIN, SIGNAL = 1.7; EXPRESSED IN PLACENTA, SIGNAL = 1.6; EXPRESSED IN ADULT LIVER, SIGNAL = 1.8; EXPRESSED IN FETAL LIVER, SIGNAL = 1.8
YCKNSLLVLKHRLANFEAYKYTLIKRFQVPNQDSP

SEQ ID NO: 46373 - protein, 90 aa, Homo sapiens
  MAP TO AL122021.3; EXPRESSED IN FETAL LIVER, SIGNAL = 1.6; EXPRESSED IN PLACENTA, SIGNAL = 1.6; EXPRESSED IN BRAIN, SIGNAL = 1.5; EXPRESSED IN ADULT LIVER, SIGNAL = 3.8; EST_HUMAN HIT: AA464375.1, EVALUE 4.00e-03
KKQVSKTKIRVISTILFILAGCIVFVTIPAVIFKYIEGWTALESIYFVVVTLTTVGFGDFVAGKHPGQARHWGSGGKNNLLAVLFAIDKR

SEQ ID NO: 46374 - protein, 105 aa, Homo sapiens [sequence omitted]

SEQ ID NO: 46375 - protein, 60 aa, Homo sapiens
  MAP TO AC007064.27; EXPRESSED IN BRAIN, SIGNAL = 1.7; EXPRESSED IN LUNG, SIGNAL = 1.9; EST_HUMAN HIT: AW749184.1, EVALUE 5.00e-12
KTALVTTADWRGTLGGEERAAADAGDDRRDVTEAITDTICSEGFFPESRSTSGNTLVSVL

SEQ ID NO: 46376 - protein, 28 aa, Homo sapiens
  MAP TO AC007064.27; EXPRESSED IN BRAIN, SIGNAL = 1.7; EXPRESSED IN LUNG, SIGNAL = 1.9; EST_HUMAN HIT: AW749184.1, EVALUE 6.00e-08
SRCPFLSPQGASPVCSGDQCSFPCRAHP

SEQ ID NO: 46377 - protein, 64 aa, Homo sapiens
  MAP TO AL159191.1; EXPRESSED IN PLACENTA, SIGNAL =  46; EXPRESSED IN BRAIN, SIGNAL = 1.4; SWISSPROT HIT: P18652, EVALUE 1.00e-15; EST_HUMAN HIT: BE407864.1, EVALUE 4.00e-28
NLLFTDENDNLEIKIIDFGFARLKPPDNQPLKTPCFTLHYAAPELLNQNGYDESCDLWSLGVIL

SEQ ID NO: 46378 - protein, 19 aa, Homo sapiens
  MAP TO AC007064.27; EXPRESSED IN BRAIN, SIGNAL = 2.2; EXPRESSED IN LUNG, SIGNAL = 1.8; EST_HUMAN HIT: R53462.1, EVALUE 1.90e-01
VKVFDAMHQLDMLLQHQPF

SEQ ID NO: 46379 - protein, 18 aa, Homo sapiens
  MAP TO AC007064.27; EXPRESSED IN BRAIN, SIGNAL = 2.2; EXPRESSED IN LUNG, SIGNAL = 1.8; EST_HUMAN HIT: AW367811.1, EVALUE 1.40e-01
PPEEGAWEANEETPLPPV

SEQ ID NO: 46380 - protein, 58 aa, Homo sapiens
  MAP TO AL158148.1; EXPRESSED IN BRAIN, SIGNAL = 1.4; EXPRESSED IN PLACENTA, SIGNAL = 1.3; EXPRESSED IN FETAL LIVER, SIGNAL = 1.7; EXPRESSED IN BONE MARROW, SIGNAL = 1.5; SWISSPROT HIT: Q05512, EVALUE 2.70e-02; EST_HUMAN HIT: AI870210.1, EVALUE 8.00e-28
YTLKCQTQSDFGKVTMQFELEVCQLQKPDVVGIRRQRLKGDAWVYKRLVEDILSSCKV

SEQ ID NO: 46381 - protein, 48 aa, Homo sapiens
  MAP TO AC011298.2; EXPRESSED IN BRAIN, SIGNAL = 3.1; SWISSPROT HIT: P33173, EVALUE 3.00e-22; EST_HUMAN HIT: BE778426.1, EVALUE 4.00e-21
MQRRRRRVLDTSVAYVRGEENLAGWRPRSDSLILDHQWELEKLSLLQE

SEQ ID NO: 46382 - protein, 43 aa, Homo sapiens
  MAP TO AC011298.2; EXPRESSED IN BRAIN, SIGNAL = 3.1; EST_HUMAN HIT: AL133766.1, EVALUE 1.00e-21
GCSAGADESWTHLWPMSGARRTWQAGGPGVTVSFWTTSGSWRS

SEQ ID NO: 46383 - protein, 62 aa, Homo sapiens
  MAP TO AL133387.8; EXPRESSED IN ADULT LIVER, SIGNAL = 2.3; EXPRESSED IN BRAIN, SIGNAL = 1.5
IILTPFIPLATTINHGNTMTTHHPIPAITIITAISVTINLTTTTTSTITIIMKLGPAASPPA

SEQ ID NO: 46384 - protein, 68 aa, Homo sapiens
  MAP TO AL158052.2; EXPRESSED IN BRAIN, SIGNAL = 1.7; SWISSPROT HIT: Q9Z0S2, EVALUE 2.00e-35; EST_HUMAN HIT: AI200248.1, EVALUE 2.00e-34
LSCNENDAEHLDRDQPYPSSQKTKRMRTSFKHHQLRTMKSYFAINHNPDAKDLKQLAQKTGLTKRVLQ

SEQ ID NO: 46385 - protein, 125 aa, Homo sapiens
  MAP TO AC018506.3; EXPRESSED IN BRAIN, SIGNAL = 2.5; EXPRESSED IN PLACENTA, SIGNAL = 1.5; EXPRESSED IN BONE MARROW, SIGNAL = 3.2; EXPRESSED IN LUNG, SIGNAL = 5.3; SWISSPROT HIT: Q03164, EVALUE 2.50e+00; EST_HUMAN HIT: AU117974.1, EVALUE 3.00e-71
HSDLAPHPSLGPTSETGFPSRSGDGHQTLVRNSDQAFRTEFNLMYAYSPLNAMPRADGLYRGSPLVGDRKPLHLDGGYCSPAEGFSSRYEHGLMKDLSRGSLSPGGERACEGVPSAPQNPPQRKK

SEQ ID NO: 46386 - protein, 30 aa, Homo sapiens
  MAP TO AC018506.3; EXPRESSED IN BRAIN, SIGNAL = 2.5; EXPRESSED IN PLACENTA, SIGNAL = 1.5; EXPRESSED IN BONE MARROW, SIGNAL = 3.2; EXPRESSED IN LUNG, SIGNAL = 5.3; EST_HUMAN HIT: AU141480.1, EVALUE 1.00e-09
VILTWLLIPPSDPLLRLVSQAEVEMDIRPS

SEQ ID NO: 46387 - protein, 34 aa, Homo sapiens
  MAP TO AC012576.3; EXPRESSED IN ADULT LIVER, SIGNAL = 1.5; EXPRESSED IN PLACENTA, SIGNAL = 1.4; EXPRESSED IN BRAIN, SIGNAL = 1.4; SWISSPROT HIT: Q99089, EVALUE 1.70e+00; EST_HUMAN HIT: AW188034.1, EVALUE 4.00e-03
MAKQKPQPIIPPAGTPKFKNYVHTKKYHHSNQKS

SEQ ID NO: 46388 - protein, 51 aa, Homo sapiens
  MAP TO AC011449.3; EXPRESSED IN BRAIN, SIGNAL = 1.6; SWISSPROT HIT: P41793, EVALUE 6.10e+00; EST_HUMAN HIT: BE379434.1, EVALUE 3.00e-21
SNNLKGIVVVEKTRMSEQYFPALQKFTVLDLGMVLLPVASQMEASCLVIQL

SEQ ID NO: 46389 - protein, 40 aa, Homo sapiens
  MAP TO AC011505.2; EXPRESSED IN BRAIN, SIGNAL = 1.4; EXPRESSED IN PLACENTA, SIGNAL = 1.7; EXPRESSED IN BONE MARROW, SIGNAL = 1.6; EXPRESSED IN ADULT LIVER, SIGNAL = 1.7; EST_HUMAN HIT: BF185826.1, EVALUE 1.90e+00; SWISSPROT HIT: O08808, EVALUE 7.30e-01
NESCEQPELYAAPLAGGSCLPPPGSSACLGQDPQVPDSPM

SEQ ID NO: 46390 - protein, 50 aa, Homo sapiens
  MAP TO AC007868.2; EXPRESSED IN BRAIN, SIGNAL = 2.3; EXPRESSED IN LUNG, SIGNAL = 6.7; EST_HUMAN HIT: BE703698.1, EVALUE 8.00e-15
VVFPYTSKSCMRAVLEYLYTGMFTSSPDLDDMKLIILANRLCLPHLVALT

SEQ ID NO: 46391 - protein, 20 aa, Homo sapiens
  MAP TO AC007868.2; EXPRESSED IN BRAIN, SIGNAL = 2.3; EXPRESSED IN LUNG, SIGNAL = 6.7; EST_HUMAN HIT: BE703698.1, EVALUE 2.00e-03
HAGRAGIPLHRHVHLQPRPG

SEQ ID NO: 46392 - protein, 37 aa, Homo sapiens
  MAP TO AC009178.4; EXPRESSED IN BRAIN, SIGNAL = 1.3
FDVFLTGIRQQQTQGGELNASSQLDLVQKRSIAHALQ

SEQ ID NO: 46393 - protein, 40 aa, Homo sapiens
  MAP TO AC018719.2; EXPRESSED IN BRAIN, SIGNAL = 1.6; EXPRESSED IN PLACENTA, SIGNAL = 1.6; EXPRESSED IN ADULT LIVER, SIGNAL = 1.4; EXPRESSED IN FETAL LIVER, SIGNAL = 2.3; EST_HUMAN HIT: N80993.1, EVALUE 9.00e-11
KKVLLSQESTAPCVLLTLKIFQWDKNWRWKTVTWMSLTLC

SEQ ID NO: 46394 - protein, 63 aa, Homo sapiens
  MAP TO AC024019.2; EXPRESSED IN BRAIN, SIGNAL = 1.5; SWISSPROT HIT: P23902, EVALUE 5.90e+00
MYCRNTANQVLNNFETWCHHPSVVQGIPVPTVEDLRVSEESLRNEVNVQSNPAWYFRGKLITQ

SEQ ID NO: 46395 - protein, 42 aa, Homo sapiens
  MAP TO AH009158.1; EXPRESSED IN BRAIN, SIGNAL = 1.6; EST_HUMAN HIT: AW954630.1, EVALUE 7.00e-17; SWISSPROT HIT: Q15878, EVALUE 4.00e-19
MLNLFVAVIMDNFEYLTRDSSILGPHHLDEFVRVWAEYDRAA

SEQ ID NO: 46396 - protein, 25 aa, Homo sapiens
  MAP TO AL138831.2; EXPRESSED IN PLACENTA, SIGNAL = 2.9; EXPRESSED IN BRAIN, SIGNAL = 1.3; EXPRESSED IN LUNG, SIGNAL =   2; EST_HUMAN HIT: Z21377.1, EVALUE 1.00e-06
VSAGPMLMETFLRTEMRFMLVHVQL

SEQ ID NO: 46397 - protein, 42 aa, Homo sapiens
  MAP TO AL049829.3; EXPRESSED IN BRAIN, SIGNAL = 1.8; EST_HUMAN HIT: BF530674.1, EVALUE 5.00e-12
MLSARDRRDRHPEEGVVAELQGFAVDKAFLTSHKGILLETEL

SEQ ID NO: 46398 - protein, 50 aa, Homo sapiens
  MAP TO AL049829.3; EXPRESSED IN BRAIN, SIGNAL = 1.8; EST_HUMAN HIT: AA452430.1, EVALUE 1.00e-08; SWISSPROT HIT: P08672, EVALUE 3.60e+00
RAPGLRGGQGLPHLPQGHPAGNRAGNSCLPTWCLHLPDPRLLASLMPAPS

SEQ ID NO: 46399 - protein, 68 aa, Homo sapiens; identical to SEQ ID NO: 42165
  MAP TO AC007342.2; EXPRESSED IN BRAIN, SIGNAL = 1.9; EXPRESSED IN PLACENTA, SIGNAL = 1.7; EST_HUMAN HIT: BE279081.1, EVALUE 9.00e-34; SWISSPROT HIT: P41245, EVALUE 5.10e-01

SEQ ID NO: 46400 - protein, 23 aa, Homo sapiens
  MAP TO AC007342.2; EXPRESSED IN BRAIN, SIGNAL = 1.9; EXPRESSED IN PLACENTA, SIGNAL = 1.7; EST_HUMAN HIT: BE727307.1, EVALUE 6.00e-07
HSQQMARMRPMDPSTWNTLFLQN

SEQ ID NO: 46401 - protein, 35 aa, Homo sapiens
  MAP TO AC009363.4; EXPRESSED IN BRAIN, SIGNAL = 1.5; EXPRESSED IN ADULT LIVER, SIGNAL = 1.4; EST_HUMAN HIT: BE219313.1, EVALUE 8.00e-14
LLLCPKGTRQPGLRLEHGDLEELMDGFRRDVKVLG

SEQ ID NO: 46402 - protein, 35 aa, Homo sapiens
  MAP TO AC009363.4; EXPRESSED IN BRAIN, SIGNAL = 1.5; EXPRESSED IN ADULT LIVER, SIGNAL = 1.4; EST_HUMAN HIT: BE219313.1, EVALUE 5.00e-16; SWISSPROT HIT: P06945, EVALUE 3.80e+00
PSTVPKRHKATWPEVGAWRSRGTHGWIQAGCESAG

SEQ ID NO: 46403 - protein, 63 aa, Homo sapiens
  MAP TO AL137160.2; EXPRESSED IN BRAIN, SIGNAL = 1.4; EST_HUMAN HIT: BF362188.1, EVALUE 4.00e-16; SWISSPROT HIT: Q64633, EVALUE 5.90e+00
VPCCQLDFDRKTRHRRQPPAPLTASTSSCTWRRRLWNRKTERTLCPSLEKRKVRTTGRASWNR

SEQ ID NO: 46404 - protein, 37 aa, Homo sapiens
  MAP TO AC008557.3; EXPRESSED IN BRAIN, SIGNAL = 1.6; EXPRESSED IN PLACENTA, SIGNAL = 2.6; EXPRESSED IN LUNG, SIGNAL =  44; EST_HUMAN HIT: BF104775.1, EVALUE 3.00e-13; SWISSPROT HIT: P20585, EVALUE 2.00e-14
SQIISGIVNLEKPVICSLAAIIKYLKEFNLEKMLSKP

SEQ ID NO: 46405 - protein, 37 aa, Homo sapiens
  MAP TO AC020596.2; EXPRESSED IN BRAIN, SIGNAL = 2.7; SWISSPROT HIT: P52757, EVALUE 2.00e-09; EST_HUMAN HIT: AW950919.1, EVALUE 1.00e-13
FHGMISREAADQLLIVAEGSYLIRESQRQPGTYTLAL

SEQ ID NO: 46406 - protein, 97 aa, Homo sapiens
  MAP TO AC010386.5; EXPRESSED IN BRAIN, SIGNAL = 5.5; EST_HUMAN HIT: AW377481.1, EVALUE 3.00e-08; SWISSPROT HIT: P43003, EVALUE 2.00e-49
FKTNYEKRSFKVPIQANETLVGAVINNVSEAMETLTRITEELVPVPGSVNGVNALGLVVFSMCFGFVIGNMKEQGQALREFFDSLNEAIMRLVAVIM

SEQ ID NO: 46407 - protein, 52 aa, Homo sapiens
  MAP TO AC023066.2; EXPRESSED IN BRAIN, SIGNAL = 1.8; SWISSPROT HIT: P29539, EVALUE 8.00e+00
ETEDERSEAENVAENFSISNPAPQQFQGIINLAFEDATENECREFSANKKFK

SEQ ID NO: 46408 - protein, 29 aa, Homo sapiens
  MAP TO AC023066.2; EXPRESSED IN BRAIN, SIGNAL = 1.8; SWISSPROT HIT: P87132, EVALUE 6.60e+00
MKQKMKDLKLKTLQKISLYLTQLLSSFRE

SEQ ID NO: 46409 - protein, 41 aa, Homo sapiens
  MAP TO AC010227.5; EXPRESSED IN BRAIN, SIGNAL = 1.3; EST_HUMAN HIT: AW868552.1, EVALUE 5.00e-03
HSRDPSHRFSANNSALFQDVVTDGDLMLEVVAFVLLTLVET

SEQ ID NO: 46410 - protein, 40 aa, Homo sapiens
  MAP TO AC010227.5; EXPRESSED IN BRAIN, SIGNAL = 1.3; EST_HUMAN HIT: AW868552.1, EVALUE 1.40e-02
VSTNVSSTKATTSNIRSPSVTTSWKRAELFAEKRWLGSLE

SEQ ID NO: 46411 - protein, 39 aa, Homo sapiens
  MAP TO AL049776.3; EXPRESSED IN BRAIN, SIGNAL = 2.8; SWISSPROT HIT: Q99271, EVALUE 2.80e+00; EST_HUMAN HIT: BF672160.1, EVALUE 5.00e-13
LYFQLPAEDEVLLQKLREESRAVFLQRKSRELLDNEELQ

SEQ ID NO: 46412 - protein, 53 aa, Homo sapiens
  MAP TO AC020897.3; EXPRESSED IN BRAIN, SIGNAL = 1.3; SWISSPROT HIT: O95954, EVALUE 3.60e+00; EST_HUMAN HIT: AI910266.1, EVALUE 4.90e+00
SYNQDDCDAVEGACSQWPFCVGLCAEHGQKERNQRTQQTVLGVSAARPSAEPS

SEQ ID NO: 46413 - protein, 54 aa, Homo sapiens
  MAP TO AC020897.3; EXPRESSED IN BRAIN, SIGNAL = 1.3; SWISSPROT HIT: O32869, EVALUE 7.00e-01; EST_HUMAN HIT: BF436304.1, EVALUE 3.70e+00
AVTTRMTATLWKELAASGPSAWASVRSMGRKKGTNVLSKQCSVYLLPGPVLNPP

SEQ ID NO: 46414 - protein, 43 aa, Homo sapiens
  MAP TO AL132655.5; EXPRESSED IN BRAIN, SIGNAL = 1.4; EST_HUMAN HIT: AW801491.1, EVALUE 2.00e-14
LADDAAKNFRGGEAIPEKMNSTMGKQLRERQKWGLEGKEGISE

SEQ ID NO: 46415 - protein, 54 aa, Homo sapiens
  MAP TO AL135959.1; EXPRESSED IN HELA, SIGNAL = 1.9; EXPRESSED IN BRAIN, SIGNAL = 1.3; EST_HUMAN HIT: BF330867.1, EVALUE 9.70e-01
VEYIEYLSRKVSTEMGLREQLDIIKIIDPSAQISPTDSEFIIELNCLTDEKLKQ

SEQ ID NO: 46416 - protein, 19 aa, Homo sapiens
  MAP TO AL135959.1; EXPRESSED IN HELA, SIGNAL = 1.9; EXPRESSED IN BRAIN, SIGNAL = 1.3
SPLQTVSLLLNLTVSQMKN

SEQ ID NO: 46417 - protein, 24 aa, Homo sapiens
  MAP TO AC009680.5; EXPRESSED IN BONE MARROW, SIGNAL = 1.5; EXPRESSED IN BRAIN, SIGNAL = 1.5
WQGSSLRSKKKLKPNPRNPRNPVK

SEQ ID NO: 46418 - protein, 64 aa, Homo sapiens
  MAP TO AC012568.3; EXPRESSED IN BRAIN, SIGNAL = 1.7; EXPRESSED IN BONE MARROW, SIGNAL = 1.5; EXPRESSED IN LUNG, SIGNAL = 3.1; EST_HUMAN HIT: BE812180.1, EVALUE 3.00e-35; SWISSPROT HIT: P42003, EVALUE 1.00e-28
SLDGRLQVSHRKGLPHVIYCRLWRWPDLHSHHELRAMELCEFAFNMKKDEVCVNPYHYQRVETP

SEQ ID NO: 46419 - protein, 45 aa, Homo sapiens
  MAP TO AC012568.3; EXPRESSED IN BRAIN, SIGNAL = 1.7; EXPRESSED IN BONE MARROW, SIGNAL = 1.5; EXPRESSED IN LUNG, SIGNAL = 3.1; EST_HUMAN HIT: BE543805.1, EVALUE 2.00e-21; SWISSPROT HIT: Q05496, EVALUE 1.20e+00
PWMAGCRCPIGRGSLMSSTAACGDGQTCTATTSYGPWSCVSSPSI

SEQ ID NO: 46420 - protein, 39 aa, Homo sapiens
  MAP TO AL138894.2; EXPRESSED IN LUNG, SIGNAL =   3; EXPRESSED IN BRAIN, SIGNAL = 1.9
TISQEVNFPNSASHYSESNHAVMCVKDGETFGPLGNTLE

SEQ ID NO: 46421 - protein, 22 aa, Homo sapiens
  MAP TO AL138894.2; EXPRESSED IN LUNG, SIGNAL =   3; EXPRESSED IN BRAIN, SIGNAL = 1.9
EPFPRKSTSQIRLLITPRAITL

SEQ ID NO: 46422 - protein, 64 aa, Homo sapiens
  MAP TO AC010322.4; EXPRESSED IN BRAIN, SIGNAL = 1.4; EXPRESSED IN BONE MARROW, SIGNAL = 3.1; EXPRESSED IN LUNG, SIGNAL = 4.1; EST_HUMAN HIT: BF185698.1, EVALUE 7.60e+00
MDRNGVPPSARGGPLPLEIMSGGGTHRPPRGPPSTSLGASRRPRARPPSEHNTEFLNVPDQGMA

SEQ ID NO: 46423 - protein, 65 aa, Homo sapiens
  MAP TO AC010322.4; EXPRESSED IN BRAIN, SIGNAL = 1.4; EXPRESSED IN BONE MARROW, SIGNAL = 3.1; EXPRESSED IN LUNG, SIGNAL = 4.1; EST_HUMAN HIT: AI202760.1, EVALUE 6.00e-03; SWISSPROT HIT: P52591, EVALUE 1.10e-01
AWIAMGCPPLPEGAPCPWRSCLEGAPTGLPGALRPHPWEPADDPGHVRPQSTTQNSSTCLTRAWP

SEQ ID NO: 46424 - protein, 69 aa, Homo sapiens; identical to SEQ ID NO: 43472
  MAP TO AC000085.5; EXPRESSED IN BRAIN, SIGNAL = 1.3; EST_HUMAN HIT: AW367472.1, EVALUE 4.00e-29; SWISSPROT HIT: P53675, EVALUE 3.00e-33

SEQ ID NO: 46425 - protein, 84 aa, Homo sapiens
  MAP TO AC008723.3; EXPRESSED IN BRAIN, SIGNAL = 2.3; EST_HUMAN HIT: AU124997.1, EVALUE 4.00e-34; SWISSPROT HIT: P51959, EVALUE 4.00e-35
VQPKHLGCVGLSCFYLAVKSIEEERNVPLATDLIRISQYRFTVSDLMRMEKIVLEKVCWKVKATTAFQFLQLYYSLLQENLPLE

SEQ ID NO: 46426 - protein, 52 aa, Homo sapiens
  MAP TO AC010251.3; EXPRESSED IN BRAIN, SIGNAL = 1.3; EXPRESSED IN PLACENTA, SIGNAL = 1.5; EST_HUMAN HIT: BE063509.1, EVALUE 2.00e-04
YHPLPPWILRTIPQSWCTPTAILRVMSSSTPWILKTTSQRECTTPAIWPVIS

SEQ ID NO: 46427 - protein, 104 aa, Homo sapiens
  MAP TO AC010358.5; EXPRESSED IN BRAIN, SIGNAL = 2.3; EXPRESSED IN LUNG, SIGNAL = 3.4; EXPRESSED IN PLACENTA, SIGNAL =   2; EST_HUMAN HIT: AU132394.1, EVALUE 8.00e-53; SWISSPROT HIT: P47808, EVALUE 4.00e-05
VLLVLVLKDKGYTTLQDEAIKIFNSLQQLESMSDPIPIIQGILQTGHDLRPLRDELYCQLIKQTNKVPHPGSVGNLYSWQILTCLSCTFLPSRGILKYLKFHLK

SEQ ID NO: 46428 - protein, 47 aa, Homo sapiens
  MAP TO AC018716.2; EXPRESSED IN BRAIN, SIGNAL =  12
MKAIGGMVLSREVDVTENVSCLMETSEEATAATQMGDTGLDQVAAAE

SEQ ID NO: 46429 - protein, 67 aa, Homo sapiens
  MAP TO AC005663.2; EXPRESSED IN BRAIN, SIGNAL = 1.3; SWISSPROT HIT: P30999, EVALUE 7.00e-09; EST_HUMAN HIT: BE869016.1, EVALUE 2.00e-21
PPPQWATYIRATVRKERGLPVLVELLQSETDKVVRAVAIALRNLSLDRRNKDLIGEDACKAHAWAPN

SEQ ID NO: 46430 - protein, 87 aa, Homo sapiens
  MAP TO AC013533.3; EXPRESSED IN BRAIN, SIGNAL = 1.3; EST_HUMAN HIT: BE872550.1, EVALUE 1.40e+00; SWISSPROT HIT: O08663, EVALUE 2.30e+00
IYLPSGAKQQRMNTHYLQTVRWASTQPQQAARKQSEEDDSQFHHAAQAHRLQRILGSFTAAPEFCPTTILICEGHVHSDHRCSLSLC

SEQ ID NO: 46431 - protein, 32 aa, Homo sapiens
  MAP TO AF236876.1; EXPRESSED IN BRAIN, SIGNAL = 1.5; EXPRESSED IN LUNG, SIGNAL = 2.7
STHSRDQHCQVLIWLTGNAKLSSLDREDGIHF

SEQ ID NO: 46432 - protein, 26 aa, Homo sapiens
  MAP TO AC010618.4; EXPRESSED IN BRAIN, SIGNAL = 1.6; EST_HUMAN HIT: AW884375.1, EVALUE 3.00e-08
MAGRSPFPTARRTRCRLSASRTGCFS

SEQ ID NO: 46433 - protein, 65 aa, Homo sapiens
  MAP TO AL157789.1; EXPRESSED IN BRAIN, SIGNAL = 1.4; EXPRESSED IN ADULT LIVER, SIGNAL = 3.4; EST_HUMAN HIT: T67695.1, EVALUE 1.00e-18; SWISSPROT HIT: Q14973, EVALUE 2.00e-34
CRRTVSMETGCQNVQLCSTILNVAFPPEVIGPLFFFPLLYMIFQLGEGLLLIAIFWCYEKFKTPK

SEQ ID NO: 46434 - protein, 40 aa, Homo sapiens
  MAP TO AL157789.1; EXPRESSED IN BRAIN, SIGNAL = 1.4; EXPRESSED IN ADULT LIVER, SIGNAL = 3.4; EST_HUMAN HIT: T67695.1, EVALUE 1.60e-01; SWISSPROT HIT: P24121, EVALUE 2.80e+00
ADALSAWRLDAKMSNSVPPSSMWPFHLKSLDHFSSFPSST

SEQ ID NO: 46435 - protein, 91 aa, Homo sapiens
  MAP TO AC008860.5; EXPRESSED IN BRAIN, SIGNAL = 8.6; SWISSPROT HIT: P36512, EVALUE 1.00e-10; EST_HUMAN HIT: AW236852.1, EVALUE 7.00e-38
YKSAVVAASVILHSQPLSPAQRLVGWIDHILQTGGATHLKPYAFQQPWHEQYLIDVFVFLLGLTLGTMWLCGKLLGVVARWLRGARKVKKT

SEQ ID NO: 46436 - protein, 42 aa, Homo sapiens
  MAP TO AC008567.3; EXPRESSED IN BRAIN, SIGNAL = 4.3; SWISSPROT HIT: Q13360, EVALUE 1.00e-12; EST_HUMAN HIT: AA362834.1, EVALUE 8.00e-18
DSVTFDDLAVDFTPEEWTLLDPTQRNLYRDVMLENYKNLATV

SEQ ID NO: 46437 - protein, 30 aa, Homo sapiens
  MAP TO AL132819.1; EXPRESSED IN BRAIN, SIGNAL = 1.3
VKNSAFRIPSRAVCLLCLLKMKLLTSLSCY

SEQ ID NO: 46438 - protein, 19 aa, Homo sapiens
  MAP TO AC011298.2; EXPRESSED IN BRAIN, SIGNAL = 1.3; EXPRESSED IN BONE MARROW, SIGNAL =   2; SWISSPROT HIT: Q12756, EVALUE 1.00e-04; EST_HUMAN HIT: BF339540.1, EVALUE 2.00e-03
GRPSPLEAPNERQRELAVK

SEQ ID NO: 46439 - protein, 66 aa, Homo sapiens
  MAP TO AC011298.2; EXPRESSED IN BRAIN, SIGNAL = 1.3; EXPRESSED IN BONE MARROW, SIGNAL =   2; EST_HUMAN HIT: BF339540.1, EVALUE 5.00e-21; SWISSPROT HIT: P30020, EVALUE 5.40e+00
WRRLGTTCSCGRSWRPPSGLSRRHCPRPSARTLSPMAPPAPPPRSRLRAAHHPWRLPTRGSGSWPS

SEQ ID NO: 46440 - protein, 35 aa, Homo sapiens
  MAP TO AC004548.1; EXPRESSED IN BRAIN, SIGNAL = 1.3
MSNFRKETTTTGAIFIEFVLNVHIEYEKIDIFMMS

SEQ ID NO: 46441 - protein, 60 aa, Homo sapiens
  MAP TO AC011497.3; EXPRESSED IN BRAIN, SIGNAL = 1.4; EST_HUMAN HIT: BE840226.1, EVALUE 1.00e-28; SWISSPROT HIT: P36669, EVALUE 9.00e-01
APQTVELPAVAGHTLTARRGLSLLLVGGYSPENGFNQQLLEYQLATGTWVSGAQSGTPPT

SEQ ID NO: 46442 - protein, 60 aa, Homo sapiens
  MAP TO AC011497.3; EXPRESSED IN BRAIN, SIGNAL = 1.4; SWISSPROT HIT: P49771, EVALUE 2.40e+00; EST_HUMAN HIT: BE840226.1, EVALUE 3.00e-34
PPRPWSCQPLLVTPLLPAEACLCSWWAVTPRKMASTSSCWSTSWQPAPGCQEPRVGHPPQ

SEQ ID NO: 46443 - protein, 79 aa, Homo sapiens
  MAP TO AC012614.3; EXPRESSED IN BRAIN, SIGNAL = 1.4; EST_HUMAN HIT: AA534370.1, EVALUE 6.30e-01
TTSCWPPAGRSSAAEGAGACSAGRQGSPNASAWRHAGPATCLCAALMGGFMKTTVSSTVLLASWERGSPSSTARTVSSK

SEQ ID NO: 46444 - protein, 27 aa, Homo sapiens
  MAP TO AC023314.3; EXPRESSED IN BRAIN, SIGNAL = 1.4
MMMMMTTMTTMTTTCCCCCFVFLEGNG

SEQ ID NO: 46445 - protein, 93 aa, Homo sapiens
  MAP TO AC007608.2; EXPRESSED IN BRAIN, SIGNAL = 1.4; EST_HUMAN HIT: BE542951.1, EVALUE 3.80e-01; SWISSPROT HIT: P51689, EVALUE 2.50e+00
PALSLSLSPPLFSAHLLITQEEGAMVDIIPTPVPLAKGSHVAKPMVSAAIPLVKASHMAQAHHINFHPIGQSKSHGQAHPIYSHPIGQTKSRG

SEQ ID NO: 46446 - protein, 36 aa, Homo sapiens
  MAP TO AC004547.1; EXPRESSED IN BRAIN, SIGNAL = 1.4; SWISSPROT HIT: O25340, EVALUE 2.90e+00; EST_HUMAN HIT: AA447523.1, EVALUE 2.90e-01
PGLPKNHSQFLLAKSYSSFQPNYTPTHLTHMYNHGK

SEQ ID NO: 46447 - protein, 26 aa, Homo sapiens
  MAP TO AL159141.1; EXPRESSED IN BRAIN, SIGNAL = 2.8
MAQLGVCLLQEVCPDHPTWMCSLPAP

SEQ ID NO: 46448 - protein, 40 aa, Homo sapiens
  MAP TO AC005137.1; EXPRESSED IN BRAIN, SIGNAL = 1.4; EXPRESSED IN ADULT LIVER, SIGNAL = 1.6; SWISSPROT HIT: P15926, EVALUE 4.80e+00
KDKKKAKYGSLQDLRKNKKELEFEQKLYKEKEEMLEKEKQ

SEQ ID NO: 46449 - protein, 55 aa, Homo sapiens
  MAP TO AP001347.1; EXPRESSED IN BRAIN, SIGNAL =   3; EST_HUMAN HIT: T18862.1, EVALUE 3.00e-05
KEDGHGDSSVVGVVAGRHQQELLPAQLLEARACGPVACLTVAGGGGNRDCSMTRV

SEQ ID NO: 46450 - protein, 47 aa, Homo sapiens
  MAP TO AF236875.1; EXPRESSED IN BRAIN, SIGNAL = 1.4; SWISSPROT HIT: Q14112, EVALUE 6.20e+00; EST_HUMAN HIT: AA417112.1, EVALUE 9.00e-19
LVLILILDQVETDTVKGEDYKVLLDTELSLPLCSLNRTEDVVRIQVL

SEQ ID NO: 46451 - protein, 49 aa, Homo sapiens
  MAP TO AL133413.5; EXPRESSED IN BRAIN, SIGNAL = 1.6
LRAKLEVPLPAKKKWDNPLSITQQSRILILQNIGSQPKNKETENRICSA

SEQ ID NO: 46452 - protein, 36 aa, Homo sapiens
  MAP TO AC018388.4; EXPRESSED IN BRAIN, SIGNAL = 1.3; EXPRESSED IN PLACENTA, SIGNAL = 1.7; SWISSPROT HIT: Q03177, EVALUE 6.40e+00
DQSSLNTSVSKGEENGEEKKDQHVNLINKTPLPNIH

SEQ ID NO: 46453 - protein, 68 aa, Homo sapiens
  MAP TO AC008481.4; EXPRESSED IN BRAIN, SIGNAL = 1.6; SWISSPROT HIT: Q60900, EVALUE 2.00e-19; EST_HUMAN HIT: BF514533.1, EVALUE 2.00e-18
MESQVGGGPAGPALPNGPLLGTNGATDDSKTNLIVNYLPQNMTQDEFKSLFGSIGDIESCKLVRDKIT

SEQ ID NO: 46454 - protein, 43 aa, Homo sapiens
  MAP TO AL133368.1; EXPRESSED IN BRAIN, SIGNAL =  12; EST_HUMAN HIT: AU137893.1, EVALUE 3.00e-20; SWISSPROT HIT: P09375, EVALUE 1.20e+00
VWPEGSDGTDINAVCRAHEKKLLSTGDDFGKVHLFSYPCSQFR

SEQ ID NO: 46455 - protein, 43 aa, Homo sapiens
  MAP TO AL133368.1; EXPRESSED IN BRAIN, SIGNAL =  12; EST_HUMAN HIT: AU137893.1, EVALUE 7.00e-19; SWISSPROT HIT: P47179, EVALUE 6.30e+00
ECGQKARTEPTSMPSVGPMRRNSCQQATTLAKCTSSHTPARSS

SEQ ID NO: 46456 - protein, 19 aa, Homo sapiens
  MAP TO AL135961.1; EXPRESSED IN BRAIN, SIGNAL = 1.7
FEDEPGTLQPLFQEQDVSP

SEQ ID NO: 46457 - protein, 33 aa, Homo sapiens
  MAP TO AC011462.3; EXPRESSED IN BRAIN, SIGNAL = 1.5; EXPRESSED IN ADULT LIVER, SIGNAL = 1.4; EST_HUMAN HIT: BE784914.1, EVALUE 6.00e-11
VAEKSRERLIRNTCEAVVLGTLHPRTSITVVLQ

SEQ ID NO: 46458 - protein, 39 aa, Homo sapiens; identical to SEQ ID NO: 40234
  MAP TO AC018716.2; EXPRESSED IN BRAIN, SIGNAL = 1.5; EST_HUMAN HIT: AW863096.1, EVALUE 7.20e+00; SWISSPROT HIT: O31151, EVALUE 3.70e+00

SEQ ID NO: 46459 - protein, 39 aa, Homo sapiens
  MAP TO AL136369.7; EXPRESSED IN BRAIN, SIGNAL = 1.4; EST_HUMAN HIT: BE885695.1, EVALUE 9.50e+00
GFTFFAIKNISTLPSHLSIYHVIILLCLRCSADDVGRED

SEQ ID NO: 46460 - protein, 18 aa, Homo sapiens
  MAP TO Z83840.7; EXPRESSED IN HELA, SIGNAL = 1.3; EXPRESSED IN BRAIN, SIGNAL = 2.4; EXPRESSED IN PLACENTA, SIGNAL = 1.7; EXPRESSED IN LUNG, SIGNAL = 1.4; EXPRESSED IN BONE MARROW, SIGNAL = 1.7; EXPRESSED IN FETAL LIVER, SIGNAL = 1.9; EXPRESSED IN ADULT LIVER, SIGNAL = 9.3
DVCLSHRERHSKPENLNF

SEQ ID NO: 46461 - protein, 90 aa, Homo sapiens
  MAP TO AC002470.5; EXPRESSED IN ADULT LIVER, SIGNAL = 4.2; EXPRESSED IN FETAL LIVER, SIGNAL = 7.8; EST_HUMAN HIT: AV655617.1, EVALUE 2.00e-35; EST_HUMAN HIT: T27867.1, EVALUE 3.00e-24; SWISSPROT HIT: P05546, EVALUE 3.00e-48
SWVNKFPVEMTHNHNFRLNEREVVKVSMMQTKGNFLAANDQELDCDILQLEYVGGISMLIVVPHKMSGMKTLEAQLTPRVVERWQKSMTN

SEQ ID NO: 46462 - protein, 128 aa, Homo sapiens
  MAP TO AC005921.3; EXPRESSED IN BT474, SIGNAL = 3.9; EXPRESSED IN HBL100, SIGNAL = 0.76; EXPRESSED IN FETAL LIVER, SIGNAL = 1.2; EXPRESSED IN HELA, SIGNAL = 1.2; EXPRESSED IN PLACENTA, SIGNAL = 0.75; EXPRESSED IN BONE MARROW, SIGNAL = 0.65; EXPRESSED IN LUNG, SIGNAL =   1; EXPRESSED IN ADULT LIVER, SIGNAL = 6.2; EST_HUMAN HIT: BE241679.1, EVALUE 2.00e-09; SWISSPROT HIT: O15438, EVALUE 3.00e-34
EGAGDRGEGRWGTDPGGESSHWHCESVGQEGLEGMDRQAPAAPGFMESPVPDCHGCSLQVELSVFWDYAKAVGLCTTLAICLLYVGQSAAAIGANVWLSAWTNDAMADSRQNNTSLRLGVYAALGILQ

SEQ ID NO: 46463 - protein, 22 aa, Homo sapiens
  MAP TO AC005921.3; EXPRESSED IN BT474, SIGNAL = 3.9; EXPRESSED IN HBL100, SIGNAL = 0.76; EXPRESSED IN FETAL LIVER, SIGNAL = 1.2; EXPRESSED IN HELA, SIGNAL = 1.2; EXPRESSED IN PLACENTA, SIGNAL = 0.75; EXPRESSED IN BONE MARROW, SIGNAL = 0.65; EXPRESSED IN LUNG, SIGNAL =   1; EXPRESSED IN ADULT LIVER, SIGNAL = 6.2
QMGRDRVGLYPGGTWVHQRRCR

SEQ ID NO: 46464 - protein, 50 aa, Homo sapiens
  MAP TO AC005921.3; EXPRESSED IN BT474, SIGNAL = 3.9; EXPRESSED IN HBL100, SIGNAL = 0.76; EXPRESSED IN FETAL LIVER, SIGNAL = 1.2; EXPRESSED IN HELA, SIGNAL = 1.2; EXPRESSED IN PLACENTA, SIGNAL = 0.75; EXPRESSED IN BONE MARROW, SIGNAL = 0.65; EXPRESSED IN LUNG, SIGNAL =   1; EXPRESSED IN ADULT LIVER, SIGNAL = 6.2; EST_HUMAN HIT: AA922903.1, EVALUE 1.70e-01; SWISSPROT HIT: Q64700, EVALUE 3.50e+00
GIMPRPWGSVPRWPSVSCMWVKVRLPLEPMCGSVPGQMMPWQTVDRTTLP

SEQ ID NO: 46465 - protein, 43 aa, Homo sapiens
  MAP TO AC007032.2; EXPRESSED IN LUNG, SIGNAL = 2.7; EXPRESSED IN ADULT LIVER, SIGNAL = 2.8; EXPRESSED IN PLACENTA, SIGNAL = 0.65; EXPRESSED IN HELA, SIGNAL = 1.3; EXPRESSED IN FETAL LIVER, SIGNAL = 2.5; EXPRESSED IN HBL100, SIGNAL = 1.8; EXPRESSED IN BONE MARROW, SIGNAL = 3.2; EXPRESSED IN BT474, SIGNAL = 1.9; EST_HUMAN HIT: AW630592.1, EVALUE 7.00e-20; SWISSPROT HIT: P43490, EVALUE 7.00e-22; EST_HUMAN HIT: BE884414.1, EVALUE 9.00e-21
KYDGHLPIEIKAVPEGFVIPRGNVLFTVENTDPECYWLTNWIE

SEQ ID NO: 46466 - protein, 30 aa, Homo sapiens
  MAP TO AC007463.3; EXPRESSED IN FETAL LIVER, SIGNAL = 1.3; EXPRESSED IN ADULT LIVER, SIGNAL = 1.5; EXPRESSED IN BT474, SIGNAL = 0.93; EXPRESSED IN HBL100, SIGNAL = 0.85; EXPRESSED IN PLACENTA, SIGNAL = 0.6; EXPRESSED IN HELA, SIGNAL = 0.79; EXPRESSED IN LUNG, SIGNAL =   2; EXPRESSED IN BONE MARROW, SIGNAL = 1.4
MEKCLNVIKTMSRFLLDTRIWKENPTVRSR

SEQ ID NO: 46467 - protein, 32 aa, Homo sapiens
  MAP TO AC008172.1; EXPRESSED IN PLACENTA, SIGNAL = 0.61; EXPRESSED IN HELA, SIGNAL =  71; EXPRESSED IN FETAL LIVER, SIGNAL =  38; EXPRESSED IN ADULT LIVER, SIGNAL =  39; EST_HUMAN HIT: T28684.1, EVALUE 1.00e-10; SWISSPROT HIT: P31327, EVALUE 1.00e-11; EST_HUMAN HIT: H57386.1, EVALUE 2.00e-10
VTKLFAEAVQKSRKVDSKSLFHYRQYSAGKAA

SEQ ID NO: 46468 - protein, 57 aa, Homo sapiens
  MAP TO AC008172.1; EXPRESSED IN FETAL LIVER, SIGNAL =  30; EXPRESSED IN HELA, SIGNAL =  13; EXPRESSED IN ADULT LIVER, SIGNAL =  25; EST_HUMAN HIT: H59295.1, EVALUE 1.00e-26; EST_HUMAN HIT: AV659801.1, EVALUE 1.00e-26; SWISSPROT HIT: P31327, EVALUE 1.00e-27
VIECNLRASRSFPFVSKTLGVDFIDVATKVMIGENVDEKHLPTLDHPIIPADYVAIK

SEQ ID NO: 46469 - protein, 47 aa, Homo sapiens
  MAP TO AC008172.1; EXPRESSED IN HELA, SIGNAL = 7.3; EXPRESSED IN FETAL LIVER, SIGNAL =   9; EXPRESSED IN ADULT LIVER, SIGNAL = 9.2; SWISSPROT HIT: P31327, EVALUE 2.00e-21; EST_HUMAN HIT: AA114290.1, EVALUE 2.00e-11
ESMTEETLKRAKEIGFSDKQISKCLGLTEAQTRELRLKKNIHPWVKQ

SEQ ID NO: 46470 - protein, 58 aa, Homo sapiens
  MAP TO AC008172.1; EXPRESSED IN ADULT LIVER, SIGNAL =  12; EXPRESSED IN PLACENTA, SIGNAL = 2.9; EXPRESSED IN FETAL LIVER, SIGNAL =  10; EXPRESSED IN HELA, SIGNAL = 8.9; SWISSPROT HIT: P31327, EVALUE 6.00e-29; EST_HUMAN HIT: BE544915.1, EVALUE 8.00e-15; EST_HUMAN HIT: AA333887.1, EVALUE 2.00e-06
YPLAFIAAKIALGIPLPEIKNVVSGKTSACFEPSLDYMVTKIPRWDLDRFHGTSSRIG

SEQ ID NO: 46471 - protein, 48 aa, Homo sapiens
  MAP TO AC008172.1; EXPRESSED IN HELA, SIGNAL = 2.6; EXPRESSED IN FETAL LIVER, SIGNAL = 3.8; EXPRESSED IN ADULT LIVER, SIGNAL = 3.6; SWISSPROT HIT: P31327, EVALUE 2.00e-22
YPEAITDPAYKGQILTMANPIIGNGGAPDTTALDELGLSKYLESNGIK

SEQ ID NO: 46472 - protein, 44 aa, Homo sapiens
  MAP TO AC008172.1; EXPRESSED IN HELA, SIGNAL = 2.6; EXPRESSED IN FETAL LIVER, SIGNAL = 3.8; EXPRESSED IN ADULT LIVER, SIGNAL = 3.6
PGTQKLLLTLPTKDRFSQWPTLLLGMVELLILLLWMNWDLANIW

SEQ ID NO: 46473 - protein, 601 aa, Homo sapiens
  MAP TO AL034553.12; EXPRESSED IN ADULT LIVER, SIGNAL = 1.4; EXPRESSED IN BONE MARROW, SIGNAL = 3.1; EXPRESSED IN PLACENTA, SIGNAL = 1.7; EXPRESSED IN BT474, SIGNAL = 6.2; EXPRESSED IN HBL100, SIGNAL = 3.8; EXPRESSED IN FETAL LIVER, SIGNAL = 1.7; EXPRESSED IN LUNG, SIGNAL = 2.5; EXPRESSED IN HELA, SIGNAL = 1.3; EST_HUMAN HIT: AW978442.1, EVALUE 1.00e-116; SWISSPROT HIT: P16241, EVALUE 9.80e-02
TLLNHMLIHGLSCPYCRSTFNDVEKMAAHMRMVHIDEEMGPKTDSTLSFDLTLQQGSHTNIHLLVTTYNLRDAPAESVAYHAQNNPPVPPKPQPKVQEKADIPVKSSPQAAVPYKKDVGKTLCPLCFSILKGPISDALAHHLRERHQVIQTVHPVEKKLTYKCIHCLGVYTSNMTASTITLHLVHCRGVGKTQNGQDKTNAPSRLNQSPSLAPVKRTYEQMEFPLLKKRKLDDDSDSPSFFEEKPEEPVVLALDPKGHEDDSYEARKSFLTKYFNKQPYPTRREIEKLAASLWLWKSDIASHFSNKRKKCVRDCEKYKPGVLLGFNMKELNKVKHEMDFDAEWLFENHDEKDSRVNASKTADKKLNLGKEDDSSSDSFENLEEESNESGSPFDPVFEVEPKISNDNPEEHVLKVIPEDASESEEKLDQKEDGSKYETIHLTEEPTKLMHNASDSEVDQDDVVEWKDGASPSESGPGSQQVSDFEDNTCEMKPGTWSDESSQSEDARSSKPAAKKKATMQGDREQLKWKNSSYGKVEGFWSKDQSQWKNASENDERLSNPQIEWQNSTIDSEDGEQFDNMTDGVAEPMHGSLAGVKLSSQQA

SEQ ID NO: 46474 - protein, 35 aa, Homo sapiens
  MAP TO AL034553.12; EXPRESSED IN ADULT LIVER, SIGNAL = 1.4; EXPRESSED IN BONE MARROW, SIGNAL = 3.1; EXPRESSED IN PLACENTA, SIGNAL = 1.7; EXPRESSED IN BT474, SIGNAL = 6.2; EXPRESSED IN HBL100, SIGNAL = 3.8; EXPRESSED IN FETAL LIVER, SIGNAL = 1.7; EXPRESSED IN LUNG, SIGNAL = 2.5; EXPRESSED IN HELA, SIGNAL = 1.3; EST_HUMAN HIT: AW978442.1, EVALUE 6.00e-16; SWISSPROT HIT: P27648, EVALUE 1.60e+00; EST_HUMAN HIT: AW503931.1, EVALUE 8.00e-16
LVHIAVQLSMMWKRWPHTCGWFTLMKRWDLKQILL

SEQ ID NO: 46475 - protein, 58 aa, Homo sapiens
  MAP TO AL049741.7; EXPRESSED IN LUNG, SIGNAL = 0.82; EXPRESSED IN PLACENTA, SIGNAL = 0.82; EXPRESSED IN FETAL LIVER, SIGNAL = 6.5; EXPRESSED IN ADULT LIVER, SIGNAL =  16; EST_HUMAN HIT: T79329.1, EVALUE 9.00e-32; SWISSPROT HIT: Q02985, EVALUE 1.00e-29; EST_HUMAN HIT: AV648040.1, EVALUE 1.00e-31
KCYFPYLENGYNQNYGRKFVQGNSTEVACHPGYGLPKAQTTVTCTEKGWSPTPRCIRV

SEQ ID NO: 46476 - protein, 50 aa, Homo sapiens
  MAP TO AL049842.5; EXPRESSED IN ADULT LIVER, SIGNAL = 4.9; EXPRESSED IN FETAL LIVER, SIGNAL = 5.2; EST_HUMAN HIT: AW026589.1, EVALUE 4.50e-02
GPKCSWTAYNNTPISGASQSALLGSSSRIHACSHVPAGAAAQWGAYSLAE

SEQ ID NO: 46477 - protein, 55 aa, Homo sapiens
  MAP TO AL050310.5; EXPRESSED IN PLACENTA, SIGNAL = 2.5; EXPRESSED IN BONE MARROW, SIGNAL = 1.1; EXPRESSED IN FETAL LIVER, SIGNAL = 2.1; EXPRESSED IN ADULT LIVER, SIGNAL = 1.1; EST_HUMAN HIT: BE018538.1, EVALUE 2.00e-12; EST_HUMAN HIT: R35479.1, EVALUE 2.00e-12
  unsure 43
GRCTRENCKYLHPPPHLKTQLEINGRNNLIQQKTAAAMFAQQXAAYAPKRSNVIT

SEQ ID NO: 46478 - protein, 22 aa, Homo sapiens
  MAP TO AL050310.5; EXPRESSED IN PLACENTA, SIGNAL = 2.5; EXPRESSED IN BONE MARROW, SIGNAL = 1.1; EXPRESSED IN FETAL LIVER, SIGNAL = 2.1; EXPRESSED IN ADULT LIVER, SIGNAL = 1.1; EST_HUMAN HIT: BE018538.1, EVALUE 3.00e-05; EST_HUMAN HIT: AU139230.1, EVALUE 4.00e-05
SVYPRELQVPSPSSTLKNAAGD

SEQ ID NO: 46479 - protein, 178 aa, Homo sapiens
  MAP TO AC007842.1; EXPRESSED IN FETAL LIVER, SIGNAL = 0.95; EXPRESSED IN LUNG, SIGNAL = 1.4; EXPRESSED IN PLACENTA, SIGNAL =   2; EXPRESSED IN ADULT LIVER, SIGNAL = 0.71; EXPRESSED IN BT474, SIGNAL = 2.4; EXPRESSED IN HELA, SIGNAL = 0.59; SWISSPROT HIT: Q28983, EVALUE 1.00e-19; EST_HUMAN HIT: BF341070.1, EVALUE 1.00e-19; EST_HUMAN HIT: BE294466.1, EVALUE 1.00e-11
VNGVDMKLPVVLANGQIRASQHGSDVVIETDFGLRVAYDLVYYVRVTVPGNYYQQMCGLCGNYNGDPKDDFQKPNGSQAGNANEFGNSWEEVVPDSPCLPPTPCPPGSEDCIPSHKCPPELEKKYQKEEFCGLLSSPTGPLSSCHKLVDPQGPLKDCIFDLCLGGGNLSILCSNIHAY

SEQ ID NO: 46480 - protein, 40 aa, Homo sapiens
  MAP TO AC007847.1; EXPRESSED IN ADULT LIVER, SIGNAL = 0.66; EXPRESSED IN PLACENTA, SIGNAL = 1.4; EXPRESSED IN BONE MARROW, SIGNAL = 0.75; EXPRESSED IN HBL100, SIGNAL =  14; EXPRESSED IN LUNG, SIGNAL = 0.75; EXPRESSED IN HELA, SIGNAL = 0.67; EXPRESSED IN FETAL LIVER, SIGNAL = 0.86; EST_HUMAN HIT: AI026718.1, EVALUE 2.00e-12
  unsure 31
IAQSHNYCYSAKNMPRGIAEDENNNFKNWSXATRTLESTS

SEQ ID NO: 46481 - protein, 243 aa, Homo sapiens
  MAP TO AC007566.1; EXPRESSED IN PLACENTA, SIGNAL = 0.93; EXPRESSED IN ADULT LIVER, SIGNAL = 0.72; EXPRESSED IN BONE MARROW, SIGNAL = 1.5; EXPRESSED IN HBL100, SIGNAL = 2.4; EXPRESSED IN FETAL LIVER, SIGNAL = 0.89; EXPRESSED IN LUNG, SIGNAL = 0.81; EXPRESSED IN HELA, SIGNAL = 0.93; EXPRESSED IN BT474, SIGNAL = 2.3; EST_HUMAN HIT: BF237578.1, EVALUE 1.00e-96; EST_HUMAN HIT: AW957868.1, EVALUE 1.00e-74; SWISSPROT HIT: P54786, EVALUE 2.90e-01
ALSSLDEDDPNILLAIQLSLQESGLALDEETRDFLSNEASLGAIGTSLPSRLDSVPRNTDSPRAALSSSELLELGDSLMRLGAENDPFSTDTLSSHPLSEARSDFCPSSSDPDSAGQDPNINDNLLGNIMAWFHDMNPQSIALIPPATTEISADSQLPCIKDGSEGVKDVELVLPEDSMFEDASVSEGRGTQIEENPLEENILAGEAASQAGDSGNEAANRGDGSDVSSQTPQTSSDWLEQVH

SEQ ID NO: 46482 - protein, 60 aa, Homo sapiens
  MAP TO AC005520.2; EXPRESSED IN BT474, SIGNAL = 1.4; EXPRESSED IN BONE MARROW, SIGNAL = 0.94; EXPRESSED IN HBL100, SIGNAL = 2.4; EXPRESSED IN FETAL LIVER, SIGNAL = 0.81; EXPRESSED IN HELA, SIGNAL = 0.75; EXPRESSED IN PLACENTA, SIGNAL = 0.67; EXPRESSED IN LUNG, SIGNAL = 0.78; EXPRESSED IN ADULT LIVER, SIGNAL = 0.73; EST_HUMAN HIT: BE261694.1, EVALUE 3.00e-32; SWISSPROT HIT: P52747, EVALUE 4.00e-16; EST_HUMAN HIT: AU123700.1, EVALUE 4.00e-32
NDRSFICPAEGCGKSFYVLQRLKVHMRTHNGEKPFMCHESGCGKQFTTAGNLKNHRRIHT

SEQ ID NO: 46483 - protein, 44 aa, Homo sapiens
  MAP TO Z95325.2; EXPRESSED IN PLACENTA, SIGNAL = 1.7; EXPRESSED IN BONE MARROW, SIGNAL = 1.9; EXPRESSED IN HBL100, SIGNAL = 1.2; EXPRESSED IN ADULT LIVER, SIGNAL =   1; EXPRESSED IN BT474, SIGNAL = 1.4; EXPRESSED IN FETAL LIVER, SIGNAL = 0.84; EXPRESSED IN LUNG, SIGNAL =   1; EXPRESSED IN HELA, SIGNAL = 1.2; EST_HUMAN HIT: AA078318.1, EVALUE 1.00e-05; SWISSPROT HIT: P32158, EVALUE 8.00e+00
VISTLQKDFYCFFLLQNITLVHYIDGIMLTESSEQEVADTLDLL

SEQ ID NO: 46484 - protein, 80 aa, Homo sapiens
  MAP TO AP000154.1; EXPRESSED IN ADULT LIVER, SIGNAL = 0.85; EXPRESSED IN BONE MARROW, SIGNAL = 1.3; EXPRESSED IN HELA, SIGNAL = 0.85; EXPRESSED IN PLACENTA, SIGNAL = 1.4; EXPRESSED IN BT474, SIGNAL = 0.94; EXPRESSED IN LUNG, SIGNAL = 0.85; EXPRESSED IN HBL100, SIGNAL =   1; EXPRESSED IN FETAL LIVER, SIGNAL = 0.95; EST_HUMAN HIT: BE907273.1, EVALUE 9.00e-39; SWISSPROT HIT: Q63470, EVALUE 1.00e-41
FEMLSYNLYDLLRNTNFRGVSLNLTRKFAQQMCTALLFLATPELSIIHCDLKPENILLCNPKRSAIKIVDFGSSCQLGQR

SEQ ID NO: 46485 - protein, 89 aa, Homo sapiens
  MAP TO AL049839.2; EXPRESSED IN FETAL LIVER, SIGNAL = 6.2; EXPRESSED IN ADULT LIVER, SIGNAL = 3.2; SWISSPROT HIT: P05154, EVALUE 2.00e-48; EST_HUMAN HIT: BE937835.1, EVALUE 2.00e-47
KWETSFNHKGTQEQDFYVTSETVVRVPMMSREDQYHYLLDRNLSCRVVGVPYQGNATALFILPSEGKMQQVENGLSEKTLRKWLKMFKK

SEQ ID NO: 46486 - protein, 38 aa, Homo sapiens
  MAP TO AL049839.2; EXPRESSED IN FETAL LIVER, SIGNAL = 6.2; EXPRESSED IN ADULT LIVER, SIGNAL = 3.2; EST_HUMAN HIT: AV697680.1, EVALUE 8.00e-04
THDEPRGSVSLPPGPEPLLQGGGGPLPRQCHGFVHSPQ

SEQ ID NO: 46487 - protein, 54 aa, Homo sapiens
  MAP TO AL049839.2; EXPRESSED IN HBL100, SIGNAL = 0.7; EXPRESSED IN FETAL LIVER, SIGNAL = 5.2; EXPRESSED IN ADULT LIVER, SIGNAL = 2.3; SWISSPROT HIT: P29622, EVALUE 6.00e-28; EST_HUMAN HIT: BE870736.1, EVALUE 7.00e-27
WYLHDRYLPCSVLRMDYKGDATVFFILPNQGKMREIEEVLTPEMLMRWNNLLRK

SEQ ID NO: 46488 - protein, 49 aa, Homo sapiens
  MAP TO AL031965.7; EXPRESSED IN FETAL LIVER, SIGNAL =   9; EXPRESSED IN LUNG, SIGNAL =   1; EXPRESSED IN ADULT LIVER, SIGNAL =  22; EXPRESSED IN PLACENTA, SIGNAL = 2.1; SWISSPROT HIT: P39400, EVALUE 3.50e+00
VSKIVDAIYRQLCDNNCMKDVMLQVITLLTCTSPKKVIFQLMDYPVPAD

SEQ ID NO: 46489 - protein, 29 aa, Homo sapiens
  MAP TO AC008269.1; EXPRESSED IN ADULT LIVER, SIGNAL = 2.3; EXPRESSED IN BONE MARROW, SIGNAL = 0.7; EST_HUMAN HIT: BE888016.1, EVALUE 8.00e-04
LFLLLLPSLVNIKKMRIKNLMMIHFHLMN

SEQ ID NO: 46490 - protein, 32 aa, Homo sapiens
  MAP TO AC008039.1; EXPRESSED IN BONE MARROW, SIGNAL = 1.8; EXPRESSED IN HBL100, SIGNAL = 3.2; EXPRESSED IN HELA, SIGNAL = 2.6; EXPRESSED IN PLACENTA, SIGNAL = 1.5; EXPRESSED IN BT474, SIGNAL = 2.5; EXPRESSED IN FETAL LIVER, SIGNAL = 2.6; EXPRESSED IN LUNG, SIGNAL = 1.3; EXPRESSED IN ADULT LIVER, SIGNAL = 2.4; EST_HUMAN HIT: BE893825.1, EVALUE 7.00e-11
TRLGTLSPAFSTRVLPAQATEYAFAFIQVPQD

SEQ ID NO: 46491 - protein, 32 aa, Homo sapiens
  MAP TO AC008039.1; EXPRESSED IN BONE MARROW, SIGNAL = 1.8; EXPRESSED IN HBL100, SIGNAL = 3.2; EXPRESSED IN HELA, SIGNAL = 2.6; EXPRESSED IN PLACENTA, SIGNAL = 1.5; EXPRESSED IN BT474, SIGNAL = 2.5; EXPRESSED IN FETAL LIVER, SIGNAL = 2.6; EXPRESSED IN LUNG, SIGNAL = 1.3; EXPRESSED IN ADULT LIVER, SIGNAL = 2.4; EST_HUMAN HIT: BE893825.1, EVALUE 1.00e-13
HPPGYPITCLQHSGAASSSHGVCLRLHPGAPR

SEQ ID NO: 46492 - protein, 54 aa, Homo sapiens
  MAP TO AC006559.6; EXPRESSED IN FETAL LIVER, SIGNAL = 1.2; EXPRESSED IN LUNG, SIGNAL = 0.84; EXPRESSED IN ADULT LIVER, SIGNAL = 1.8; EXPRESSED IN PLACENTA, SIGNAL = 0.88; SWISSPROT HIT: P54840, EVALUE 3.00e-20; EST_HUMAN HIT: T78495.1, EVALUE 4.00e-19
IYIVDRRFRSPDDSCNQLTKFLYGFCKQSRRQRIIQRNRTERLSDLLDWRYLGR

SEQ ID NO: 46493 - protein, 70 aa, Homo sapiens
  MAP TO AC006474.3; EXPRESSED IN BT474, SIGNAL = 1.2; EXPRESSED IN ADULT LIVER, SIGNAL =   1; EXPRESSED IN PLACENTA, SIGNAL = 1.2; EXPRESSED IN BONE MARROW, SIGNAL = 2.2; EXPRESSED IN FETAL LIVER, SIGNAL = 0.81; EXPRESSED IN LUNG, SIGNAL = 0.63; EST_HUMAN HIT: AW973566.1, EVALUE 4.00e-25
PPKTYTQDGVCLTESGMTQLQSLTVTVPRRKRSKPKLKLKIINQNSVAVLQTPPDIQSEHSRDGEMDDSR

SEQ ID NO: 46494 - protein, 110 aa, Homo sapiens
  MAP TO AB023055.1; EXPRESSED IN PLACENTA, SIGNAL = 1.4; EXPRESSED IN ADULT LIVER, SIGNAL = 0.89; EST_HUMAN HIT: AI248753.1, EVALUE 1.00e-12; SWISSPROT HIT: Q02084, EVALUE 2.00e-12
MIPLQKDNQEEGVCPICQESLKEAVSTNCGHLFCRVCLTQHVEKASASGVFCCPLCRKPCSEEVLGTGYICPNHQKRVCRFCEESRLLLCVECLVSPEHMSHHELTIENA

SEQ ID NO: 46495 - protein, 44 aa, Homo sapiens
  MAP TO AC011145.1; EXPRESSED IN FETAL LIVER, SIGNAL = 2.5; EXPRESSED IN ADULT LIVER, SIGNAL = 1.5; EST_HUMAN HIT: AA010242.1, EVALUE 2.00e-08; SWISSPROT HIT: Q64565, EVALUE 3.00e-11
FRGPWGGSHCRDSPVQTIRKCSCAPGPTGQGGCQWSVGSWKGHE

SEQ ID NO: 46496 - protein, 44 aa, Homo sapiens
  MAP TO AC011145.1; EXPRESSED IN FETAL LIVER, SIGNAL = 2.5; EXPRESSED IN ADULT LIVER, SIGNAL = 1.5; EST_HUMAN HIT: AA010242.1, EVALUE 2.00e-07; SWISSPROT HIT: P36431, EVALUE 1.60e+00
SWPLGRKPLSRFSSANNQEVQLCTRSDWARGVPVECWKLEGTRI

SEQ ID NO: 46497 - protein, 28 aa, Homo sapiens
  MAP TO AL035689.17; EXPRESSED IN LUNG, SIGNAL = 1.4; EXPRESSED IN ADULT LIVER, SIGNAL = 1.2; EXPRESSED IN BT474, SIGNAL = 1.1; EXPRESSED IN FETAL LIVER, SIGNAL = 1.1
GPTNSEKPSSLTFSFILLQSKSLWPARH

SEQ ID NO: 46498 - protein, 39 aa, Homo sapiens
  MAP TO AL049697.8; EXPRESSED IN BT474, SIGNAL = 1.2; EXPRESSED IN FETAL LIVER, SIGNAL = 0.88; EXPRESSED IN ADULT LIVER, SIGNAL = 1.3; EST_HUMAN HIT: AI478904.1, EVALUE 9.00e-08
RLGVYFDEYSGESFYREKSQEVLKLLESKGLLLKTMYDQ

SEQ ID NO: 46499 - protein, 17 aa, Homo sapiens
  MAP TO AL109983.1; EXPRESSED IN PLACENTA, SIGNAL = 4.3; EXPRESSED IN BONE MARROW, SIGNAL =   1; EXPRESSED IN FETAL LIVER, SIGNAL = 3.4; EXPRESSED IN ADULT LIVER, SIGNAL = 1.3
DSLGFSGFLLGYLGKQH

SEQ ID NO: 46500 - protein, 96 aa, Homo sapiens
  MAP TO AL109983.1; EXPRESSED IN ADULT LIVER, SIGNAL = 0.99; EXPRESSED IN PLACENTA, SIGNAL = 3.7; EST_HUMAN HIT: M78330.1, EVALUE 2.50e-02; SWISSPROT HIT: P39428, EVALUE 2.60e+00
FHDDGSARQKGESDYKVIIQQWFSKSGPWTTSSNVTWGLLELQQSISESAVLTIPPGDSGAGSNLITMFLRNRKETDLCSGRSKVNRGWNSGRCKQ

SEQ ID NO: 46501 - protein, 19 aa, Homo sapiens
  MAP TO AL109983.1; EXPRESSED IN ADULT LIVER, SIGNAL = 0.99; EXPRESSED IN PLACENTA, SIGNAL = 3.7
EWLKQLIQKCFVAVLTSPR

SEQ ID NO: 46502 - protein, 46 aa, Homo sapiens
  MAP TO AL117354.2; EXPRESSED IN BONE MARROW, SIGNAL = 0.91; EXPRESSED IN FETAL LIVER, SIGNAL =  18; EXPRESSED IN ADULT LIVER, SIGNAL = 0.92; EXPRESSED IN BT474, SIGNAL =   1; EXPRESSED IN PLACENTA, SIGNAL = 0.94; EXPRESSED IN HBL100, SIGNAL = 1.2; EXPRESSED IN HELA, SIGNAL = 1.1; SWISSPROT HIT: P53337, EVALUE 1.20e+00; EST_HUMAN HIT: BF305536.1, EVALUE 2.00e-14
DGHKAKKPACKFEEGQDVLARWSDGLFYLGTIKKASYFNVSFAVFA

SEQ ID NO: 46503 - protein, 85 aa, Homo sapiens
  MAP TO AC011004.1; EXPRESSED IN ADULT LIVER, SIGNAL = 1.3; EST_HUMAN HIT: BE173102.1, EVALUE 2.00e-16; SWISSPROT HIT: P20240, EVALUE 2.50e-01
FLLLLFVCLFFKESFQFKVVFDVRKCKRSHDSFTTSRSFIIKILHWSLGNQLFIKAKDKKRHFREQLENVPGQPAAHHPECLQQS

SEQ ID NO: 46504 - protein, 166 aa, Homo sapiens; identical to SEQ ID NO: 37883
  MAP TO AL121653.1; EXPRESSED IN PLACENTA, SIGNAL = 1.7; EXPRESSED IN HBL100, SIGNAL = 4.2; EXPRESSED IN BONE MARROW, SIGNAL =   1; EXPRESSED IN LUNG, SIGNAL = 0.92; EXPRESSED IN FETAL LIVER, SIGNAL = 0.9; EXPRESSED IN ADULT LIVER, SIGNAL = 1.1; EXPRESSED IN BT474, SIGNAL = 1.6; EXPRESSED IN HELA, SIGNAL = 1.3; EST_HUMAN HIT: AW444637.1, EVALUE 1.00e-76; SWISSPROT HIT: Q9ZHB3, EVALUE 2.80e+00

SEQ ID NO: 46505 - protein, 69 aa, Homo sapiens
  MAP TO AL034343.17; EXPRESSED IN BONE MARROW, SIGNAL = 1.8; EXPRESSED IN FETAL LIVER, SIGNAL = 1.3; EXPRESSED IN ADULT LIVER, SIGNAL = 1.2; EXPRESSED IN BT474, SIGNAL = 3.6; EXPRESSED IN HBL100, SIGNAL = 5.2; EXPRESSED IN PLACENTA, SIGNAL = 1.9; EXPRESSED IN HELA, SIGNAL = 4.9; SWISSPROT HIT: P25206, EVALUE 4.00e-34; EST_HUMAN HIT: AU124791.1, EVALUE 5.00e-33
ERRLEAGAMVLADRGVVCIDEFDKMSDMDRTAIHEVMEQGRVTIAKAGIHARLNARCSVLAAANPVYGR

SEQ ID NO: 46506 - protein, 85 aa, Homo sapiens
  MAP TO AL035415.20; EXPRESSED IN HBL100, SIGNAL = 0.9; EXPRESSED IN BONE MARROW, SIGNAL = 1.2; EXPRESSED IN ADULT LIVER, SIGNAL = 1.3; EST_HUMAN HIT: AV721620.1, EVALUE 1.80e+00; SWISSPROT HIT: Q27979, EVALUE 2.10e+00
PMLAWNVAASTRPARTTPMGRHPSSVFSPGTNSVTLLVVCYQLPGRRVISVKVVSLPSPFWNESSLRGGTLLALSATPFLGPIAG

SEQ ID NO: 46507 - protein, 70 aa, Homo sapiens
  MAP TO AL121756.2; EXPRESSED IN BT474, SIGNAL = 1.1; EXPRESSED IN ADULT LIVER, SIGNAL = 1.1; EXPRESSED IN HBL100, SIGNAL = 2.5; EXPRESSED IN PLACENTA, SIGNAL = 0.97; EXPRESSED IN FETAL LIVER, SIGNAL =   1; EST_HUMAN HIT: BF126974.1, EVALUE 5.50e+00; SWISSPROT HIT: O43462, EVALUE 4.30e+00
VAVAYPKSKPLTTQIKIKKPPKVTMKTGKSLLHLHSTLEMFAARWRSKAPMSLFLLEVVREIVPFPIYSQ

SEQ ID NO: 46508 - protein, 33 aa, Homo sapiens
  MAP TO AB026899.1; EXPRESSED IN ADULT LIVER, SIGNAL = 1.4; EXPRESSED IN BT474, SIGNAL = 0.97; EXPRESSED IN BONE MARROW, SIGNAL = 0.95; EST_HUMAN HIT: AA360549.1, EVALUE 2.30e-02
EESVHFDRDLPEFGHVLDVHVCVMGVLVLGSSR

SEQ ID NO: 46509 - protein, 90 aa, Homo sapiens
  MAP TO AB020866.1; EXPRESSED IN BT474, SIGNAL = 1.8; EXPRESSED IN ADULT LIVER, SIGNAL =   3; EXPRESSED IN HBL100, SIGNAL = 1.8; EXPRESSED IN HELA, SIGNAL =   1; EXPRESSED IN PLACENTA, SIGNAL = 1.6; EXPRESSED IN BONE MARROW, SIGNAL =   1; EXPRESSED IN LUNG, SIGNAL = 0.91; SWISSPROT HIT: P52890, EVALUE 4.40e-01; EST_HUMAN HIT: BF431451.1, EVALUE 6.00e-27
RSIGSDSQGRATAANNKRQLSENRKPFNFLPMQINTNKSKDASTSPPNRETIGSAQCKELFASALSNDLLQNCQVSEEDGRGEPAMESSQ

SEQ ID NO: 46510 - protein, 72 aa, Homo sapiens
  MAP TO AF165147.1; EXPRESSED IN ADULT LIVER, SIGNAL = 1.2; EXPRESSED IN HBL100, SIGNAL =   1; EST_HUMAN HIT: AW514635.1, EVALUE 1.20e+00; SWISSPROT HIT: P19703, EVALUE 1.50e+00
SFLNRDKILYNMEQNGAYENSCYLQALRFLDEGTRKRLGNICSVSPSKLNNQFVACYSLRNECRHRRDPALK

SEQ ID NO: 46511 - protein, 64 aa, Homo sapiens
  MAP TO AL035425.10; EXPRESSED IN PLACENTA, SIGNAL = 1.3; EXPRESSED IN HBL100, SIGNAL = 2.8; EXPRESSED IN BONE MARROW, SIGNAL =   1; EXPRESSED IN ADULT LIVER, SIGNAL = 2.3; EXPRESSED IN FETAL LIVER, SIGNAL = 0.89; EXPRESSED IN HELA, SIGNAL = 1.7
QKGDGGLPGIPGNPGLPGPKGEPGFHGFPGVQGPPGPPGSPGPALEGPKGNPGPQGPPGRPGMS

SEQ ID NO: 46512 - protein, 506 aa, Homo sapiens
  MAP TO AC011406.1; EXPRESSED IN PLACENTA, SIGNAL = 5.3; EXPRESSED IN BONE MARROW, SIGNAL = 0.97; EXPRESSED IN LUNG, SIGNAL = 1.2; EXPRESSED IN FETAL LIVER, SIGNAL = 1.1; EXPRESSED IN ADULT LIVER, SIGNAL = 0.93; EXPRESSED IN HBL100, SIGNAL = 1.8; EXPRESSED IN HELA, SIGNAL = 1.5; EST_HUMAN HIT: AI557282.1, EVALUE 1.00e-54; SWISSPROT HIT: P50443, EVALUE 0.00e+00
VAMGFFQVGFVSVYLSDALLSGFVTGASFTILTSQAKYLLGLNLPRTNGVGSLITTWIHVFRNIHKTNLCDLITSLLCLLVLLPTKELNEHFKSKLKAPIPIELVVVVAATLASHFGKLHENYNSSIAGHIPTGFMPPKVPEWNLIPSVAVDAIAISIIGFAITVSLSEMFAKKHGYTVKANQEMYAIGFCNIIPSFFHCFTTSAALAKTLVKESTGCHTQLSGVVTALVLLLVLLVIAPLFYSLQKSVLGVITIVNLRGALRKFRDLPKMWSISRMDTVIWFVTMLSSALLSTEIGLLVGVCFSIFCVILRTQKPKSSLLGLVEESEVFESVSAYKNLQTKPGIKIFRFVAPLYYINKECFKSALYKQTVNPILIKVAWKKAAKRKIKEKVVTLGGIQDEMSVQLSHDPLELHTIVIDCSAIQFLDTAGIHTLKEVRRDYEAIGIQVLLAQCNPTVRDSLTNGEYCKKEEENLLFYSVYEAMAFAEVSKNQKGVCVPNGLSLSSD

SEQ ID NO: 46513 - protein, 27 aa, Homo sapiens
  MAP TO AP000550.1; EXPRESSED IN ADULT LIVER, SIGNAL =   1; EXPRESSED IN PLACENTA, SIGNAL = 1.1; EST_HUMAN HIT: H55224.1, EVALUE 3.00e-10
LAIFQWHLFHHEFLRQSDGATLFQNNH

SEQ ID NO: 46514 - protein, 70 aa, Homo sapiens
  MAP TO AC011342.1; EXPRESSED IN PLACENTA, SIGNAL = 1.9; EXPRESSED IN LUNG, SIGNAL = 1.1; EXPRESSED IN BONE MARROW, SIGNAL = 1.2; EXPRESSED IN ADULT LIVER, SIGNAL = 0.95; SWISSPROT HIT: P15317, EVALUE 6.30e+00; EST_HUMAN HIT: AU140307.1, EVALUE 1.00e-16
DYGSPSQFWEQELESLHFVIEMKNERIHELDRRLILMETVVCDWEWLGDAASGSRFLGVSFVKHAEGRWF

SEQ ID NO: 46515 - protein, 44 aa, Homo sapiens
  MAP TO AL117332.2; EXPRESSED IN PLACENTA, SIGNAL = 1.8; EXPRESSED IN FETAL LIVER, SIGNAL = 4.3; EXPRESSED IN HELA, SIGNAL = 1.4; EXPRESSED IN HBL100, SIGNAL = 3.2; EXPRESSED IN LUNG, SIGNAL = 1.1; EXPRESSED IN BONE MARROW, SIGNAL = 0.99; EXPRESSED IN ADULT LIVER, SIGNAL = 1.2; EXPRESSED IN BT474, SIGNAL = 4.3; EST_HUMAN HIT: AA173571.1, EVALUE 5.00e-20; SWISSPROT HIT: Q02792, EVALUE 3.00e-15
YLERELTMASLPFTFDVERSIDDWVFMCFFVGNDFLPHLPSLEI

SEQ ID NO: 46516 - protein, 64 aa, Homo sapiens
  MAP TO AC010968.1; EXPRESSED IN ADULT LIVER, SIGNAL = 1.3; EXPRESSED IN BT474, SIGNAL = 1.4; EXPRESSED IN HBL100, SIGNAL = 1.4; EXPRESSED IN PLACENTA, SIGNAL = 1.1; EST_HUMAN HIT: H63227.1, EVALUE 1.00e-29; SWISSPROT HIT: O30272, EVALUE 1.50e+00
WATVTFHLPHHVLKSIASAIVNELKKINQNVAALPVASSVMDRLSYLLPSARPELGVGPGRSVD

SEQ ID NO: 46517 - protein, 31 aa, Homo sapiens
  MAP TO AC002472.3; EXPRESSED IN PLACENTA, SIGNAL = 2.4; EXPRESSED IN HELA, SIGNAL = 1.3; EXPRESSED IN FETAL LIVER, SIGNAL = 0.95; EXPRESSED IN ADULT LIVER, SIGNAL = 0.92; EXPRESSED IN HBL100, SIGNAL = 1.6
AVVMGKEINACKITAVVTMRHTVFLARGDSE

SEQ ID NO: 46518 - protein, 68 aa, Homo sapiens
  MAP TO AC008073.1; EXPRESSED IN ADULT LIVER, SIGNAL = 4.8; EXPRESSED IN FETAL LIVER, SIGNAL = 1.6; EXPRESSED IN PLACENTA, SIGNAL = 1.1; EXPRESSED IN LUNG, SIGNAL =   1; EST_HUMAN HIT: AW505025.1, EVALUE 1.00e-36; SWISSPROT HIT: Q15811, EVALUE 3.00e-23
GQVVENLKAQALCSWTAKKDNHLNFSKHDIITVLEQQENWWFGEVHGGRGWFPKSYVKIIPGSEVKRE

SEQ ID NO: 46519 - protein, 68 aa, Homo sapiens
  MAP TO AL121572.4; EXPRESSED IN ADULT LIVER, SIGNAL = 1.1; EXPRESSED IN PLACENTA, SIGNAL = 3.3; EST_HUMAN HIT: AA368311.1, EVALUE 2.00e-25; SWISSPROT HIT: P31792, EVALUE 7.00e-03
IREGTQVCCPLLEEGINPEVWATEGQYGRAKNAHPIQVKLQDSASFPYQRQYSLRPEADQGLQKIVKD

SEQ ID NO: 46520 - protein, 92 aa, Homo sapiens
  MAP TO AC007878.2; EXPRESSED IN PLACENTA, SIGNAL = 1.6; EXPRESSED IN HELA, SIGNAL = 1.4; EXPRESSED IN BONE MARROW, SIGNAL = 0.93; EXPRESSED IN LUNG, SIGNAL = 1.1; EXPRESSED IN ADULT LIVER, SIGNAL = 1.4; EXPRESSED IN BT474, SIGNAL = 1.9; EXPRESSED IN HBL100, SIGNAL = 1.8; EST_HUMAN HIT: AI267694.1, EVALUE 2.00e-43; SWISSPROT HIT: P38321, EVALUE 4.10e-02
RKKALEDVVQRSGHGTEFNKQKHLEAADKGHSPAQKPKTSSGTKPSVKPTSATKSDSNLGGHSIRCKSKNLEDDTLSECKQVSDKAVSLQRK

SEQ ID NO: 46521 - protein, 41 aa, Homo sapiens
  MAP TO AC007878.2; EXPRESSED IN PLACENTA, SIGNAL = 1.6; EXPRESSED IN HELA, SIGNAL = 1.4; EXPRESSED IN BONE MARROW, SIGNAL = 0.93; EXPRESSED IN LUNG, SIGNAL = 1.1; EXPRESSED IN ADULT LIVER, SIGNAL = 1.4; EXPRESSED IN BT474, SIGNAL = 1.9; EXPRESSED IN HBL100, SIGNAL = 1.8; EST_HUMAN HIT: AI267694.1, EVALUE 2.00e-15; SWISSPROT HIT: P06801, EVALUE 3.60e+00
LINRSILKLLIRDIHQHKSLKLAVEQNHQLNLQALQRVIQI

SEQ ID NO: 46522 - protein, 56 aa, Homo sapiens
  MAP TO AF107885.2; EXPRESSED IN PLACENTA, SIGNAL =   1; EXPRESSED IN BT474, SIGNAL =   2; EXPRESSED IN ADULT LIVER, SIGNAL = 0.95; SWISSPROT HIT: P10600, EVALUE 2.00e-30; EST_HUMAN HIT: BE157967.1, EVALUE 3.00e-06
VDNEDDHGRGDLGRLKKQKDHHNPHLILMMIPPHRLDNPGQGGQRKKRALDTNYCF

SEQ ID NO: 46523 - protein, 26 aa, Homo sapiens
  MAP TO AF107885.2; EXPRESSED IN PLACENTA, SIGNAL =   1; EXPRESSED IN BT474, SIGNAL =   2; EXPRESSED IN ADULT LIVER, SIGNAL = 0.95
AWTMRMTMAVEIWGASRSRRITTTLI

SEQ ID NO: 46524 - protein, 25 aa, Homo sapiens
  MAP TO AF152365.1; EXPRESSED IN HELA, SIGNAL = 0.95; EXPRESSED IN ADULT LIVER, SIGNAL = 1.3; EXPRESSED IN FETAL LIVER, SIGNAL = 0.97; EST_HUMAN HIT: AI139912.1, EVALUE 1.90e+00
DKTPIQKMSSLYQKESHIFIIKDEK

SEQ ID NO: 46525 - protein, 24 aa, Homo sapiens
  MAP TO AF152365.1; EXPRESSED IN HELA, SIGNAL = 0.95; EXPRESSED IN ADULT LIVER, SIGNAL = 1.3; EXPRESSED IN FETAL LIVER, SIGNAL = 0.97; EST_HUMAN HIT: AI139912.1, EVALUE 3.70e-01
IKPQYRRCPLYTRRKVTFLSSRMK

SEQ ID NO: 46526 - protein, 26 aa, Homo sapiens
  MAP TO AL035542.7; EXPRESSED IN FETAL LIVER, SIGNAL = 1.7; EXPRESSED IN ADULT LIVER, SIGNAL = 0.94
RMSLCPVLGPHQMPRPLHPRRAASSS

SEQ ID NO: 46527 - protein, 43 aa, Homo sapiens
  MAP TO AC009682.2; EXPRESSED IN ADULT LIVER, SIGNAL = 1.2; EXPRESSED IN PLACENTA, SIGNAL = 1.2; EXPRESSED IN HBL100, SIGNAL =   1; EXPRESSED IN BONE MARROW, SIGNAL = 1.4; EST_HUMAN HIT: AL044307.1, EVALUE 2.00e-08; SWISSPROT HIT: Q06846, EVALUE 6.10e+00
  unsure 14
QKLRKRKESTQNNXGMIRTEITGAEIAEEMEKERRLFQLQMCE

SEQ ID NO: 46528 - protein, 52 aa, Homo sapiens
  MAP TO AC009753.3; EXPRESSED IN PLACENTA, SIGNAL = 1.2; EXPRESSED IN FETAL LIVER, SIGNAL = 1.1; EXPRESSED IN ADULT LIVER, SIGNAL = 1.5; EXPRESSED IN HELA, SIGNAL = 1.8; EST_HUMAN HIT: AA417177.1, EVALUE 2.00e-25; SWISSPROT HIT: O14975, EVALUE 2.00e-26
GNGLRGDVWRQFVKRFGDICIYEFYAATEGNIGFMNYARKVGAVGRVNYLQK

SEQ ID NO: 46529 - protein, 84 aa, Homo sapiens [sequence omitted]

SEQ ID NO: 46530 - protein, 83 aa, Homo sapiens
  MAP TO AL078634.17; EXPRESSED IN LUNG, SIGNAL = 1.2; EXPRESSED IN ADULT LIVER, SIGNAL =   1; EXPRESSED IN BT474, SIGNAL = 0.97; EXPRESSED IN PLACENTA, SIGNAL = 1.6; EST_HUMAN HIT: AW850810.1, EVALUE 3.00e-34; SWISSPROT HIT: P39720, EVALUE 5.40e+00
GMMKSRLFTGLTDMFFCIDSSECLTDDCSIIAGGSLTGWHPDSAAVLWRRVLGILGDVNNIQSPKIHARVFCYLYELWYKLAK

SEQ ID NO: 46531 - protein, 42 aa, Homo sapiens
  MAP TO AC010136.1; EXPRESSED IN BONE MARROW, SIGNAL = 2.3; EXPRESSED IN ADULT LIVER, SIGNAL =   1; EXPRESSED IN LUNG, SIGNAL = 0.96; EST_HUMAN HIT: BE140372.1, EVALUE 3.00e-09; SWISSPROT HIT: P98164, EVALUE 6.10e+00
QSAMRTWATIQQTGGCCYGSCPSPLASSCRCDHAVLLQIHPA

SEQ ID NO: 46532 - protein, 32 aa, Homo sapiens
  MAP TO AP000500.1; EXPRESSED IN FETAL LIVER, SIGNAL = 1.4; EXPRESSED IN ADULT LIVER, SIGNAL = 1.1; EST_HUMAN HIT: AU123748.1, EVALUE 6.00e-11
VAAFPGDVEVRALIEGQFMAKRIHAEGLGYRV

SEQ ID NO: 46533 - protein, 69 aa, Homo sapiens
  MAP TO AP000354.1; EXPRESSED IN PLACENTA, SIGNAL = 0.99; EXPRESSED IN HBL100, SIGNAL = 1.3; EXPRESSED IN HELA, SIGNAL = 1.3; EXPRESSED IN ADULT LIVER, SIGNAL = 1.1; EXPRESSED IN BT474, SIGNAL = 1.2; EST_HUMAN HIT: AW504383.1, EVALUE 9.00e-33; SWISSPROT HIT: P28741, EVALUE 1.00e-03
VEDEYRAFQEEAKKQIEDLNMTLEKLRSDLDEKETERSDMKETIFELEDEVEQHRAVKLHDNLIISDLE

SEQ ID NO: 46534 - protein, 32 aa, Homo sapiens; identical to SEQ ID NO: 46532
  MAP TO AB026899.1; EXPRESSED IN ADULT LIVER, SIGNAL = 0.91; EXPRESSED IN FETAL LIVER, SIGNAL = 1.1; EST_HUMAN HIT: AU123748.1, EVALUE 6.00e-11

SEQ ID NO: 46535 - protein, 50 aa, Homo sapiens
  MAP TO AL034343.17; EXPRESSED IN BT474, SIGNAL = 3.3; EXPRESSED IN FETAL LIVER, SIGNAL = 2.9; EXPRESSED IN HBL100, SIGNAL = 4.8; EXPRESSED IN HELA, SIGNAL = 6.8; EXPRESSED IN PLACENTA, SIGNAL = 1.1; EXPRESSED IN BONE MARROW, SIGNAL = 1.2; EXPRESSED IN ADULT LIVER, SIGNAL = 1.8; SWISSPROT HIT: P25205, EVALUE 1.00e-21; EST_HUMAN HIT: BE793828.1, EVALUE 2.00e-20
EKMVSAAFMKKYIHVAKIIKPVLTQESATYIAEEYSRLRSQDSMSSDTAR

SEQ ID NO: 46536 - protein, 28 aa, Homo sapiens
  MAP TO AL034343.17; EXPRESSED IN BT474, SIGNAL = 3.3; EXPRESSED IN FETAL LIVER, SIGNAL = 2.9; EXPRESSED IN HBL100, SIGNAL = 4.8; EXPRESSED IN HELA, SIGNAL = 6.8; EXPRESSED IN PLACENTA, SIGNAL = 1.1; EXPRESSED IN BONE MARROW, SIGNAL = 1.2; EXPRESSED IN ADULT LIVER, SIGNAL = 1.8; EST_HUMAN HIT: BE783280.1, EVALUE 7.00e-12
CGQNHQACPDTGVGHLHCRRVFTPAQPG

SEQ ID NO: 46537 - protein, 49 aa, Homo sapiens
  MAP TO AC011086.1; EXPRESSED IN BT474, SIGNAL = 3.8; EXPRESSED IN ADULT LIVER, SIGNAL =   1; EXPRESSED IN HELA, SIGNAL = 2.2; EXPRESSED IN LUNG, SIGNAL = 5.1; EXPRESSED IN BONE MARROW, SIGNAL = 1.3; SWISSPROT HIT: P28067, EVALUE 1.00e-24; EST_HUMAN HIT: BF678028.1, EVALUE 1.00e-23
NTRVPRLPEFADWAQEQGDAPAILFDKEFCEWMIQQIGPKLDGKIPVSR

SEQ ID NO: 46538 - protein, 17 aa, Homo sapiens
  MAP TO AC011086.1; EXPRESSED IN BT474, SIGNAL = 3.8; EXPRESSED IN ADULT LIVER, SIGNAL =   1; EXPRESSED IN HELA, SIGNAL = 2.2; EXPRESSED IN LUNG, SIGNAL = 5.1; EXPRESSED IN BONE MARROW, SIGNAL = 1.3; EST_HUMAN HIT: BE828697.1, EVALUE 2.00e-03
IPAHSVLPGWESQCGTL

SEQ ID NO: 46539 - protein, 48 aa, Homo sapiens
  MAP TO AL022156.1; EXPRESSED IN HBL100, SIGNAL = 1.1; EXPRESSED IN HELA, SIGNAL = 2.1; EXPRESSED IN ADULT LIVER, SIGNAL =   1; EXPRESSED IN BT474, SIGNAL = 1.8; SWISSPROT HIT: Q60989, EVALUE 6.00e-17; EST_HUMAN HIT: AI418337.1, EVALUE 1.00e-15
ISTEEQLRRLQEEKLCKICMDRNIAIVFVPCGHLVTCKQCAEAVDKCP

SEQ ID NO: 46540 - protein, 35 aa, Homo sapiens
  MAP TO AC008014.5; EXPRESSED IN FETAL LIVER, SIGNAL =   2; EXPRESSED IN ADULT LIVER, SIGNAL = 5.3; EXPRESSED IN HELA, SIGNAL = 2.6; EST_HUMAN HIT: AA680367.1, EVALUE 1.00e-14; SWISSPROT HIT: Q01958, EVALUE 4.80e+00
LDENQAKGSLHDSGVEYEAHSDDKCEPKYFVFNSR

SEQ ID NO: 46541 - protein, 79 aa, Homo sapiens
  MAP TO AL049698.2; EXPRESSED IN HBL100, SIGNAL = 1.1; EXPRESSED IN HELA, SIGNAL =   2; EXPRESSED IN PLACENTA, SIGNAL = 1.5; EXPRESSED IN LUNG, SIGNAL = 1.6; EXPRESSED IN ADULT LIVER, SIGNAL = 1.4; EXPRESSED IN BT474, SIGNAL = 1.9; SWISSPROT HIT: P55196, EVALUE 7.00e-33; EST_HUMAN HIT: AU130212.1, EVALUE 6.00e-32
RRGSGKPRPKSEGFELYNNSTQNGSPESPQLPWAEYSEPKKLPGDDRLMKNRADHRSSPNVASKSDTFLLPKYTCDHSL

SEQ ID NO: 46542 - protein, 81 aa, Homo sapiens
  MAP TO AC007690.11; EXPRESSED IN BONE MARROW, SIGNAL = 0.94; EXPRESSED IN ADULT LIVER, SIGNAL =   2; SWISSPROT HIT: Q12772, EVALUE 1.50e+00; EST_HUMAN HIT: AV697661.1, EVALUE 4.10e-01
VLQLTHDPLKQVCRKFLELKYHLQQMRNPPLFAQRLVREEAPVSQYAVPIFSQETTPNHLHSIYPLPRPQSMKSTKLCHHV

SEQ ID NO: 46543 - protein, 61 aa, Homo sapiens
  MAP TO AC010149.1; EXPRESSED IN ADULT LIVER, SIGNAL = 0.99; EXPRESSED IN BT474, SIGNAL = 0.98; EXPRESSED IN FETAL LIVER, SIGNAL = 1.5; EST_HUMAN HIT: AV690438.1, EVALUE 2.00e+00; SWISSPROT HIT: P31635, EVALUE 7.60e+00
QPTAVPSVRVSLKNTQYSSHPQGLHQTMGIVLLHYSPAGSQLSPLAPLTPLAMTFTFTLLR

SEQ ID NO: 46544 - protein, 31 aa, Homo sapiens
  MAP TO AC009813.2; EXPRESSED IN ADULT LIVER, SIGNAL = 1.4; EXPRESSED IN BT474, SIGNAL = 2.2; EXPRESSED IN FETAL LIVER, SIGNAL = 4.9; EXPRESSED IN LUNG, SIGNAL =   1; EST_HUMAN HIT: BE243399.1, EVALUE 6.00e-03; SWISSPROT HIT: P19712, EVALUE 4.80e+00
CLQCALWREHCQPGTIWTMMGSQVSECSWCT

SEQ ID NO: 46545 - protein, 110 aa, Homo sapiens
  MAP TO AL080249.11; EXPRESSED IN LUNG, SIGNAL = 1.6; EXPRESSED IN ADULT LIVER, SIGNAL = 0.99; EXPRESSED IN FETAL LIVER, SIGNAL = 1.1; EST_HUMAN HIT: AA446020.1, EVALUE 9.20e-02
LQAQSVVSSITLTRELVKMQRLSPKRNMMDQDLHLNKIPGGLACTSLFLKSCPSPQPSSAFGGNMRNREGWSLFQVPQPIRSRALTKNLYRLWKRIQSSLREAGVCTKDE

SEQ ID NO: 46546 - protein, 35 aa, Homo sapiens
  MAP TO AB020873.1; EXPRESSED IN ADULT LIVER, SIGNAL = 1.1; EXPRESSED IN PLACENTA, SIGNAL = 0.98
NVSAQQMIGVFNNTTLSNFIGAAIETICSDVDNFL

SEQ ID NO: 46547 - protein, 34 aa, Homo sapiens
  MAP TO AC011297.1; EXPRESSED IN ADULT LIVER, SIGNAL = 1.5; EXPRESSED IN BT474, SIGNAL = 1.3; EXPRESSED IN HELA, SIGNAL = 1.3; EST_HUMAN HIT: BE465971.1, EVALUE 2.90e-01; SWISSPROT HIT: P34099, EVALUE 4.80e+00
AVQMPVTLQPQMPIQTQYPQYQLVENKTQPPAAY

SEQ ID NO: 46548 - protein, 34 aa, Homo sapiens
  MAP TO AL096700.6; EXPRESSED IN HBL100, SIGNAL = 1.1; EXPRESSED IN HELA, SIGNAL = 3.1; EXPRESSED IN BONE MARROW, SIGNAL = 1.1; EXPRESSED IN BT474, SIGNAL = 1.4; EXPRESSED IN ADULT LIVER, SIGNAL = 1.1; EST_HUMAN HIT: BE778349.1, EVALUE 2.00e-13
EPTDHRDFTSPFRTQQGPEQGCLPGNRGLEAESK

SEQ ID NO: 46549 - protein, 64 aa, Homo sapiens
  MAP TO AL078461.8; EXPRESSED IN ADULT LIVER, SIGNAL = 1.1; EXPRESSED IN BT474, SIGNAL = 1.3; EXPRESSED IN HBL100, SIGNAL = 1.3; EXPRESSED IN HELA, SIGNAL = 2.6; EXPRESSED IN LUNG, SIGNAL = 2.9; EXPRESSED IN BONE MARROW, SIGNAL = 1.1; SWISSPROT HIT: Q61687, EVALUE 3.40e-02; EST_HUMAN HIT: AF114027.1, EVALUE 1.00e-30
GKVSEKSLPKNEKEDKENISENDREYSGDAQVDKKPENDIVKSPQENLREPKRKRGRPPSIAPT

SEQ ID NO: 46550 - protein, 56 aa, Homo sapiens
  MAP TO AC006020.2; EXPRESSED IN LUNG, SIGNAL = 4.6; EXPRESSED IN ADULT LIVER, SIGNAL = 1.5; EST_HUMAN HIT: AV651356.1, EVALUE 1.00e-24; SWISSPROT HIT: P38999, EVALUE 1.00e-05
VVNVAGGISFLDAVTSMDFFPGLNLEGYPNRDSTKYAEIYGISSAHTLLRGTLRYK

SEQ ID NO: 46551 - protein, 19 aa, Homo sapiens
  MAP TO AL109658.1; EXPRESSED IN HELA, SIGNAL = 1.4; EXPRESSED IN PLACENTA, SIGNAL = 3.1; EXPRESSED IN LUNG, SIGNAL = 8.7; EXPRESSED IN ADULT LIVER, SIGNAL =   1
HSSCDYSSQAYSRWPDLFY

SEQ ID NO: 46552 - protein, 48 aa, Homo sapiens
  MAP TO AC006946.18; EXPRESSED IN BONE MARROW, SIGNAL = 1.4; EXPRESSED IN ADULT LIVER, SIGNAL = 0.91; EXPRESSED IN HBL100, SIGNAL =   1; EXPRESSED IN LUNG, SIGNAL =  14; EST_HUMAN HIT: BF127966.1, EVALUE 8.00e-24
TCLDDSWIHPRNLTPSSPKDLQIQLHFAHTQQGDLFPVAHIEWTLQTD

SEQ ID NO: 46553 - protein, 50 aa, Homo sapiens
  MAP TO AB020866.1; EXPRESSED IN HELA, SIGNAL = 1.1; EXPRESSED IN FETAL LIVER, SIGNAL =  14; EXPRESSED IN ADULT LIVER, SIGNAL =  18; SWISSPROT HIT: P12799, EVALUE 1.00e-09; EST_HUMAN HIT: AA677287.1, EVALUE 5.00e-27
CHSANLNGVYYSGPYTAKTDNGIVWYTWHGWWYSLKSVVMKIRPNDFIPN

SEQ ID NO: 46554 - protein, 91 aa, Homo sapiens; identical to SEQ ID NO: 34415
  MAP TO AC007098.2; EXPRESSED IN LUNG, SIGNAL = 1.4; EXPRESSED IN ADULT LIVER, SIGNAL = 1.3; EXPRESSED IN BT474, SIGNAL = 1.2; EXPRESSED IN HELA, SIGNAL = 0.91; EXPRESSED IN HBL100, SIGNAL = 1.1; EST_HUMAN HIT: AW969958.1, EVALUE 5.00e-34; SWISSPROT HIT: Q9Z714, EVALUE 5.80e-01

SEQ ID NO: 46555 - protein, 21 aa, Homo sapiens
  MAP TO AC009973.2; EXPRESSED IN ADULT LIVER, SIGNAL = 1.1; EXPRESSED IN BT474, SIGNAL = 1.9; EXPRESSED IN PLACENTA, SIGNAL = 1.1; EXPRESSED IN HBL100, SIGNAL = 1.9; EXPRESSED IN HELA, SIGNAL = 1.2; EXPRESSED IN BONE MARROW, SIGNAL =   1; EST_HUMAN HIT: AL121516.1, EVALUE 8.00e-07
QGGHCDVHRGTLPGPNHKTTQ

SEQ ID NO: 46556 - protein, 25 aa, Homo sapiens
  MAP TO AC010966.1; EXPRESSED IN ADULT LIVER, SIGNAL = 1.5; EST_HUMAN HIT: AU119687.1, EVALUE 6.00e-05
ELDYYDCCFNSAVHFGNHVCLAFGD

SEQ ID NO: 46557 - protein, 86 aa, Homo sapiens
  MAP TO AC011356.1; EXPRESSED IN PLACENTA, SIGNAL =   1; EXPRESSED IN HBL100, SIGNAL = 1.2; EXPRESSED IN HELA, SIGNAL = 1.3; EXPRESSED IN BONE MARROW, SIGNAL = 0.92; EXPRESSED IN LUNG, SIGNAL = 5.2; EXPRESSED IN ADULT LIVER, SIGNAL = 0.92; EXPRESSED IN BT474, SIGNAL = 1.2; EST_HUMAN HIT: AW503898.1, EVALUE 5.00e-36; SWISSPROT HIT: P53617, EVALUE 1.80e+00
HRERSKFKSERNDLESSYVPVSAPPPNSSEQYSSGAQSIPSTVTVIAPAHHSENTTESWSNYYNNHSSSNSFGRNLPPKRRCRDYD

SEQ ID NO: 46558 - protein, 147 aa, Homo sapiens
  MAP TO AL049870.1; EXPRESSED IN ADULT LIVER, SIGNAL = 0.92; EXPRESSED IN PLACENTA, SIGNAL = 1.1; EXPRESSED IN LUNG, SIGNAL = 6.6; EST_HUMAN HIT: N44974.1, EVALUE 3.00e-55; SWISSPROT HIT: Q04652, EVALUE 1.00e-21
VEMYFPQNDSWIGLAPLNIPRYEFGICVLDQKVYVIGGIATNVRPGVTIRKHENSVECWNPDTNTWTSLERMNESRSTLGVVVLAGELYALGGYDGQSYLQSVEKYIPKIRKWQPVAPMTTTRSCFAAAVLDGMIYAIGGYGPAHMN

SEQ ID NO: 46559 - protein, 26 aa, Homo sapiens
  MAP TO AC005674.9; EXPRESSED IN PLACENTA, SIGNAL = 0.71; EXPRESSED IN BT474, SIGNAL = 0.74; EXPRESSED IN LUNG, SIGNAL = 0.77; EXPRESSED IN HELA, SIGNAL = 0.77; EXPRESSED IN ADULT LIVER, SIGNAL = 0.76; EXPRESSED IN HBL100, SIGNAL = 0.89
TWSPPSPLSSSWSKPLSSPAGWTSAC

SEQ ID NO: 46560 - protein, 171 aa, Homo sapiens
  MAP TO AC007556.2; EXPRESSED IN ADULT LIVER, SIGNAL = 0.8; EXPRESSED IN BONE MARROW, SIGNAL = 0.63; EXPRESSED IN HELA, SIGNAL = 1.4; EXPRESSED IN PLACENTA, SIGNAL = 0.77; EXPRESSED IN BT474, SIGNAL = 0.82; EXPRESSED IN HBL100, SIGNAL = 0.85; EXPRESSED IN LUNG, SIGNAL = 0.63; EXPRESSED IN FETAL LIVER, SIGNAL = 0.71; EST_HUMAN HIT: BE543079.1, EVALUE 1.00e-28; SWISSPROT HIT: P98164, EVALUE 1.00e-103
INECHDPSISGCDHNCTDTLTSFYCSCRPGYKLMSDKRTCVDIDECTEMPFVCSQKCENVIGSYICKCAPGYLREPDGKTCRQNSNIEPYLIFSNRYYLRNLTIDGYFYSLILEGLDNVVALDFDRVEKRLYWIDTQRQVIERMFLNKTNKETIINHRLPAAESLAVDWVS

SEQ ID NO: 46561 - protein, 19 aa, Homo sapiens
  MAP TO AC007556.2; EXPRESSED IN ADULT LIVER, SIGNAL = 0.8; EXPRESSED IN BONE MARROW, SIGNAL = 0.63; EXPRESSED IN HELA, SIGNAL = 1.4; EXPRESSED IN PLACENTA, SIGNAL = 0.77; EXPRESSED IN BT474, SIGNAL = 0.82; EXPRESSED IN HBL100, SIGNAL = 0.85; EXPRESSED IN LUNG, SIGNAL = 0.63; EXPRESSED IN FETAL LIVER, SIGNAL = 0.71
LMNAMTLQSVAAITTAQTP

SEQ ID NO: 46562 - protein, 80 aa, Homo sapiens
  MAP TO AL050309.4; EXPRESSED IN PLACENTA, SIGNAL = 0.64; EXPRESSED IN BT474, SIGNAL = 1.3; EXPRESSED IN ADULT LIVER, SIGNAL = 0.74; EST_HUMAN HIT: BE541391.1, EVALUE 1.00e-39; SWISSPROT HIT: Q02446, EVALUE 3.20e-01
PTVLTPGSVLTSSQSTGSQQILHVIHTIPSVSLPNKMGGLKTIPVVVQSLPMVYTTLPADGGPAAITVPLIGGDGKNAGS

SEQ ID NO: 46563 - protein, 51 aa, Homo sapiens
  MAP TO AL078471.2; EXPRESSED IN BT474, SIGNAL = 0.7; EXPRESSED IN ADULT LIVER, SIGNAL = 0.68; EXPRESSED IN BONE MARROW, SIGNAL = 0.76; EXPRESSED IN LUNG, SIGNAL = 0.71; EXPRESSED IN HELA, SIGNAL = 0.79; EST_HUMAN HIT: AA837753.1, EVALUE 9.00e-13
VVWIKDQTGHSIPLSQSVIQDKALTLFDSVKPGRGKEATEEKLDAKRFVHE

SEQ ID NO: 46564 - protein, 277 aa, Homo sapiens
  MAP TO AC004614.1; EXPRESSED IN ADULT LIVER, SIGNAL =   1; EXPRESSED IN PLACENTA, SIGNAL = 1.9; SWISSPROT HIT: P35446, EVALUE 3.00e-12; EST_HUMAN HIT: AW612526.1, EVALUE 6.00e-65
PWGRCMGDECGPGGIQTRAVWCAHVEGWTTLHTNCKQAERPNNQQNCFKVCDWHKELYDWRLGPWNQCQPVISKSLEKPLECIKGEEGIQVREIACIQKDKDIPAEDIICEYFEPKPLLEQACLIPCQQDCIVSEFSAWSECSKTCGSGLQHRTRHVVAPPQFGGSGCPNLTEFQVCQSSPCEAEELRYSLHVGPWSTCSMPHSRQVRQARRRGKNKEREKDRSKGVKDPEARELIKKKRNRNRQNRQENKYWDIQIGYQTREVMCINKTGKAADLR

SEQ ID NO: 46565 - protein, 82 aa, Homo sapiens
  MAP TO AP000117.1; EXPRESSED IN LUNG, SIGNAL = 0.7; EXPRESSED IN HELA, SIGNAL = 2.4; EXPRESSED IN PLACENTA, SIGNAL = 1.2; EXPRESSED IN BT474, SIGNAL = 0.76; EXPRESSED IN HBL100, SIGNAL = 1.3; EXPRESSED IN FETAL LIVER, SIGNAL = 1.5; EXPRESSED IN ADULT LIVER, SIGNAL =   1; EXPRESSED IN BONE MARROW, SIGNAL = 0.95; SWISSPROT HIT: Q15811, EVALUE 9.00e-45; EST_HUMAN HIT: AA773823.1, EVALUE 2.00e-37
VDESQTGEPGWLGGELKGKTGWFPANYAEKIPENEVPAPVKPVTDSTSAPAPKLALRETPAPLAVTSSEPSTTPNNWADFSS

SEQ ID NO: 46566 - protein, 17 aa, Homo sapiens
  MAP TO AP000117.1; EXPRESSED IN LUNG, SIGNAL = 0.7; EXPRESSED IN HELA, SIGNAL = 2.4; EXPRESSED IN PLACENTA, SIGNAL = 1.2; EXPRESSED IN BT474, SIGNAL = 0.76; EXPRESSED IN HBL100, SIGNAL = 1.3; EXPRESSED IN FETAL LIVER, SIGNAL = 1.5; EXPRESSED IN ADULT LIVER, SIGNAL =   1; EXPRESSED IN BONE MARROW, SIGNAL = 0.95; EST_HUMAN HIT: AA773823.1, EVALUE 2.00e-03
RKDRVVPCKLCRENPRK

SEQ ID NO: 46567 - protein, 25 aa, Homo sapiens
  MAP TO AF165424.1; EXPRESSED IN ADULT LIVER, SIGNAL =  12
SQDKPDILEKKKLKNYPIQLEEYEK

SEQ ID NO: 46568 - protein, 48 aa, Homo sapiens
  MAP TO AP000037.1; EXPRESSED IN PLACENTA, SIGNAL = 0.67; EXPRESSED IN FETAL LIVER, SIGNAL = 0.77; EXPRESSED IN ADULT LIVER, SIGNAL = 1.2; EXPRESSED IN LUNG, SIGNAL = 0.64; SWISSPROT HIT: Q02861, EVALUE 4.60e+00; EST_HUMAN HIT: T18865.1, EVALUE 2.00e-22
MLAGQLEARDPKEGTHPEDPCPGAGAVMEKTAVAAEVLTEDCNTGEMP

SEQ ID NO: 46569 - protein, 39 aa, Homo sapiens
  MAP TO AP000037.1; EXPRESSED IN PLACENTA, SIGNAL = 0.67; EXPRESSED IN FETAL LIVER, SIGNAL = 0.77; EXPRESSED IN ADULT LIVER, SIGNAL = 1.2; EXPRESSED IN LUNG, SIGNAL = 0.64; EST_HUMAN HIT: T18865.1, EVALUE 5.00e-04
DAGRSTRGQGPQRGHPPRGPVPRSWGCHGEDSCGSRGSH

SEQ ID NO: 46570 - protein, 116 aa, Homo sapiens
  MAP TO AC007952.1; EXPRESSED IN BONE MARROW, SIGNAL =   1; EXPRESSED IN ADULT LIVER, SIGNAL = 0.73; EXPRESSED IN LUNG, SIGNAL = 0.76; SWISSPROT HIT: P18139, EVALUE 1.60e+00; EST_HUMAN HIT: BF510408.1, EVALUE 2.00e-16
  unsure 9
  unsure 15
  unsure 18
  unsure 82
  unsure 107
GSRFAGLAXFLGTEXAVXAVRGICPSWGFGIPMREMGGPEDSELPAFLSRMAVSGEVGIKEYVDTHEEDGIEATDTGPEGVXSGVFGHHLEGVAEGEGQMKDTRLHXGALASRPGS

SEQ ID NO: 46571 - protein, 18 aa, Homo sapiens
  MAP TO AC007952.1; EXPRESSED IN BONE MARROW, SIGNAL =   1; EXPRESSED IN ADULT LIVER, SIGNAL = 0.73; EXPRESSED IN LUNG, SIGNAL = 0.76; EST_HUMAN HIT: BF510408.1, EVALUE 2.80e+00
  unsure 2
  unsure 5
RXCCXSCEGNLPLLGLRD

SEQ ID NO: 46572 - protein, 84 aa, Homo sapiens
  MAP TO AL034345.3; EXPRESSED IN FETAL LIVER, SIGNAL = 1.2; EXPRESSED IN PLACENTA, SIGNAL = 0.94; EXPRESSED IN BT474, SIGNAL =   1; EXPRESSED IN ADULT LIVER, SIGNAL = 1.4; EXPRESSED IN LUNG, SIGNAL = 1.1; EXPRESSED IN BONE MARROW, SIGNAL = 1.3; EXPRESSED IN HELA, SIGNAL = 0.97; EXPRESSED IN HBL100, SIGNAL = 0.93; EST_HUMAN HIT: BF351696.1, EVALUE 2.00e-10; SWISSPROT HIT: Q39575, EVALUE 1.00e-18
SLVDDESLIGVLRTTKQTAAEVSEKLHVAAETEIKINAAQEEFRPAATRGSILYFLITEMSMVNIMYQTSLAQFLKLFDQSMAR

SEQ ID NO: 46573 - protein, 59 aa, Homo sapiens
  MAP TO AL132708.1; EXPRESSED IN FETAL LIVER, SIGNAL =  38; EXPRESSED IN BONE MARROW, SIGNAL = 2.2; EXPRESSED IN LUNG, SIGNAL = 6.7; EXPRESSED IN ADULT LIVER, SIGNAL =  15; SWISSPROT HIT: P01009, EVALUE 2.00e-30; EST_HUMAN HIT: AV648295.1, EVALUE 3.00e-29
KWERPFEVKDTEEEDFHVDQVTTVKVPMMKRLGMFNIQHCKKLSSWVLLMKYLGNATAI

SEQ ID NO: 46574 - protein, 40 aa, Homo sapiens
  MAP TO AL109805.3; EXPRESSED IN HELA, SIGNAL = 1.1; EXPRESSED IN PLACENTA, SIGNAL = 0.9; EXPRESSED IN HBL100, SIGNAL = 1.4; EXPRESSED IN ADULT LIVER, SIGNAL = 0.99; EXPRESSED IN BT474, SIGNAL =   1; EST_HUMAN HIT: AU130129.1, EVALUE 8.00e-14; SWISSPROT HIT: P54746, EVALUE 6.20e+00
VMAKEMLTKKSTLNSDHRTQAMQDRYMEVSGNLRDLYDDK

SEQ ID NO: 46575 - protein, 64 aa, Homo sapiens
  MAP TO AC004961.2; EXPRESSED IN HBL100, SIGNAL = 0.8; EXPRESSED IN FETAL LIVER, SIGNAL = 0.68; EXPRESSED IN ADULT LIVER, SIGNAL = 0.65; EXPRESSED IN BONE MARROW, SIGNAL =   1; EXPRESSED IN PLACENTA, SIGNAL = 0.64; EXPRESSED IN LUNG, SIGNAL = 0.71; EXPRESSED IN HELA, SIGNAL = 0.7; EST_HUMAN HIT: BE814096.1, EVALUE 5.00e-24; SWISSPROT HIT: P90747, EVALUE 5.70e+00
LCSESASTFHSHCLNFNAMTYGATQARRLSTASSVTKPPHFILTTDWIWYWSDEFGSWQEYGRQ

SEQ ID NO: 46576 - protein, 95 aa, Homo sapiens
  MAP TO AC010680.3; EXPRESSED IN FETAL LIVER, SIGNAL =   1; EXPRESSED IN ADULT LIVER, SIGNAL = 1.2; EST_HUMAN HIT: F00205.1, EVALUE 5.00e-12; SWISSPROT HIT: P11799, EVALUE 1.00e-10
HEVPPFFDLKPVSVDLALGESGTFKCHVTGTAPIKITWAKDNREIRPGGNYKMTLVENTATLTVLKVGKGDAGQYTCYASNIAGKDSCSAQLGVQ

SEQ ID NO: 46577 - protein, 35 aa, Homo sapiens
  MAP TO AC006160.9; EXPRESSED IN BONE MARROW, SIGNAL = 1.5; EXPRESSED IN PLACENTA, SIGNAL = 0.79; EXPRESSED IN HBL100, SIGNAL = 0.92; EXPRESSED IN FETAL LIVER, SIGNAL = 0.65; EXPRESSED IN LUNG, SIGNAL = 0.85; EXPRESSED IN ADULT LIVER, SIGNAL = 0.79; SWISSPROT HIT: P00727, EVALUE 1.00e-13; EST_HUMAN HIT: AW401572.1, EVALUE 2.00e-13
DFPSVVLVGLGKKAAGIDEQENWHEGKENIRAAVA

SEQ ID NO: 46578 - protein, 99 aa, Homo sapiens
  MAP TO AC011895.2; EXPRESSED IN BT474, SIGNAL =   1; EXPRESSED IN LUNG, SIGNAL = 1.1; EXPRESSED IN BONE MARROW, SIGNAL = 0.94; EXPRESSED IN PLACENTA, SIGNAL = 0.99; EXPRESSED IN HBL100, SIGNAL = 0.95; EXPRESSED IN HELA, SIGNAL =   1; EXPRESSED IN ADULT LIVER, SIGNAL = 1.3; EST_HUMAN HIT: AU133926.1, EVALUE 4.00e-41; SWISSPROT HIT: P24784, EVALUE 1.20e-01
KKEERVTLGINGAGLDPRVNILVRGEVYKRSPEPVFQNFYDKLKVPVPEIPGKTRNLFLQLAERAAQSLNVTSCYICGGAVIGDQWPWEARELVPTYPV

SEQ ID NO: 46579 - protein, 46 aa, Homo sapiens
  MAP TO AL049835.3; EXPRESSED IN FETAL LIVER, SIGNAL = 0.61; EXPRESSED IN LUNG, SIGNAL = 0.59; EXPRESSED IN HELA, SIGNAL = 0.62; EXPRESSED IN ADULT LIVER, SIGNAL = 0.74; SWISSPROT HIT: Q03555, EVALUE 5.00e-20; EST_HUMAN HIT: AW961014.1, EVALUE 7.00e-19
GHSAVDITKVARRHRMSPFPLTSMDKAFITVLEMTPVLGTEIINYR

SEQ ID NO: 46580 - protein, 17 aa, Homo sapiens
  MAP TO AF095725.1; EXPRESSED IN ADULT LIVER, SIGNAL = 1.4
MGVQSNEDNDEEVPQEG

SEQ ID NO: 46581 - protein, 184 aa, Homo sapiens
  MAP TO AF095725.1; EXPRESSED IN ADULT LIVER, SIGNAL = 1.4; EST_HUMAN HIT: BE543056.1, EVALUE 9.00e-32; SWISSPROT HIT: P47887, EVALUE 1.00e-106
LLIIVLIRLDSHLHTPVYLFLSNLSFSDLCFSSVTMPKLLQNMQNQDPSIPYADCLTQMYFFLYFSDLESFLLVAMAYDRYVAICFPMHYTAICFLLHYTAIMSPMLCLSVVALSWVLTTFHAMLHTLLMARLCFCADNVIPHFFCDMSALLKLACSDTRVNEWVIFIMGGLILVIPFLLILGS

SEQ ID NO: 46582 - protein, 75 aa, Homo sapiens
  MAP TO AP000496.1; EXPRESSED IN ADULT LIVER, SIGNAL =   1; SWISSPROT HIT: P13008, EVALUE 4.10e+00; EST_HUMAN HIT: BE729137.1, EVALUE 7.80e+00
VNSCDLLCTMATFLKVFLGPPGVLVGIAFLHVVESYVEVAALGDAALWVPEPFEAMKTKLHFCKACHMLRTKMIE

SEQ ID NO: 46583 - protein, 93 aa, Homo sapiens
  MAP TO AC012668.1; EXPRESSED IN ADULT LIVER, SIGNAL =   2; EXPRESSED IN FETAL LIVER, SIGNAL = 1.4; EXPRESSED IN LUNG, SIGNAL = 2.7; EXPRESSED IN PLACENTA, SIGNAL = 9.9; EST_HUMAN HIT: AW953646.1, EVALUE 1.00e-38; SWISSPROT HIT: O51940, EVALUE 5.20e-01
ATLDLMYVCASFVTQIDATIRTQGHPIELETPGARRIIEETCSSASAQATAEESGSVRGTPLCRPHRAVRHRTSRGGKWGSRSRNISANPSFL

SEQ ID NO: 46584 - protein, 66 aa, Homo sapiens
  MAP TO AL049868.10; EXPRESSED IN ADULT LIVER, SIGNAL = 1.1; EXPRESSED IN HELA, SIGNAL = 1.7; EXPRESSED IN HBL100, SIGNAL = 1.3; EST_HUMAN HIT: BF347753.1, EVALUE 7.00e-29; SWISSPROT HIT: Q29467, EVALUE 4.30e+00
ITTQASMEFRRKGSQMSTDTMVSNPMFDASEFPDNYEAGRAEACGTLCRIFCSKKTGEEILPAYLS

SEQ ID NO: 46585 - protein, 44 aa, Homo sapiens
  MAP TO AL049868.10; EXPRESSED IN ADULT LIVER, SIGNAL = 1.1; EXPRESSED IN HELA, SIGNAL = 1.7; EXPRESSED IN HBL100, SIGNAL = 1.3; EST_HUMAN HIT: BF347753.1, EVALUE 1.00e-17; SWISSPROT HIT: Q00189, EVALUE 1.40e-01
GHKCPQTPWFPILCLMQVNFLITMKQEELRLVGHCVGFFVARRL

SEQ ID NO: 46586 - protein, 64 aa, Homo sapiens
  MAP TO AL031667.17; EXPRESSED IN LUNG, SIGNAL = 2.3; EXPRESSED IN ADULT LIVER, SIGNAL =   1; EXPRESSED IN HELA, SIGNAL =   1; SWISSPROT HIT: P53800, EVALUE 8.60e-01; EST_HUMAN HIT: AA771973.1, EVALUE 2.20e+00
NMLRKENTSEVPEVWQVEFTCCYFFLPHPNTPTIDIQKTKVDQDLEEIREVPKCRSHLKPELKA

SEQ ID NO: 46587 - protein, 42 aa, Homo sapiens
  MAP TO AL078590.5; EXPRESSED IN ADULT LIVER, SIGNAL = 0.98
MKTQNKNFVANLSDFKCCLRSPVYETMVLIRKTQGCRKDPAF

SEQ ID NO: 46588 - protein, 26 aa, Homo sapiens
  MAP TO AC006559.6; EXPRESSED IN BT474, SIGNAL = 1.1; EXPRESSED IN HBL100, SIGNAL = 0.98; EXPRESSED IN HELA, SIGNAL = 0.63; EXPRESSED IN ADULT LIVER, SIGNAL = 0.66; EXPRESSED IN FETAL LIVER, SIGNAL = 0.61; EXPRESSED IN LUNG, SIGNAL = 0.85; EXPRESSED IN PLACENTA, SIGNAL = 1.2; SWISSPROT HIT: P25625, EVALUE 4.90e+00
LHRQWSYNYNMGTKIFHYFIQYSPAG

SEQ ID NO: 46589 - protein, 70 aa, Homo sapiens
  MAP TO AC007750.2; EXPRESSED IN ADULT LIVER, SIGNAL = 0.89; EXPRESSED IN BONE MARROW, SIGNAL = 8.8; EXPRESSED IN FETAL LIVER, SIGNAL = 0.85; EXPRESSED IN LUNG, SIGNAL = 0.91; EXPRESSED IN HELA, SIGNAL = 0.61; EXPRESSED IN PLACENTA, SIGNAL = 0.86; EXPRESSED IN BT474, SIGNAL = 1.2; EST_HUMAN HIT: AA421101.1, EVALUE 3.50e+00; SWISSPROT HIT: O26929, EVALUE 3.40e+00
VKSPCMDFQPVLFFQPHLPFLPSVVNAISNMELFHASARQNDSFLGMVQAAAISILLYPLMILLQSLHCH

SEQ ID NO: 46590 - protein, 27 aa, Homo sapiens
  MAP TO AJ006997.1; EXPRESSED IN HBL100, SIGNAL = 0.68; EXPRESSED IN ADULT LIVER, SIGNAL = 0.71; EXPRESSED IN BT474, SIGNAL = 0.62; EXPRESSED IN BONE MARROW, SIGNAL = 0.76; EXPRESSED IN FETAL LIVER, SIGNAL = 0.64; EXPRESSED IN LUNG, SIGNAL = 1.1; EXPRESSED IN PLACENTA, SIGNAL = 0.81
FMTVVNITGDPLKCDKKKIIALTVGWL

SEQ ID NO: 46591 - protein, 65 aa, Homo sapiens
  MAP TO AC009306.1; EXPRESSED IN PLACENTA, SIGNAL = 0.81; EXPRESSED IN BT474, SIGNAL = 0.61; EXPRESSED IN BONE MARROW, SIGNAL = 0.82; EXPRESSED IN FETAL LIVER, SIGNAL = 1.1; EXPRESSED IN LUNG, SIGNAL = 0.9; EXPRESSED IN HELA, SIGNAL = 0.67; EXPRESSED IN ADULT LIVER, SIGNAL = 0.78; SWISSPROT HIT: P39102, EVALUE 8.70e+00; EST_HUMAN HIT: BE747846.1, EVALUE 3.30e+00
LCTCLTSRGLRSSLLLLLQLAVLCIPSSSLRTVSPVHCCHCHATWRPKRHILVSHSHSQCNCMTP

SEQ ID NO: 46592 - protein, 68 aa, Homo sapiens
  MAP TO AC007716.1; EXPRESSED IN HBL100, SIGNAL = 0.68; EXPRESSED IN ADULT LIVER, SIGNAL = 0.99; EXPRESSED IN BONE MARROW, SIGNAL = 0.82; EXPRESSED IN LUNG, SIGNAL =   1; EXPRESSED IN HELA, SIGNAL = 0.8; EXPRESSED IN PLACENTA, SIGNAL = 0.77; EXPRESSED IN BT474, SIGNAL = 0.63; EXPRESSED IN FETAL LIVER, SIGNAL = 0.71; SWISSPROT HIT: O15027, EVALUE 5.00e-01; EST_HUMAN HIT: BE770295.1, EVALUE 5.60e+00
  unsure 7
  unsure 22
RNSPEEXSLVAGNPENVIRTHXVQTKWHANNIAGSIITDAYIPTVASFNIIWHEKEARKIMLNEKNHT

SEQ ID NO: 46593 - protein, 26 aa, Homo sapiens
  MAP TO AC007132.2; EXPRESSED IN ADULT LIVER, SIGNAL = 0.73; EST_HUMAN HIT: AI242139.1, EVALUE 2.10e-01
LVQKSLQSLPLKVMAKTTMTFAAVLP

SEQ ID NO: 46594 - protein, 33 aa, Homo sapiens
  MAP TO AC007681.2; EXPRESSED IN ADULT LIVER, SIGNAL = 0.82; SWISSPROT HIT: P40179, EVALUE 2.80e+00
SLSQPLSHPSDFILLEEDHPALWHLSAETPHLQ

SEQ ID NO: 46595 - protein, 81 aa, Homo sapiens
  MAP TO AC007041.3; EXPRESSED IN ADULT LIVER, SIGNAL = 0.8; EXPRESSED IN HELA, SIGNAL = 0.62; EXPRESSED IN PLACENTA, SIGNAL = 2.3; EXPRESSED IN LUNG, SIGNAL = 0.69; EST_HUMAN HIT: BF203313.1, EVALUE 1.60e+00; SWISSPROT HIT: Q03519, EVALUE 5.30e+00
MTSLPYPALKFSVGRSQPWQKDLNIAFYIMLKRGRHANQKQMLKCGEGLIWWVRGGLFGTLVQPPWGLLCAKLCKISTCIL

SEQ ID NO: 46596 - protein, 75 aa, Homo sapiens
  MAP TO AL035669.28; EXPRESSED IN BONE MARROW, SIGNAL = 0.93; EXPRESSED IN LUNG, SIGNAL = 0.95; EXPRESSED IN HELA, SIGNAL =   1; EXPRESSED IN PLACENTA, SIGNAL = 0.93; EXPRESSED IN FETAL LIVER, SIGNAL = 0.98; EXPRESSED IN ADULT LIVER, SIGNAL =   1
PLLSVSLPPPARAPPPPSMDDPDCDSTWEEDEEDAEDAEDEDCEDGEAAGARDADAGDEDEESEEPRAARPSSFQ

SEQ ID NO: 46597 - protein, 192 aa, Homo sapiens
  MAP TO AC002080.1; EXPRESSED IN FETAL LIVER, SIGNAL =   1; EXPRESSED IN ADULT LIVER, SIGNAL = 1.2; EXPRESSED IN LUNG, SIGNAL = 1.6; EXPRESSED IN PLACENTA, SIGNAL = 1.8; EXPRESSED IN HBL100, SIGNAL = 1.1; EXPRESSED IN HELA, SIGNAL = 2.1; EST_HUMAN HIT: AA693776.1, EVALUE 8.00e-49; SWISSPROT HIT: P08581, EVALUE 1.00e-104
HPLHSISVRRLKETKDGFMFLTDQSYIDVLPEFRDSYPIKYVHAFESNNFIYFLTVQRETLDAQTFHTRIIRFCSINSGLHSYMEMPLECILTEKRKKRSTKKEVFNILQAAYVSKPGAQLARQIGASLNDDILFGVFAQSKPDSAEPMDRSAMCAFPIKYVNDFFNKIVNKNNVRCLQHFYGPNHEHCFNR

SEQ ID NO: 46598 - protein, 182 aa, Homo sapiens
  MAP TO AC003079.1; EXPRESSED IN FETAL LIVER, SIGNAL = 1.1; EXPRESSED IN ADULT LIVER, SIGNAL = 0.97; SWISSPROT HIT: Q02357, EVALUE 2.00e-09; EST_HUMAN HIT: AI791680.1, EVALUE 3.00e-63
ANVNMKTNNQDEETPLHTAAHFGLSELVAFYVEHGAIVDSVNAHMETPLAIAAYWALRFKEQEYSTEHHLVCRMLLDYKAEVNARDDDFKSPLHKAAWNCDHVLMHMMLEAGAEANLMDINGCAAIQYVLKVTSVRPAAQPEICYQLLLNHGAARIYPPQFHKVRLCPVVSRLRKIQMAALS

SEQ ID NO: 46599 - protein, 21 aa, Homo sapiens
  MAP TO AL049775.2; EXPRESSED IN FETAL LIVER, SIGNAL = 0.59; EXPRESSED IN HBL100, SIGNAL = 1.3; EXPRESSED IN ADULT LIVER, SIGNAL = 0.82; EXPRESSED IN LUNG, SIGNAL = 0.7; EXPRESSED IN HELA, SIGNAL = 0.7; EXPRESSED IN PLACENTA, SIGNAL = 0.71; EXPRESSED IN BT474, SIGNAL = 0.63
YAQHFFKSAEDHRTIYGAKLV

SEQ ID NO: 46600 - protein, 181 aa, Homo sapiens
  MAP TO AL033403.1; EXPRESSED IN ADULT LIVER, SIGNAL = 3.5; EXPRESSED IN FETAL LIVER, SIGNAL = 2.5; EST_HUMAN HIT: T28608.1, EVALUE 3.00e-36; SWISSPROT HIT: P00740, EVALUE 1.00e-107
EHNIEETEHTEQKRNVIRIIPHHNYNAAINKYNHDIALLELDEPLVLNSYVTPICIADKEYTNIFLKFGSGYVSGWGRVFHKGRSALVLQYLRVPLVDRATCLRSTKFTIYNNMFCAGFHEGGRDSCQGDSGGPHVTEVEGTSFLTGIISWGEECAMKGKYGIYTKVSRYVNWIKEKTKLT

SEQ ID NO: 46601 - protein, 445 aa, Homo sapiens
  MAP TO AP000201.1; EXPRESSED IN ADULT LIVER, SIGNAL = 0.7; EXPRESSED IN BONE MARROW, SIGNAL = 1.2; EXPRESSED IN HBL100, SIGNAL = 1.1; EXPRESSED IN FETAL LIVER, SIGNAL = 1.6; EXPRESSED IN LUNG, SIGNAL = 1.1; EXPRESSED IN HELA, SIGNAL =   2; EXPRESSED IN PLACENTA, SIGNAL = 0.8; EXPRESSED IN BT474, SIGNAL = 1.5; EST_HUMAN HIT: AU134963.1, EVALUE 1.00e-130; SWISSPROT HIT: O14867, EVALUE 0.00e+00
VTVKGFEPLIQFAYTAKLILSKENVDEVCKCVEFLSVHNIEESCFQFLKFKFLDSTADQQECPRKKCFSSHCQKTDLKLSLLDQRDLETDEVEEFLENKNVQTPQCKLRRYQGNAKASPPLQDSASQTYESMCLEKDAALALPSLCPKYRKFQKAFGTDRVRTGESSVKDIHASVQPNERSENECLGGVPECRDLQVMLKCDESKLAMEPEETKKDPASQCPTEKSEVTPFPHNSSIDPHGLYSLSLLHTYDQYGDLNFAGMQNTTVLTEKPLSGTDVQEKTFGESQDLPLKSDLGTREDSSVASSDRSSVEREVAEHLAKGFWSDICSTDTPCQMQLSPAVAKDGSEQISQKRSECPWLGIRISESPEPGQRTFTTLSSVNCPFISTLSTEGCSSNLEIGNDDYVSEPQQEPCPYACVISLGDDSETDTEGDSESCSAREQECE

SEQ ID NO: 46602 - protein, 119 aa, Homo sapiens; identical to SEQ ID NO: 44672
  MAP TO AL035461.11; EXPRESSED IN ADULT LIVER, SIGNAL = 0.96; EXPRESSED IN BT474, SIGNAL = 0.77; EXPRESSED IN BONE MARROW, SIGNAL = 0.92; EXPRESSED IN HELA, SIGNAL = 0.61; EXPRESSED IN PLACENTA, SIGNAL = 0.6; EXPRESSED IN HBL100, SIGNAL = 1.5; EST_HUMAN HIT: AW674581.1, EVALUE 5.00e-54; SWISSPROT HIT: P46060, EVALUE 3.00e-03

SEQ ID NO: 46603 - protein, 32 aa, Homo sapiens
  MAP TO AL035461.11; EXPRESSED IN ADULT LIVER, SIGNAL = 0.96; EXPRESSED IN BT474, SIGNAL = 0.77; EXPRESSED IN BONE MARROW, SIGNAL = 0.92; EXPRESSED IN HELA, SIGNAL = 0.61; EXPRESSED IN PLACENTA, SIGNAL = 0.6; EXPRESSED IN HBL100, SIGNAL = 1.5; EST_HUMAN HIT: AW674581.1, EVALUE 3.00e-14
FWLHYSAIPWRRTCSGSNSMFWISQIFSQWSL

SEQ ID NO: 46604 - protein, 35 aa, Homo sapiens
  MAP TO AF131217.2; EXPRESSED IN BONE MARROW, SIGNAL = 0.96; EXPRESSED IN ADULT LIVER, SIGNAL = 0.94; SWISSPROT HIT: P09732, EVALUE 1.10e-01
RYELQAGIGPEEDDCWLCPVKEVWVGGFSQRMHLN

SEQ ID NO: 46605 - protein, 71 aa, Homo sapiens
  MAP TO AC008074.1; EXPRESSED IN HELA, SIGNAL = 0.9; EXPRESSED IN ADULT LIVER, SIGNAL = 0.88; EXPRESSED IN BT474, SIGNAL = 2.1; EXPRESSED IN BONE MARROW, SIGNAL = 1.3; EXPRESSED IN HBL100, SIGNAL = 1.5; EXPRESSED IN FETAL LIVER, SIGNAL = 1.1; EXPRESSED IN LUNG, SIGNAL = 0.91; EST_HUMAN HIT: AV709029.1, EVALUE 2.00e-09
TQLIIQKPLGENNVKLKKNLTYLLLNVLTYAWILLKLLMMKLVLPKKKVESLLISKAQTLTPQKKMIWMIL

SEQ ID NO: 46606 - protein, 37 aa, Homo sapiens
  MAP TO AC007738.2; EXPRESSED IN ADULT LIVER, SIGNAL =   1; EST_HUMAN HIT: BE788085.1, EVALUE 3.00e-04
CCLQLITDRPPAIQEELDLIQAVGCLEEFGVKILPLQ

SEQ ID NO: 46607 - protein, 21 aa, Homo sapiens
  MAP TO AJ229041.1; EXPRESSED IN ADULT LIVER, SIGNAL = 1.3; EXPRESSED IN BONE MARROW, SIGNAL = 0.97; EXPRESSED IN LUNG, SIGNAL = 0.94
VGSWIQKLQQPQVQPPGLADC

SEQ ID NO: 46608 - protein, 75 aa, Homo sapiens
  MAP TO AJ229041.1; EXPRESSED IN ADULT LIVER, SIGNAL = 1.3; EXPRESSED IN BONE MARROW, SIGNAL = 0.97; EXPRESSED IN LUNG, SIGNAL = 0.94; EST_HUMAN HIT: AW177686.1, EVALUE 5.00e-01
VHHICQHQKQGANRHVKEHRLTYNPPAQEAEPEAVEASGSSCQLLGGQKTEEHVNLQHECPISQIQIENHSVGQT

SEQ ID NO: 46609 - protein, 33 aa, Homo sapiens
  MAP TO AC007773.1; EXPRESSED IN BT474, SIGNAL = 0.93; EXPRESSED IN BONE MARROW, SIGNAL = 1.2; EXPRESSED IN HELA, SIGNAL = 0.7; EXPRESSED IN ADULT LIVER, SIGNAL = 0.69; EXPRESSED IN PLACENTA, SIGNAL = 0.88; EXPRESSED IN FETAL LIVER, SIGNAL = 1.2; EXPRESSED IN LUNG, SIGNAL = 0.71; EXPRESSED IN HBL100, SIGNAL =   8; EST_HUMAN HIT: BE669818.1, EVALUE 7.00e-11
TGSSENAVSSSELMSQTPSEVLGTNENEKLSPT

SEQ ID NO: 46610 - protein, 46 aa, Homo sapiens
  MAP TO AP000407.1; EXPRESSED IN ADULT LIVER, SIGNAL =   1; EST_HUMAN HIT: AA349168.1, EVALUE 3.00e-20
NSVELGLSSHELHVKEYVCIRGGFEVAEGPQKAQVLTTEWEEIEKC

SEQ ID NO: 46611 - protein, 41 aa, Homo sapiens
  MAP TO AL078598.4; EXPRESSED IN FETAL LIVER, SIGNAL = 0.63; EXPRESSED IN HELA, SIGNAL = 0.66; EXPRESSED IN ADULT LIVER, SIGNAL = 0.8; EXPRESSED IN LUNG, SIGNAL = 0.66
RFYEETITKINVTTFDYIKDIKDGQILEKRRFVKTSLKGVM

SEQ ID NO: 46612 - protein, 175 aa, Homo sapiens
  MAP TO AL035669.28; EXPRESSED IN HBL100, SIGNAL = 0.93; EXPRESSED IN HELA, SIGNAL =   1; EXPRESSED IN PLACENTA, SIGNAL = 0.99; EXPRESSED IN ADULT LIVER, SIGNAL = 1.2; EST_HUMAN HIT: BE612455.1, EVALUE 2.40e+00; SWISSPROT HIT: P36021, EVALUE 1.90e-01
QVPSAEDEPAPKKQKLSASVKKEDLKSKHDSSAPDPAPDSADEVMPEAVPEVASEPGLESASHPNVDRTYFPGPPGDGHPEPSPLEDLSPCPASCGSGVVTTVTVSGRDPRTAPSSSCTAVASAASRPDSTHMVEARQDVPKPVLTSVMVPKSILAKPSSSPDPRYLSVPPSPNI

SEQ ID NO: 46613 - protein, 68 aa, Homo sapiens
  MAP TO AL035669.28; EXPRESSED IN HBL100, SIGNAL = 0.93; EXPRESSED IN HELA, SIGNAL =   1; EXPRESSED IN PLACENTA, SIGNAL = 0.99; EXPRESSED IN ADULT LIVER, SIGNAL = 1.2; EST_HUMAN HIT: AI205160.1, EVALUE 1.00e-01; SWISSPROT HIT: P04196, EVALUE 1.10e-01
VPLPSLLWERGGHHRHSVRPGPQDRSKQFMHSRGLRSIPPRQHPHGGSQTGCAEACLDFCDGAQVHTS

SEQ ID NO: 46614 - protein, 82 aa, Homo sapiens
  MAP TO AP000311.1; EXPRESSED IN ADULT LIVER, SIGNAL = 0.84; EXPRESSED IN PLACENTA, SIGNAL = 0.61; EXPRESSED IN BONE MARROW, SIGNAL = 0.98; EXPRESSED IN FETAL LIVER, SIGNAL =   1; EXPRESSED IN HELA, SIGNAL = 0.63; EXPRESSED IN HBL100, SIGNAL = 0.82; EST_HUMAN HIT: AW950164.1, EVALUE 9.00e-24; SWISSPROT HIT: Q15811, EVALUE 1.00e-24
RAQERDKQWLEHVQQEDEHQRPRKLHEEEKLKREESVKKKDGEEKGKQEAQDKLGRLFHQHQEPAKPAVQAPWSTAGIRSQK

SEQ ID NO: 46615 - protein, 47 aa, Homo sapiens
  MAP TO AC007876.1; EXPRESSED IN ADULT LIVER, SIGNAL = 0.66; EXPRESSED IN HBL100, SIGNAL = 1.5; EXPRESSED IN HELA, SIGNAL = 0.61; EXPRESSED IN PLACENTA, SIGNAL = 0.62; EST_HUMAN HIT: AI218252.1, EVALUE 3.00e-01; SWISSPROT HIT: Q04526, EVALUE 4.10e-01
QEGRVSLPMSWTYQYITIPVVGVNHEIKKSHITQVLNPAIPSERTAQ

SEQ ID NO: 46616 - protein, 105 aa, Homo sapiens
  MAP TO AC009802.8; EXPRESSED IN BONE MARROW, SIGNAL = 0.92; EXPRESSED IN PLACENTA, SIGNAL = 8.9; EXPRESSED IN ADULT LIVER, SIGNAL = 1.7; EST_HUMAN HIT: BE122925.1, EVALUE 1.00e-41; SWISSPROT HIT: P05120, EVALUE 2.00e-42
LESEITYDKLNKWTSKDKMAEDEVEVYIPQFKLEEHYELRSILRSMGMEDAFNKGRANFSGMSERNDLFLSEVFHQAMVDVNEEGTEAAAGTGGVMTGRTGHGGP

SEQ ID NO: 46617 - protein, 55 aa, Homo sapiens
  MAP TO AL109933.8; EXPRESSED IN FETAL LIVER, SIGNAL = 1.5; EXPRESSED IN ADULT LIVER, SIGNAL = 1.7; EST_HUMAN HIT: R07514.1, EVALUE 2.00e-16; SWISSPROT HIT: P08519, EVALUE 7.00e-22
YHGDGQSYRGTYSTTVTGRTCQAWSSMTPHQHNRTTENYPNAYVINLTVSKTRSK

SEQ ID NO: 46618 - protein, 29 aa, Homo sapiens
  MAP TO AC009307.1; EXPRESSED IN HBL100, SIGNAL = 0.73; EXPRESSED IN ADULT LIVER, SIGNAL = 1.5; EXPRESSED IN BONE MARROW, SIGNAL = 0.78; EXPRESSED IN FETAL LIVER, SIGNAL = 0.71; EXPRESSED IN LUNG, SIGNAL = 0.75; EXPRESSED IN HELA, SIGNAL = 0.73; EXPRESSED IN PLACENTA, SIGNAL = 0.82
SRAVLVTGLQLGLLWHRYLQDKVGRVKGT

SEQ ID NO: 46619 - protein, 53 aa, Homo sapiens
  MAP TO X97051.1; EXPRESSED IN ADULT LIVER, SIGNAL = 1.2; EST_HUMAN HIT: AA808344.1, EVALUE 3.00e-26; SWISSPROT HIT: P46552, EVALUE 8.90e-01
NRSKELTPPISRNFMPFDQHLSFPRPRLTPSPREQPTPTSLLPHDMSGFDGME

SEQ ID NO: 46620 - protein, 41 aa, Homo sapiens
  MAP TO AC006378.2; EXPRESSED IN FETAL LIVER, SIGNAL = 0.83; EXPRESSED IN LUNG, SIGNAL = 0.82; EXPRESSED IN ADULT LIVER, SIGNAL = 0.99; EXPRESSED IN PLACENTA, SIGNAL = 1.1; EXPRESSED IN HBL100, SIGNAL = 0.92; EXPRESSED IN HELA, SIGNAL =   1; EXPRESSED IN BT474, SIGNAL = 0.93; EST_HUMAN HIT: BF130458.1, EVALUE 3.00e-06
EGVPPGNYGNYGYANSGYSACEEENERLTESLRSKVTAIKS

SEQ ID NO: 46621 - protein, 53 aa, Homo sapiens
  MAP TO AL034379.8; EXPRESSED IN HBL100, SIGNAL = 0.91; EXPRESSED IN HELA, SIGNAL = 1.1; EXPRESSED IN ADULT LIVER, SIGNAL = 0.92; EST_HUMAN HIT: BE394454.1, EVALUE 9.00e-26; SWISSPROT HIT: Q13823, EVALUE 1.00e-26
VIDSSDVVVQVLDARDPMGTRSPHIETYLKKEKPWKHLIFVLNKCDLVPTWAT

SEQ ID NO: 46622 - protein, 66 aa, Homo sapiens; identical to SEQ ID NO: 34942
  MAP TO AC009961.3; EXPRESSED IN ADULT LIVER, SIGNAL = 3.7; EXPRESSED IN FETAL LIVER, SIGNAL = 0.92; SWISSPROT HIT: P43121, EVALUE 3.80e-01; EST_HUMAN HIT: AI568189.1, EVALUE 4.00e-32

SEQ ID NO: 46623 - protein, 18 aa, Homo sapiens
  MAP TO AC009961.3; EXPRESSED IN ADULT LIVER, SIGNAL = 3.7; EXPRESSED IN FETAL LIVER, SIGNAL = 0.92; EST_HUMAN HIT: AA782013.1, EVALUE 1.00e-03
GNFDSFGSNHLVPVQKTF

SEQ ID NO: 46624 - protein, 44 aa, Homo sapiens
  MAP TO AL049733.3; EXPRESSED IN HELA, SIGNAL = 1.1; EXPRESSED IN PLACENTA, SIGNAL = 0.71; EXPRESSED IN BT474, SIGNAL =   2; EXPRESSED IN BONE MARROW, SIGNAL = 0.86; EXPRESSED IN HBL100, SIGNAL = 1.3; EXPRESSED IN FETAL LIVER, SIGNAL = 0.8; EXPRESSED IN LUNG, SIGNAL = 0.61; EXPRESSED IN ADULT LIVER, SIGNAL = 0.9; EST_HUMAN HIT: AW961297.1, EVALUE 4.00e-19
DNSRTLNVDSTAMTLPMSDPTAWATAMNNLGMAPLGIAGQPILP

SEQ ID NO: 46625 - protein, 60 aa, Homo sapiens
  MAP TO AC008177.1; EXPRESSED IN FETAL LIVER, SIGNAL =   1; EXPRESSED IN ADULT LIVER, SIGNAL = 0.82; EST_HUMAN HIT: AL040762.1, EVALUE 1.00e-15; SWISSPROT HIT: P21447, EVALUE 3.00e-19
RSLNIQWLRDQIGIVEQEPVLFSTTIAENIRYGREDATMEDIVQAAKEANAYNFIMDLPQ

SEQ ID NO: 46626 - protein, 47 aa, Homo sapiens
  MAP TO AC007966.2; EXPRESSED IN ADULT LIVER, SIGNAL = 0.86
YLDMISRKLEQLERTAEEQRLFLMDREERRQREHTRRKLTLRRKIEE

SEQ ID NO: 46627 - protein, 324 aa, Homo sapiens
  MAP TO AC005255.1; EXPRESSED IN LUNG, SIGNAL = 1.1; EXPRESSED IN BONE MARROW, SIGNAL = 0.91; EXPRESSED IN HBL100, SIGNAL = 1.2; EXPRESSED IN HELA, SIGNAL = 1.2; EXPRESSED IN PLACENTA, SIGNAL =   1; EXPRESSED IN ADULT LIVER, SIGNAL = 1.5; SWISSPROT HIT: O76099, EVALUE 0.00e+00; EST_HUMAN HIT: AW009208.1, EVALUE 2.00e-48
YFIPMETGNQTHAQEFLLLGFSATSEIQFILFGLFLSMYLVTFTGNLLIILAICSDSHLHTPMYFFLSNLSFADLCFTSTTVPKMLLNILTQNKFITYAGCLSQIFFFTSFGCLDNLLLTVMAYDRFVAVCHPLHYTVIMNPQLCGLLVLGSWCISVMGSLLETLTVLRLSFCTEMEIPHFFCDLLEVLKLACSDTFINNVVIYFATGVLGVISFTGIFFSYYKIVFSILRISSAGRKHKAFSTCGSHLSVVTLFYGTGFGVYLSSAATPSSRTSLVASVMYTMVTPMLNPFIYSLRNTDMKRALGRLLSRATFFNGDITAGLS

SEQ ID NO: 46628 - protein, 39 aa, Homo sapiens
  MAP TO AC005255.1; EXPRESSED IN LUNG, SIGNAL = 1.1; EXPRESSED IN BONE MARROW, SIGNAL = 0.91; EXPRESSED IN HBL100, SIGNAL = 1.2; EXPRESSED IN HELA, SIGNAL = 1.2; EXPRESSED IN PLACENTA, SIGNAL =   1; EXPRESSED IN ADULT LIVER, SIGNAL = 1.5; EST_HUMAN HIT: BF028005.1, EVALUE 1.30e-01
ILSPWKQEIKHMPKNFSSWDFQQRQRFSSFSLGCSSPCT

SEQ ID NO: 46629 - protein, 24 aa, Homo sapiens
  MAP TO AL109941.9; EXPRESSED IN ADULT LIVER, SIGNAL =   1; EST_HUMAN HIT: AW951241.1, EVALUE 1.30e-01
KNPLVFFVWCALAILIDTGSTLLQ

SEQ ID NO: 46630 - protein, 52 aa, Homo sapiens
  MAP TO AC007219.1; EXPRESSED IN BT474, SIGNAL = 0.7; EXPRESSED IN FETAL LIVER, SIGNAL = 0.68; EXPRESSED IN LUNG, SIGNAL = 0.66; EXPRESSED IN ADULT LIVER, SIGNAL = 0.64; EXPRESSED IN PLACENTA, SIGNAL = 1.1; EXPRESSED IN BONE MARROW, SIGNAL = 0.7; EXPRESSED IN HBL100, SIGNAL = 1.1; EXPRESSED IN HELA, SIGNAL =   1; SWISSPROT HIT: Q9Y718, EVALUE 7.80e+00; EST_HUMAN HIT: BE897375.1, EVALUE 7.50e-01
CTMICSKDSKFKQRHSSSQHLPLAVGLRTHKLVISLALSASTQINSDSTSNP

SEQ ID NO: 46631 - protein, 130 aa, Homo sapiens
  MAP TO AF130350.1; EXPRESSED IN HELA, SIGNAL = 1.1; EXPRESSED IN PLACENTA, SIGNAL =   1; EXPRESSED IN ADULT LIVER, SIGNAL = 1.3; EST_HUMAN HIT: AA001786.1, EVALUE 7.00e-40; EST_HUMAN HIT: AA001786.1, EVALUE 7.00e-40; SWISSPROT HIT: P70213, EVALUE 6.00e-21
VKDSTSNSVENTYNPWHELYRKLCKINAFDIPDALVIRGKELSNCILNTFDHMWGTKENNEACWLLLSLVDKMMKIYNELRDSVSWLQKQILSLKSAKIALSESLISCRERAEIVEKQTQALIVYMADLQ

SEQ ID NO: 46632 - protein, 34 aa, Homo sapiens
  MAP TO AC007880.1; EXPRESSED IN LUNG, SIGNAL = 0.65; EXPRESSED IN ADULT LIVER, SIGNAL = 0.69; EXPRESSED IN PLACENTA, SIGNAL = 0.71; EXPRESSED IN BT474, SIGNAL = 0.63; EXPRESSED IN BONE MARROW, SIGNAL =   2
GKMEMARLWPVLGRHCSRSTFRRENRHGDKSPDL

SEQ ID NO: 46633 - protein, 41 aa, Homo sapiens; identical to SEQ ID NO: 35092
  MAP TO AC010872.3; EXPRESSED IN ADULT LIVER, SIGNAL = 2.5; EXPRESSED IN FETAL LIVER, SIGNAL = 1.7; SWISSPROT HIT: P04114, EVALUE 1.00e-16; EST_HUMAN HIT: AI174976.1, EVALUE 9.00e-16

SEQ ID NO: 46634 - protein, 75 aa, Homo sapiens
  MAP TO AC010872.3; EXPRESSED IN ADULT LIVER, SIGNAL = 2.5; EXPRESSED IN FETAL LIVER, SIGNAL = 1.7; SWISSPROT HIT: Q15654, EVALUE 6.10e-01; EST_HUMAN HIT: AI174976.1, EVALUE 1.00e-33
VLHSHPPVAETCACQPPSDRCGHLPGGPDPRALSTAAARDLQHGEGSAQPSHLVCAEPRGQQVSFHTVFLLLGAE

SEQ ID NO: 46635 - protein, 24 aa, Homo sapiens
  MAP TO AC010127.3; EXPRESSED IN ADULT LIVER, SIGNAL = 1.5; EXPRESSED IN FETAL LIVER, SIGNAL = 1.4; EXPRESSED IN LUNG, SIGNAL = 1.2; EXPRESSED IN BONE MARROW, SIGNAL = 0.93; SWISSPROT HIT: P17149, EVALUE 3.80e+00; EST_HUMAN HIT: BF347024.1, EVALUE 3.00e-03
SLLCYFHHLWVLLHLEPVYWCHHR

SEQ ID NO: 46636 - protein, 35 aa, Homo sapiens
  MAP TO AC011739.2; EXPRESSED IN ADULT LIVER, SIGNAL =   1; EST_HUMAN HIT: BE896788.1, EVALUE 1.00e-14
KDCFDGHSSDEGAREGPRDAGGSPVQPGKLLRKHS

SEQ ID NO: 46637 - protein, 37 aa, Homo sapiens
  MAP TO AC004882.2; EXPRESSED IN FETAL LIVER, SIGNAL = 0.9; EXPRESSED IN HELA, SIGNAL = 0.98; EXPRESSED IN ADULT LIVER, SIGNAL = 0.79; EXPRESSED IN BT474, SIGNAL = 0.76; EXPRESSED IN BONE MARROW, SIGNAL = 1.1; EXPRESSED IN HBL100, SIGNAL = 1.3; EST_HUMAN HIT: AW402025.1, EVALUE 4.00e-15; SWISSPROT HIT: O69548, EVALUE 8.10e+00
VFSNILQHCGLQGDGANTTPQKLEERGRLTPSDMPLL

SEQ ID NO: 46638 - protein, 29 aa, Homo sapiens
  MAP TO AC010686.1; EXPRESSED IN HBL100, SIGNAL = 0.93; EXPRESSED IN BONE MARROW, SIGNAL = 0.92; EXPRESSED IN ADULT LIVER, SIGNAL = 0.99
CGALTLYSRISPASKGRRQTGSMATARTR

SEQ ID NO: 46639 - protein, 311 aa, Homo sapiens
  MAP TO AC004889.1; EXPRESSED IN HELA, SIGNAL =   1; EXPRESSED IN PLACENTA, SIGNAL = 1.1; EXPRESSED IN BT474, SIGNAL = 0.93; EXPRESSED IN FETAL LIVER, SIGNAL = 1.1; EXPRESSED IN ADULT LIVER, SIGNAL =   1; EXPRESSED IN LUNG, SIGNAL = 1.3; EST_HUMAN HIT: AI148854.1, EVALUE 4.00e-99; SWISSPROT HIT: P34984, EVALUE 1.00e-86
EMGENQTMVTEFLLLGFLLGPRIQMLLFGLFSLFYIFTLLGNGAILGLISLDSRLHTPMYFFLSHLAVVDIAYTRNTVPQMLANLLHPAKPISFAGCMTQTFLCLSFGHSECLLLVLMSYDRYVAICHPLRYSVIMTWRVCITLAVTSWTCGSLLALAHVVLILRLPFSGPHEINHFFCEILSVLRLACADTWLNQVVIFAACVFFLVGPPSLVLVSYSHILAAILRIQSGEGRRKAFSTCSSHLCVVGLFFGSAIIMYMAPKSRHPEEQQKVFFLFYSFFNPTLNPLIYSLRNGEVKGALRRALGKESHS

SEQ ID NO: 46640 - protein, 97 aa, Homo sapiens
  MAP TO AC004889.1; EXPRESSED IN HELA, SIGNAL =   1; EXPRESSED IN PLACENTA, SIGNAL = 1.1; EXPRESSED IN BT474, SIGNAL = 0.93; EXPRESSED IN FETAL LIVER, SIGNAL = 1.1; EXPRESSED IN ADULT LIVER, SIGNAL =   1; EXPRESSED IN LUNG, SIGNAL = 1.3; EST_HUMAN HIT: BE179276.1, EVALUE 9.00e-31
KWGKIRQWSQSSSYWDFSWAQGFRCSSLGSSPCSISSPCWGTGPSWGSSHWTPDSTPPCTSSSHTWLSSTSPTPATRCPRCWRTSCIQPSPSPLLVA

SEQ ID NO: 46641 - protein, 59 aa, Homo sapiens
  MAP TO AC012135.1; EXPRESSED IN ADULT LIVER, SIGNAL = 1.2; EST_HUMAN HIT: AA131493.1, EVALUE 2.00e-26; SWISSPROT HIT: Q92915, EVALUE 7.00e-30
KFKESVFENYYVIYSSMLYRQQESGRAWFLGLNKEGQAMKGNRVKKTKPAAHFLPKPLE

SEQ ID NO: 46642 - protein, 49 aa, Homo sapiens
  MAP TO AF152365.1; EXPRESSED IN ADULT LIVER, SIGNAL = 1.1
RKTQQTMVKRIYVNSTSQEVKIKNISPLSQYIPHYFTGDFSPNLFEETK

SEQ ID NO: 46643 - protein, 91 aa, Homo sapiens
  MAP TO AE000660.1; EXPRESSED IN ADULT LIVER, SIGNAL = 1.4; EXPRESSED IN BT474, SIGNAL = 0.99; EXPRESSED IN BONE MARROW, SIGNAL = 0.98; EXPRESSED IN HELA, SIGNAL = 1.1; EXPRESSED IN PLACENTA, SIGNAL = 2.6; SWISSPROT HIT: P31792, EVALUE 2.00e-17; EST_HUMAN HIT: AU134310.1, EVALUE 1.00e-34
NEEKIEHNCQQVIAQTYAARGDFLEVPLTDPHLNLYTDGSSFVEKGLQKVGYAVVSDNGILESNPLTPGTSAQLAELIALTRVLESGEGKR

SEQ ID NO: 46644 - protein, 40 aa, Homo sapiens
  MAP TO AC010085.1; EXPRESSED IN ADULT LIVER, SIGNAL = 1.2; SWISSPROT HIT: P46241, EVALUE 8.10e+00; EST_HUMAN HIT: AV751404.1, EVALUE 1.00e-03
VILASWYRIYTKIMDLIGIQTKICWTVTEGEDSVLLKAVK

SEQ ID NO: 46645 - protein, 122 aa, Homo sapiens
  MAP TO AP000191.1; EXPRESSED IN ADULT LIVER, SIGNAL = 0.75; EST_HUMAN HIT: H09150.1, EVALUE 4.20e+00
RRWEGRRSRSPAHHPRPPLCPSRSPLGILPREPPYYGATKLRSLPWRLHSSLPPSLPPSLPRSRLSPHLPPLPPPPPIHHPSPPISGWGNRQPIGRRGPHLLTTPYHWPRPPCEPKEGEPKK

SEQ ID NO: 46646 - protein, 164 aa, Homo sapiens
  MAP TO AC008174.1; EXPRESSED IN ADULT LIVER, SIGNAL = 0.8; EXPRESSED IN PLACENTA, SIGNAL = 0.74; EXPRESSED IN LUNG, SIGNAL = 0.72; SWISSPROT HIT: P22607, EVALUE 3.90e-01; EST_HUMAN HIT: BF689909.1, EVALUE 3.80e+00
FSEEKMSVSTWSRKKYESKQFLRNIYDDSSIYQCCEHLTESVLYHLTSSISDGTKKGREKEKAWEIQEATFSKIISIHSQVFESRSISIGELALCISEIIIKILFNNKIIQADIAQKMVAIPTKYTYCPGIVSGGFDDLFQDLLVGVIHVLSKEIEVDYHFESN

SEQ ID NO: 46647 - protein, 22 aa, Homo sapiens
  MAP TO AC008174.1; EXPRESSED IN ADULT LIVER, SIGNAL = 0.8; EXPRESSED IN PLACENTA, SIGNAL = 0.74; EXPRESSED IN LUNG, SIGNAL = 0.72
FLVRKRCLFLHGQGKNMNQNSS

SEQ ID NO: 46648 - protein, 30 aa, Homo sapiens
  MAP TO AC007600.2; EXPRESSED IN ADULT LIVER, SIGNAL = 0.66; EXPRESSED IN BT474, SIGNAL = 1.3; EXPRESSED IN HBL100, SIGNAL = 0.73; EST_HUMAN HIT: BE812778.1, EVALUE 7.90e-02; SWISSPROT HIT: Q9QYM0, EVALUE 1.00e-02
LASSFQATARIGLETEAQFTAVERILQYMK

SEQ ID NO: 46649 - protein, 21 aa, Homo sapiens
  MAP TO AC007106.6; EXPRESSED IN ADULT LIVER, SIGNAL = 0.72
SSSWGFSHYCCTIFIMLISLS

SEQ ID NO: 46650 - protein, 140 aa, Homo sapiens
  MAP TO AL049739.1; EXPRESSED IN ADULT LIVER, SIGNAL = 1.2; EXPRESSED IN BONE MARROW, SIGNAL = 0.99; EST_HUMAN HIT: AF003828.1, EVALUE 9.00e-12; SWISSPROT HIT: P35410, EVALUE 2.00e-74
LSGLFHAILSLVMCVSSLTLLIRFLCCSQQQKATRVYAVVQISAPMFLLWALPLSVAPLITDFKMFVTTSYLISLFLIINSSANPIIYFFVGSLRKKRLKESLRVILQRALADKPEVGRNKKAAGIDPMEQPHSTQHVEN

SEQ ID NO: 46651 - protein, 51 aa, Homo sapiens
  MAP TO AC007750.2; EXPRESSED IN LUNG, SIGNAL = 0.62; EXPRESSED IN HELA, SIGNAL = 0.67; EXPRESSED IN ADULT LIVER, SIGNAL = 0.65; EXPRESSED IN PLACENTA, SIGNAL = 0.68; EXPRESSED IN FETAL LIVER, SIGNAL = 0.62; EXPRESSED IN BONE MARROW, SIGNAL = 0.65; EST_HUMAN HIT: AU136648.1, EVALUE 1.00e-25; SWISSPROT HIT: P27487, EVALUE 2.00e-16
EMLATKYALWWSPNGKFLAYAEFNDTDIPVIAYSYYGDEQYPRTINIPYPK

SEQ ID NO: 46652 - protein, 43 aa, Homo sapiens
  MAP TO AC009307.1; EXPRESSED IN LUNG, SIGNAL = 0.76; EXPRESSED IN ADULT LIVER, SIGNAL = 0.73; EXPRESSED IN PLACENTA, SIGNAL = 0.79; EXPRESSED IN BT474, SIGNAL = 0.7; EXPRESSED IN FETAL LIVER, SIGNAL = 0.78; EXPRESSED IN HELA, SIGNAL = 0.89; EXPRESSED IN BONE MARROW, SIGNAL = 0.75; EXPRESSED IN HBL100, SIGNAL = 0.68; EST_HUMAN HIT: BE675766.1, EVALUE 9.00e-17; SWISSPROT HIT: P54860, EVALUE 9.20e-01
LRSKVLRKIEELRTKVKSLSSGIPDEFICPITRELMKDPVIAS

SEQ ID NO: 46653 - protein, 99 aa, Homo sapiens
  MAP TO AL031280.6; EXPRESSED IN PLACENTA, SIGNAL = 1.2; EXPRESSED IN ADULT LIVER, SIGNAL = 0.98; SWISSPROT HIT: P25502, EVALUE 6.40e+00
MMVRSQTGDSSKNSKDSRNLGPSVFLLTPPSLWGLVSSSDSRVLDVLNVELMQLRLLLSQTCFGVSTLKENRSHRDHSLSVGTQLRVFPPLEGCCLRFD

SEQ ID NO: 46654 - protein, 212 aa, Homo sapiens
  MAP TO AF001905.1; EXPRESSED IN BT474, SIGNAL = 5.4; EXPRESSED IN LUNG, SIGNAL = 0.97; EXPRESSED IN ADULT LIVER, SIGNAL = 1.4; SWISSPROT HIT: P08547, EVALUE 3.00e-57; EST_HUMAN HIT: BF037518.1, EVALUE 2.00e-56
NKIQIITIRNNKCYIITDPTEIQKILRDYIEQIYAHKLEKLKKMEKFLEAYNLTRLNLAEIKNLNKPISTFEIESVIKNLLAINSLGPVGFTAKFYHTYKEKQIPIVLQLFLKIKVKELLPNLFNESSINLILKSGRDTRKNKNFRPMSLINIDEKILNKILANKIQQHIKNLIYQEQVGFIPGMEGWLNIFKSINIIHYINRIKRITICSS

SEQ ID NO: 46655 - protein, 39 aa, Homo sapiens
  MAP TO AC012354.2; EXPRESSED IN ADULT LIVER, SIGNAL = 1.1
NWAENSIDAVCKLINHPPPTSATATLATTVDDYSELLRA

SEQ ID NO: 46656 - protein, 43 aa, Homo sapiens
  MAP TO AC012367.2; EXPRESSED IN ADULT LIVER, SIGNAL =   1
MAVNIPLAKATHRAEPKIKDKTICFTFSRRDNKCVTKGTDAGR

SEQ ID NO: 46657 - protein, 48 aa, Homo sapiens
  MAP TO AF047825.1; EXPRESSED IN ADULT LIVER, SIGNAL =   1; SWISSPROT HIT: P39880, EVALUE 1.00e-20; EST_HUMAN HIT: BF347603.1, EVALUE 1.00e-19
CADPVPALDLGQQLQLKVQRLHDIETENQKLRETLEEYNKEFAEVKNQ

SEQ ID NO: 46658 - protein, 33 aa, Homo sapiens
  MAP TO AF121782.1; EXPRESSED IN ADULT LIVER, SIGNAL = 0.98; EXPRESSED IN FETAL LIVER, SIGNAL = 0.99; EST_HUMAN HIT: BE141049.1, EVALUE 6.80e+00
EQKQLPESHEKGIHPGGHPREWGECENVADTNN

SEQ ID NO: 46659 - protein, 35 aa, Homo sapiens
  MAP TO AL035417.15; EXPRESSED IN PLACENTA, SIGNAL = 0.71; EXPRESSED IN BT474, SIGNAL = 0.77; EXPRESSED IN HBL100, SIGNAL = 1.2; EXPRESSED IN HELA, SIGNAL = 0.85; EXPRESSED IN BONE MARROW, SIGNAL = 0.86; EXPRESSED IN FETAL LIVER, SIGNAL = 0.62; EXPRESSED IN ADULT LIVER, SIGNAL = 0.75; SWISSPROT HIT: O74044, EVALUE 8.20e+00; EST_HUMAN HIT: R88938.1, EVALUE 7.00e-13
MATGADVRDILELGGPEGDAASGTISKKDIINPDK

SEQ ID NO: 46660 - protein, 86 aa, Homo sapiens
  MAP TO AJ010770.1; EXPRESSED IN HBL100, SIGNAL =   1; EXPRESSED IN ADULT LIVER, SIGNAL = 1.1; EST_HUMAN HIT: BE889365.1, EVALUE 1.00e-29
LAQFRQRKAQSDGQSPSKKQKKKRKTSSSKHDVSAHHDLNIDQSQCNEMYINSSQRVESTVIPESTIMRTLHSGEITSHEQGFSVE

SEQ ID NO: 46661 - protein, 38 aa, Homo sapiens
  MAP TO AJ010770.1; EXPRESSED IN HBL100, SIGNAL =   1; EXPRESSED IN ADULT LIVER, SIGNAL = 1.1; EST_HUMAN HIT: BE889365.1, EVALUE 5.00e-15
LPSFDKEKLSRMGRVLPRSRKKREKRQAVNMMCQHTMI

SEQ ID NO: 46662 - protein, 37 aa, Homo sapiens
  MAP TO AC007366.2; EXPRESSED IN ADULT LIVER, SIGNAL = 1.3
MLHSCICALFTQLSRHPNPERNRNTTPPTTVTENAAG

SEQ ID NO: 46663 - protein, 46 aa, Homo sapiens
  MAP TO AC007656.2; EXPRESSED IN ADULT LIVER, SIGNAL = 0.87; EST_HUMAN HIT: AW947993.1, EVALUE 3.50e+00; SWISSPROT HIT: Q91193, EVALUE 2.10e+00
GGKGAIRVLSEGQSPTPMAKGFQQVLHKKEQRVSFRNLPLFPLYLC

SEQ ID NO: 46664 - protein, 25 aa, Homo sapiens
  MAP TO AC009490.4; EXPRESSED IN BONE MARROW, SIGNAL = 1.3; EXPRESSED IN LUNG, SIGNAL = 0.97; EXPRESSED IN PLACENTA, SIGNAL =   1; EXPRESSED IN ADULT LIVER, SIGNAL =   1
SQGQAAMEVLHLPLPVAAPPCSHCA

SEQ ID NO: 46665 - protein, 646 aa, Homo sapiens
  MAP TO AC000113.1; EXPRESSED IN LUNG, SIGNAL = 1.1; EXPRESSED IN PLACENTA, SIGNAL = 1.1; EXPRESSED IN HELA, SIGNAL = 1.1; EXPRESSED IN BT474, SIGNAL = 0.99; EXPRESSED IN FETAL LIVER, SIGNAL = 1.1; EXPRESSED IN ADULT LIVER, SIGNAL = 1.3; EST_HUMAN HIT: AL040448.1, EVALUE 1.00e-126; SWISSPROT HIT: P08640, EVALUE 1.00e-22
GAMSTPLMGAPASGNMSTLQKTVPASGAMTTSLMTVPSSGVMSTEQMSATASRVMSAQLTMAKTSGAMPTGSMKAVAKQYKRATASGKMSTPLRRAPTSGAMSTQPVTATASETMSMPQLTVPASGSMSMLQMRAPVSEAMSMPQMRTMASGLTSAAQMKAMTSGAMSTPLMTAQTSGSTSTLLMRDTASGVMSCPQMRSLASGALSKPLMTPKASGTMFTEKMTTTASEAMPTLLMRDTVSGALSMPQMTDTASGGLSASLMRDTASGAMSTSQMTATVSGGMSMPLMRAQDPGVMPASLMRAKVSGKMLSQPMSTQDPGGMSMSPMKSMTAGGMQMNSPTSDVMSTPTVRAWTSETMSTPLMRTSDPGERPSLLTRASSSGEMSLPLMRAPASGEIATPLRSPAYGAMSAPQMTATASGMMSSMPQVKAPISGAMSMPLTRSTASGGMSMPLMRAPDSRVTSTSQMMPTASGDMCTLPVRAPASGGVSSPLVRAPASGTMSTPLRRPSACETVSTELMRASASGHMSTAQTTAMVSGGMSKPLMRAPASGTMPMPLMSAMASGEMSMPLMETMASGATSTLQTSVANSRSMSLSQTTYTVSGRMATAPIRASASGARSTSFMRASVSGSMPMPLPRATASGCGM

SEQ ID NO: 46666 - protein, 37 aa, Homo sapiens
  MAP TO AC006560.8; EXPRESSED IN LUNG, SIGNAL = 0.61; EXPRESSED IN HELA, SIGNAL = 2.4; EXPRESSED IN ADULT LIVER, SIGNAL = 0.73; EXPRESSED IN PLACENTA, SIGNAL = 0.71; EXPRESSED IN HBL100, SIGNAL =   1; EST_HUMAN HIT: AA018299.1, EVALUE 1.00e-16
DKSCDYWNLSSACGTAQASHLFDNPATVFFSIFMALW

SEQ ID NO: 46667 - protein, 37 aa, Homo sapiens
  MAP TO AC006560.8; EXPRESSED IN LUNG, SIGNAL = 0.61; EXPRESSED IN HELA, SIGNAL = 2.4; EXPRESSED IN ADULT LIVER, SIGNAL = 0.73; EXPRESSED IN PLACENTA, SIGNAL = 0.71; EXPRESSED IN HBL100, SIGNAL =   1; EST_HUMAN HIT: H85641.1, EVALUE 6.00e-08
TSPVITGTSAQPVGPRRPATCLTTLPPSSSLSSWLCG

SEQ ID NO: 46668 - protein, 779 aa, Homo sapiens
  MAP TO AC005365.1; EXPRESSED IN PLACENTA, SIGNAL = 1.2; EXPRESSED IN HBL100, SIGNAL = 1.3; EXPRESSED IN HELA, SIGNAL = 1.4; EXPRESSED IN BT474, SIGNAL = 1.2; EXPRESSED IN FETAL LIVER, SIGNAL =   1; EXPRESSED IN ADULT LIVER, SIGNAL =   1; EXPRESSED IN LUNG, SIGNAL = 2.7; SWISSPROT HIT: O60673, EVALUE 0.00e+00; EST_HUMAN HIT: AW771182.1, EVALUE 1.00e-110; EST_HUMAN HIT: AW771182.1, EVALUE 1.00e-110
AAAEKEAMLFKGPNVYKKTVNSRIGKTSRARAQIKKSKAKLANPSIVTKKRNKRNQTNKLVDDGKKKPRAKQKTNEKGTSRKHITLKDEKIKSQSGAEVKFVLKHQNVSEFASSSGGSQLLFKQKDMPLMGSAVDHPLSASLPTGINAQQKLSGCFSSFLESKKSVDLQTFPSSRDDLHPSVVCNSIGPGVSKINVQRPHNQSAMFTLKESTLIQKNIFDLSNHLSQVAQNTQISSGMSSKIEDNANNIQRNYLSSIGKLSEYRNSLESKLDQAYTPNFLHCKDSQQQIVCIAEQSKHSETCSPGNTASEESQMPNNCFVTSLRSPIKQIAWEQKQRGFILDMSNFKPERVKPRSLSEAISQTKALSQCKNRNVSTPSAFGEGQSGLAVLKELLQKRQQKAQNANTTQDPLSNKHQPNKNISGSLEHNKANKRTRSVTSPRKPRTPRSTKQKEKIPKLLKVDSLNLQNSSQLDNSVSDDSPIFFSDPGFESCYSLEDSLSPEHNYNFDINTIGQTGFCSFYSGSQFVPADQNLPQKFLSDAVQDLFPGQAIEKNEFLSHDNQKCDEDKHHTTDSASWIRSGTLSPEIFEKSTIDSNENRRHNQWKNSFHPLTTRSNSIMDSFCVQQAEDCLSEKSRLNRSSVSKEVFLSLPQPNNSDWIQGHTRKEMGQSLDSANTSFTAILSSPDGELVDVACEDLELYVSRNNDMLTPTPDSSPRSTSSPSQSKNGSFTPRTANILKPLMSPPSREEIMATLLDHDLSETIYQEPFCSNPSDVPEKP

SEQ ID NO: 46669 - protein, 46 aa, Homo sapiens
  MAP TO AF019413.1; EXPRESSED IN FETAL LIVER, SIGNAL = 2.6; EXPRESSED IN ADULT LIVER, SIGNAL = 2.3; EST_HUMAN HIT: BE175223.1, EVALUE 7.00e-03; SWISSPROT HIT: P01028, EVALUE 8.00e-04
LKLKVLGESALAGQAVVLCDLTTMFSLRQKEGAIHREELVYELNPL

SEQ ID NO: 46670 - protein, 34 aa, Homo sapiens
  MAP TO AC007124.1; EXPRESSED IN ADULT LIVER, SIGNAL = 1.1; EST_HUMAN HIT: BF592443.1, EVALUE 2.00e+00
HNLRKISKMMRKEEERVGEEKLQIRAQYAALNGA

SEQ ID NO: 46671 - protein, 18 aa, Homo sapiens
  MAP TO AC007124.1; EXPRESSED IN ADULT LIVER, SIGNAL = 1.1
TQPEKDLKDDEKRGRKSG

SEQ ID NO: 46672 - protein, 53 aa, Homo sapiens
  MAP TO AC007156.2; EXPRESSED IN ADULT LIVER, SIGNAL = 1.4; EST_HUMAN HIT: BE621546.1, EVALUE 1.10e-01; SWISSPROT HIT: Q13203, EVALUE 8.90e-01
LLIFISCLLGPSRTSWTPPLALHQQSPPASSSLTCSCSAMPLPTSGPLFSCVL

SEQ ID NO: 46673 - protein, 47 aa, Homo sapiens
  MAP TO AJ009614.1; EXPRESSED IN BONE MARROW, SIGNAL = 1.1; EXPRESSED IN LUNG, SIGNAL = 1.4; EXPRESSED IN HELA, SIGNAL = 1.2; EXPRESSED IN PLACENTA, SIGNAL = 1.2; EXPRESSED IN HBL100, SIGNAL = 0.95; EXPRESSED IN FETAL LIVER, SIGNAL = 1.2; EXPRESSED IN ADULT LIVER, SIGNAL = 1.2; EST_HUMAN HIT: H18901.1, EVALUE 1.20e-02; SWISSPROT HIT: Q07175, EVALUE 1.20e+00
ARCLPQFPALHPTSNRQVPWRTSPSPSNPCLGSGWGSAGPHGQGLRH

SEQ ID NO: 46674 - protein, 37 aa, Homo sapiens
  MAP TO AC007981.31; EXPRESSED IN ADULT LIVER, SIGNAL = 2.2; EXPRESSED IN PLACENTA, SIGNAL = 1.2; SWISSPROT HIT: P01088, EVALUE 6.20e+00; EST_HUMAN HIT: BE717028.1, EVALUE 2.00e-13
VSLPRRCGVSTAAGHRSGRTLVPHGGLPHHYLVQCEW

SEQ ID NO: 46675 - protein, 93 aa, Homo sapiens
  MAP TO AC007455.7; EXPRESSED IN LUNG, SIGNAL = 0.59; EXPRESSED IN PLACENTA, SIGNAL = 0.75; EXPRESSED IN BT474, SIGNAL = 0.66; EXPRESSED IN BONE MARROW, SIGNAL = 0.75; EXPRESSED IN HBL100, SIGNAL = 1.1; EXPRESSED IN FETAL LIVER, SIGNAL = 0.6; EXPRESSED IN ADULT LIVER, SIGNAL = 0.71; EST_HUMAN HIT: BE887504.1, EVALUE 6.00e-24; SWISSPROT HIT: P02447, EVALUE 2.00e-23
ETPTDFSQLNKNPPPIAMYCCALRSCSVPTGPATTFCSFDKSCRCGVCLPSTCPHEISLLQPICCDTCPPPCCKPDTYVPTCWLLNNCHPTPG

SEQ ID NO: 46676 - protein, 81 aa, Homo sapiens
  MAP TO AB026898.1; EXPRESSED IN ADULT LIVER, SIGNAL = 1.1; EXPRESSED IN LUNG, SIGNAL =   1; EST_HUMAN HIT: AV652088.1, EVALUE 3.10e-02; SWISSPROT HIT: Q62674, EVALUE 6.20e+00
EPHHCAVAWVKNHTFNLSAAEQLVLSVPLDTAGHPEPCLMFRPPPANASLQDILSHRFNETQPCDMGWEYPENRLPSLKNE

SEQ ID NO: 46677 - protein, 37 aa, Homo sapiens
  MAP TO AB026898.1; EXPRESSED IN ADULT LIVER, SIGNAL = 1.1; EXPRESSED IN LUNG, SIGNAL =   1; EST_HUMAN HIT: AU136020.1, EVALUE 6.50e-01; SWISSPROT HIT: P34804, EVALUE 2.40e-01
AGTERAPGHCRSPRALPHVPATPRQCQPAGHPQPPLQ

SEQ ID NO: 46678 - protein, 53 aa, Homo sapiens
  MAP TO AC006559.6; EXPRESSED IN PLACENTA, SIGNAL = 0.94; EXPRESSED IN LUNG, SIGNAL = 0.59; EXPRESSED IN HELA, SIGNAL = 1.1; EXPRESSED IN BT474, SIGNAL = 0.98; EXPRESSED IN FETAL LIVER, SIGNAL = 0.64; EXPRESSED IN ADULT LIVER, SIGNAL = 0.79; EST_HUMAN HIT: BE867703.1, EVALUE 5.00e-24
YEIEGCEVIWAIKDKAIGNTFFDAGAAEFLTSKLIAEKSEAKIAHKRTRYTTE

SEQ ID NO: 46679 - protein, 125 aa, Homo sapiens
  MAP TO AC007556.2; EXPRESSED IN PLACENTA, SIGNAL = 0.71; EXPRESSED IN BT474, SIGNAL = 0.64; EXPRESSED IN HELA, SIGNAL = 1.4; EXPRESSED IN ADULT LIVER, SIGNAL = 0.88; EST_HUMAN HIT: BE765273.1, EVALUE 7.00e-56; SWISSPROT HIT: P98164, EVALUE 7.00e-84
TRPPGMCHSDEFQCQEDGICIPNFWECDGHPDCLYGSDEHNACVPKTCPSSYFHCDNGNCIHRAWLCDRDNDCGDMSDEKDCPTQPFRCPSWQWQCLGHNICVNLSVVCDGIFDCPNGTDESPLC

SEQ ID NO: 46680 - protein, 75 aa, Homo sapiens
  MAP TO AC007556.2; EXPRESSED IN PLACENTA, SIGNAL = 0.71; EXPRESSED IN BT474, SIGNAL = 0.64; EXPRESSED IN HELA, SIGNAL = 1.4; EXPRESSED IN ADULT LIVER, SIGNAL = 0.88; EST_HUMAN HIT: BE765273.1, EVALUE 6.00e-27; SWISSPROT HIT: P18210, EVALUE 2.20e-01
PGLLVCATQMNFSAKKMVSASRTSGNVMGIQTASMDLMSTMPVSPRLALHHISTVTTETASTGHGSVIGTMTAGI

SEQ ID NO: 46681 - protein, 81 aa, Homo sapiens
  MAP TO AB016897.1; EXPRESSED IN PLACENTA, SIGNAL = 0.96; EXPRESSED IN BT474, SIGNAL =   1; EXPRESSED IN FETAL LIVER, SIGNAL = 0.84; EXPRESSED IN HELA, SIGNAL = 0.64; EXPRESSED IN ADULT LIVER, SIGNAL = 0.78; EXPRESSED IN HBL100, SIGNAL = 0.82; EXPRESSED IN LUNG, SIGNAL = 0.95; EST_HUMAN HIT: BE897308.1, EVALUE 1.00e-04; SWISSPROT HIT: P55196, EVALUE 2.00e-43
QPHHCDLTNMDGVVTVTPRSMDAETYVEGQRISETTMLQSGMKVQFGASHVFKFVDPSQDHALAKRSVDGGLMVKGPRHKP

SEQ ID NO: 46682 - protein, 78 aa, Homo sapiens
  MAP TO AC007344.2; EXPRESSED IN ADULT LIVER, SIGNAL = 0.74; EXPRESSED IN PLACENTA, SIGNAL = 0.59; EXPRESSED IN LUNG, SIGNAL = 0.64; EXPRESSED IN HELA, SIGNAL = 0.81; EXPRESSED IN FETAL LIVER, SIGNAL = 0.6; SWISSPROT HIT: O05386, EVALUE 4.80e+00
FDKHLCLPPDLLFHLRFWGLAGNEAQEGAFFFFEAMRMRAKQQIDLESRGEVAEDARDTGEGMLRDKQLQVFLCTWGK

SEQ ID NO: 46683 - protein, 57 aa, Homo sapiens
  MAP TO AC000029.14; EXPRESSED IN PLACENTA, SIGNAL = 0.72; EXPRESSED IN HELA, SIGNAL = 1.2; EXPRESSED IN ADULT LIVER, SIGNAL = 0.78; EST_HUMAN HIT: AA781836.1, EVALUE 1.00e-26; SWISSPROT HIT: Q9Z3S0, EVALUE 1.20e+00
GNIFINVILGPRPMGLPVGNALSLFMMILEKQQLCLLLDGPSPAASGKVDDAKDLEH

SEQ ID NO: 46684 - protein, 38 aa, Homo sapiens
  MAP TO AC005076.2; EXPRESSED IN ADULT LIVER, SIGNAL = 0.65; EST_HUMAN HIT: AW665121.1, EVALUE 8.00e-15
LSMSTVEEDSDTVTVETVNSVTLTQDTEGNLILHCPQN

SEQ ID NO: 46685 - protein, 69 aa, Homo sapiens
  MAP TO AC005060.2; EXPRESSED IN ADULT LIVER, SIGNAL = 0.73; SWISSPROT HIT: P21440, EVALUE 3.00e-24; EST_HUMAN HIT: BF313560.1, EVALUE 7.00e-21
LFDGVDAKELNVQWLRSQIAIVPQEPVLFNCSIAENIAYGDNSRVVPLDEIKEAANAANIHSFIEGLPE

SEQ ID NO: 46686 - protein, 44 aa, Homo sapiens
  MAP TO AC008278.1; EXPRESSED IN FETAL LIVER, SIGNAL = 0.76; EXPRESSED IN BT474, SIGNAL = 0.74; EXPRESSED IN HELA, SIGNAL = 0.6; EXPRESSED IN ADULT LIVER, SIGNAL = 0.66; SWISSPROT HIT: Q55563, EVALUE 4.10e-01
PKDPKPQWRRVAWSYDCTLLAYAESTGTVRVFDLMGSELFVISP

SEQ ID NO: 46687 - protein, 46 aa, Homo sapiens
  MAP TO AL009175.1; EXPRESSED IN PLACENTA, SIGNAL = 0.89; EXPRESSED IN BT474, SIGNAL = 0.9; EXPRESSED IN ADULT LIVER, SIGNAL = 1.5; EXPRESSED IN FETAL LIVER, SIGNAL = 0.93; EXPRESSED IN LUNG, SIGNAL = 0.94; EST_HUMAN HIT: BE146536.1, EVALUE 4.60e+00; SWISSPROT HIT: Q9QP77, EVALUE 6.00e+00
IACRSVLAVGTFFCVHILQGAEDGDDAVDNLLCARHCFKYFHFYVT

SEQ ID NO: 46688 - protein, 48 aa, Homo sapiens
  MAP TO AL009175.1; EXPRESSED IN PLACENTA, SIGNAL = 0.89; EXPRESSED IN BT474, SIGNAL = 0.9; EXPRESSED IN ADULT LIVER, SIGNAL = 1.5; EXPRESSED IN FETAL LIVER, SIGNAL = 0.93; EXPRESSED IN LUNG, SIGNAL = 0.94; SWISSPROT HIT: O83746, EVALUE 7.90e+00
MLLITYYVLGIASNTFISMLQVKKMSFRVTSVKLLTEVMLLVKGTTTI

SEQ ID NO: 46689 - protein, 286 aa, Homo sapiens
  MAP TO AC007245.3; EXPRESSED IN HELA, SIGNAL = 0.67; EXPRESSED IN PLACENTA, SIGNAL = 0.69; EXPRESSED IN BT474, SIGNAL = 0.75; EXPRESSED IN HBL100, SIGNAL = 0.81; EXPRESSED IN FETAL LIVER, SIGNAL = 0.58; EXPRESSED IN LUNG, SIGNAL = 0.73; EXPRESSED IN BONE MARROW, SIGNAL = 0.88; EXPRESSED IN ADULT LIVER, SIGNAL = 0.68; SWISSPROT HIT: Q60563, EVALUE 4.30e+00; EST_HUMAN HIT: AV751969.1, EVALUE 8.10e+00
TYSVSNIEDGSPEGWDLTRKDIKKNAIDTPNHDMIFYPAQDSTDAEEIQCETVLNALVGDRDKNQAVLSIKLEVEAQSRTDLNYSLGRDANRRDLCSCKAESSLIEGSERTVTENCSHTVNLPRIAEIDSWGTDPGQIWQPSLDSAMNNLDITGFSGIPDGQASGFASCLDSINHWPIRDTEGLDNSWTHSDVVEHKEELKVDLLAGDCREQAIASCWEQSQEIARPLILGTSWNASTESSASSRDQDINNSDLSEDEIANQRYGLLYQEIEADKDEVLTLVCSID

SEQ ID NO: 46690 - protein, 276 aa, Homo sapiens
  MAP TO AC007245.3; EXPRESSED IN HELA, SIGNAL = 0.67; EXPRESSED IN PLACENTA, SIGNAL = 0.69; EXPRESSED IN BT474, SIGNAL = 0.75; EXPRESSED IN HBL100, SIGNAL = 0.81; EXPRESSED IN FETAL LIVER, SIGNAL = 0.58; EXPRESSED IN LUNG, SIGNAL = 0.73; EXPRESSED IN BONE MARROW, SIGNAL = 0.88; EXPRESSED IN ADULT LIVER, SIGNAL = 0.68; SWISSPROT HIT: Q9ZM58, EVALUE 3.50e-01; EST_HUMAN HIT: W26179.1, EVALUE 9.00e-48
TDSSESLSLCNLIMEETPDSGLAEEIQRSQNDIGAFTWGPDASTDRVSQEVTSGGFGEDSACPSETEQDIRLSTSLLSSADWPTVAEESEHAPGPAFPGGNEQLPPKPAPEAGVAIAACVEMEQLYDPLDSDMPAMDTAGLFKESHEDMKKSDEEEEKQKMEDSLWAGVEACQKVDTGAIDIKTLEGTEEFEEKACERTGNRVVELLNTIGKEDHKTLKINEVETRKDLRAGYKESTNANENYFEKTDLLEKDMEGGDMAKELSDRDQGLHDGIQK

SEQ ID NO: 46691 - protein, 57 aa, Homo sapiens
  MAP TO AC010087.2; EXPRESSED IN ADULT LIVER, SIGNAL =   1; EST_HUMAN HIT: BE909279.1, EVALUE 1.20e+00; SWISSPROT HIT: Q00993, EVALUE 7.70e+00
IKVSSLGLWLLLHWAYGSSLQLSHSCCPLGKAWWLLLRCWKHLQVQAATPSSTLPTA

SEQ ID NO: 46692 - protein, 41 aa, Homo sapiens
  MAP TO AP000175.1; EXPRESSED IN ADULT LIVER, SIGNAL = 6.1; SWISSPROT HIT: P32589, EVALUE 1.40e-01; EST_HUMAN HIT: AA430310.1, EVALUE 1.00e-06
LDLIRKRSLTEVAKTYGKDESSIHEIVKKEKEVCASFAVSA

SEQ ID NO: 46693 - protein, 316 aa, Homo sapiens
  MAP TO AL096755.1; EXPRESSED IN PLACENTA, SIGNAL = 1.9; EXPRESSED IN ADULT LIVER, SIGNAL = 0.66; EST_HUMAN HIT: AV759561.1, EVALUE 2.00e-07; SWISSPROT HIT: O10341, EVALUE 8.00e-06
HPLREATPHQLLVPVSINKQSPPPRGHSPPKMTSRACLYQQAATPSARPLPPKTTSHACLYQQAATPSARPLPTKDNFSCLSLSTRSHPLREATPPQRRLLLPVSINNPSARPLPPKTTSRARLYQQAATPSARPLPTKDDFSCPSLSTSSHPLCEATPPKMTSSACLYQHAATPSPLLSTATDPDLEQANEGDAEEAEAVATRTHHRTPPGELLQAQHPPGGDTGAHFLNRTVKGMHVAFLTALTGISRSYSAAGTRGRVAVGDEHIHPGVASRQKCLCTSKTPRLSERSLGWDWVSCAYILVIPAQLSVCRVET

SEQ ID NO: 46694 - protein, 46 aa, Homo sapiens
  MAP TO AP000159.1; EXPRESSED IN ADULT LIVER, SIGNAL = 0.67; EST_HUMAN HIT: BE548809.1, EVALUE 4.00e+00; SWISSPROT HIT: O53597, EVALUE 6.00e+00
TAEWLVRGRGEPGWQQQKMGSPPPGEARQDLVTAALSAFCNWQPQT

SEQ ID NO: 46695 - protein, 56 aa, Homo sapiens
  MAP TO AC010876.1; EXPRESSED IN LUNG, SIGNAL = 0.95; EXPRESSED IN ADULT LIVER, SIGNAL = 0.9; EXPRESSED IN HELA, SIGNAL = 1.1; EST_HUMAN HIT: BF686405.1, EVALUE 2.00e-25; SWISSPROT HIT: Q60272, EVALUE 1.50e+00
IAAAENNGNESGVRELLKRIVQKENWFSAFLNVLRQTGNNELVQELTGSDCSESNA

SEQ ID NO: 46696 - protein, 20 aa, Homo sapiens
  MAP TO AF130342.1; EXPRESSED IN ADULT LIVER, SIGNAL = 0.87
RKNGKYTGPEEADNRRSNKE

SEQ ID NO: 46697 - protein, 49 aa, Homo sapiens
  MAP TO AC010879.1; EXPRESSED IN ADULT LIVER, SIGNAL = 0.9; EST_HUMAN HIT: BE465446.1, EVALUE 4.00e-22; SWISSPROT HIT: Q63880, EVALUE 6.00e-10
IHEQNSKKPVMVYIHGGSYMEGTGNMIDGSILASYGNVIVITINYRLGI

SEQ ID NO: 46698 - protein, 29 aa, Homo sapiens
  MAP TO AC010879.1; EXPRESSED IN ADULT LIVER, SIGNAL = 0.9; EST_HUMAN HIT: BF222878.1, EVALUE 2.00e-08
FFQIFMNRTVRSLLWSISMGDLTWREPVT

SEQ ID NO: 46699 - protein, 49 aa, Homo sapiens
  MAP TO AC009298.1; EXPRESSED IN HBL100, SIGNAL = 0.68; EXPRESSED IN BONE MARROW, SIGNAL = 0.73; EXPRESSED IN ADULT LIVER, SIGNAL = 0.7; EXPRESSED IN BT474, SIGNAL = 0.87; EXPRESSED IN FETAL LIVER, SIGNAL = 0.59; EST_HUMAN HIT: AV715285.1, EVALUE 3.00e-20; SWISSPROT HIT: Q01147, EVALUE 2.00e-21
VSMPAAHATSSAPTVTLVQLPNGQTVQVHGVIQAAQPSVIQSPQVQTVQ

SEQ ID NO: 46700 - protein, 38 aa, Homo sapiens
  MAP TO AC009299.1; EXPRESSED IN BONE MARROW, SIGNAL = 0.72; EXPRESSED IN FETAL LIVER, SIGNAL = 0.68; EXPRESSED IN ADULT LIVER, SIGNAL = 0.68; EST_HUMAN HIT: AA484829.1, EVALUE 2.00e-16
GNIEKTFWDLKEEFHKICMLAKAQKDHLSKLNIPDTAT

SEQ ID NO: 46701 - protein, 54 aa, Homo sapiens
  MAP TO AL034424.9; EXPRESSED IN PLACENTA, SIGNAL = 0.7; EXPRESSED IN ADULT LIVER, SIGNAL = 0.87; EST_HUMAN HIT: AL449786.1, EVALUE 2.00e-18; SWISSPROT HIT: P70545, EVALUE 2.00e-10
ESGLSVWIGGQLHPLENVPPALAVLLITVVIAFFTEFASNTATIIIFLPVLAEL

SEQ ID NO: 46702 - protein, 47 aa, Homo sapiens
  MAP TO AF064863.1; EXPRESSED IN LUNG, SIGNAL =   1; EXPRESSED IN BONE MARROW, SIGNAL =   1; EXPRESSED IN HBL100, SIGNAL =   1; EXPRESSED IN PLACENTA, SIGNAL = 0.91; EXPRESSED IN ADULT LIVER, SIGNAL =   1; SWISSPROT HIT: Q10343, EVALUE 6.00e+00
FFPPSVVLEPPANKVIKAVVFKSDLKASQVELLDETGEHGAQGRGRR

SEQ ID NO: 46703 - protein, 17 aa, Homo sapiens
  MAP TO AC009492.2; EXPRESSED IN ADULT LIVER, SIGNAL =  13; EXPRESSED IN FETAL LIVER, SIGNAL =   1; EXPRESSED IN HBL100, SIGNAL = 0.98
LKLELRDACSRFIQPKM

SEQ ID NO: 46704 - protein, 122 aa, Homo sapiens
  MAP TO AL031585.1; EXPRESSED IN PLACENTA, SIGNAL =  19; EXPRESSED IN ADULT LIVER, SIGNAL = 2.7; EXPRESSED IN BT474, SIGNAL =  15; EXPRESSED IN FETAL LIVER, SIGNAL =   3; EXPRESSED IN LUNG, SIGNAL = 4.2; EXPRESSED IN HBL100, SIGNAL =   5; EXPRESSED IN HELA, SIGNAL =  10; EST_HUMAN HIT: BE621583.1, EVALUE 1.00e-52; SWISSPROT HIT: P05783, EVALUE 8.00e-40
EEEQRRGSKRPTSPDCQLWVDRGGRCPQISDLAKNMADSRAQYDKLARKNREELDKYWSQQIEESTRVVTTQSAKVGAAEMTLTELRHRVQSLEIDLDSTRNLKASLENSLREVEARYALQM

SEQ ID NO: 46705 - protein, 27 aa, Homo sapiens
  MAP TO AL035689.17; EXPRESSED IN FETAL LIVER, SIGNAL = 0.87; EXPRESSED IN ADULT LIVER, SIGNAL = 0.99; EST_HUMAN HIT: AW296073.1, EVALUE 4.00e-09
PSNCSKPSPGDQLESSHILTLLCDSSK

SEQ ID NO: 46706 - protein, 120 aa, Homo sapiens
  MAP TO AC007055.3; EXPRESSED IN PLACENTA, SIGNAL = 0.69; EXPRESSED IN BT474, SIGNAL = 0.74; EXPRESSED IN BONE MARROW, SIGNAL = 0.66; EXPRESSED IN HBL100, SIGNAL = 0.9; EXPRESSED IN FETAL LIVER, SIGNAL = 0.62; EXPRESSED IN ADULT LIVER, SIGNAL = 1.1; SWISSPROT HIT: P15312, EVALUE 2.40e-01; EST_HUMAN HIT: AU121422.1, EVALUE 8.00e-62
TGKDSDVLIRASEQQIGSLDSPSGMLMNPVEDATGDQNGICFQSEESKARACSETEESNTCCSDWQRHFDVALGRMVYVNKMTGLSTFIAPTEDIQAACTKDLTTVAVDVVLENGKYVVF

SEQ ID NO: 46707 - protein, 36 aa, Homo sapiens
  MAP TO AC006979.2; EXPRESSED IN PLACENTA, SIGNAL = 0.93; EXPRESSED IN LUNG, SIGNAL = 0.65; EXPRESSED IN ADULT LIVER, SIGNAL = 0.66
TFFPLGCPRLMLKIMSQKKLQKRTSLALSPPLPRAY

SEQ ID NO: 46708 - protein, 360 aa, Homo sapiens
  MAP TO AL031276.1; EXPRESSED IN BT474, SIGNAL = 1.1; EXPRESSED IN ADULT LIVER, SIGNAL = 1.1; EXPRESSED IN LUNG, SIGNAL =   2; EXPRESSED IN BONE MARROW, SIGNAL =   1; EXPRESSED IN PLACENTA, SIGNAL = 1.1; SWISSPROT HIT: Q07878, EVALUE 1.60e-01; EST_HUMAN HIT: BF362311.1, EVALUE 2.00e-54
NSRRKSRDGSASEETQFSDDEYKTPLATPPNTPPPESSSSNGEKTPPFSGVEFSEEQLQAHLMSTKMYERYSLSFMDLQIMVGRVKDNWKHVQDIDVGPTHVVEKFNVHLQLERRLIYTSDPKYPGAVLSGNLPDLKIHINEDKISALKNCFALLTTPEMKTSDTQIKEKIFPQEEQRGSLQDSVMNLTQSIVLLEQHTREVLVESQLLLAEFKVNCMQLGVESNGRYISVLKVFGTNAHFVKRPYDAEVSLTVHGLLLVDTMQTYGADFDLLMASHKNLSFDIPTGSLRDSRAQSPVSGPNVAHLTDGATLNDRSATSVSLDKILTKEQESLIKLEYQFVSSECPSMNLDSTLQVISLQ

SEQ ID NO: 46709 - protein, 46 aa, Homo sapiens
  MAP TO AC012113.1; EXPRESSED IN HELA, SIGNAL = 0.95; EXPRESSED IN ADULT LIVER, SIGNAL = 1.1; EXPRESSED IN BT474, SIGNAL = 0.98; EXPRESSED IN FETAL LIVER, SIGNAL = 1.1; EXPRESSED IN LUNG, SIGNAL =   1; SWISSPROT HIT: P36291, EVALUE 7.90e+00
EYGQYVMLVKKVTLFPLKHEDVVKETLVDLASRPPPLPIIQQNLEC

SEQ ID NO: 46710 - protein, 34 aa, Homo sapiens
  MAP TO AC012113.1; EXPRESSED IN HELA, SIGNAL = 0.95; EXPRESSED IN ADULT LIVER, SIGNAL = 1.1; EXPRESSED IN BT474, SIGNAL = 0.98; EXPRESSED IN FETAL LIVER, SIGNAL = 1.1; EXPRESSED IN LUNG, SIGNAL =   1
LLNDGQRGWAGSQINKSFFYYILMLKRKQGDFLY

SEQ ID NO: 46711 - protein, 35 aa, Homo sapiens [sequence omitted]

SEQ ID NO: 46712 - protein, 46 aa, Homo sapiens
  MAP TO AC012072.1; EXPRESSED IN ADULT LIVER, SIGNAL = 0.97; EXPRESSED IN FETAL LIVER, SIGNAL = 1.2; EXPRESSED IN HELA, SIGNAL = 0.96; EST_HUMAN HIT: AU124317.1, EVALUE 3.00e+00
SAPYKTGSKGTKAQRARQLGLEGAARALLEKPGELSLLSYIRPDVK

SEQ ID NO: 46713 - protein, 20 aa, Homo sapiens
  MAP TO AC012072.1; EXPRESSED IN ADULT LIVER, SIGNAL = 0.97; EXPRESSED IN FETAL LIVER, SIGNAL = 1.2; EXPRESSED IN HELA, SIGNAL = 0.96
LLHIKLEAKGLKPREQDSWA

SEQ ID NO: 46714 - protein, 70 aa, Homo sapiens
  MAP TO AL022100.13; EXPRESSED IN BT474, SIGNAL = 1.2; EXPRESSED IN ADULT LIVER, SIGNAL = 0.97; EST_HUMAN HIT: BE779088.1, EVALUE 1.90e+00; SWISSPROT HIT: P03949, EVALUE 6.80e+00
APQWRKQSQGASFEQGLSEPASNSPKFYTTCNKVTPYPVPAHNKPTLKYNNNKKEEKKKNKLLMLPAACN

SEQ ID NO: 46715 - protein, 31 aa, Homo sapiens
  MAP TO AF179296.1; EXPRESSED IN ADULT LIVER, SIGNAL = 0.91; EST_HUMAN HIT: AA746867.1, EVALUE 3.00e-12
SSVHCTWTLDPKGSLVASSWFCPLSTSSAKE

SEQ ID NO: 46716 - protein, 52 aa, Homo sapiens
  MAP TO AP000427.1; EXPRESSED IN ADULT LIVER, SIGNAL = 0.91; EST_HUMAN HIT: W95029.1, EVALUE 2.50e+00; SWISSPROT HIT: O13831, EVALUE 6.80e-01
ENMEDVHITIAEAKCDVEYSNKTHIICMTDAHTLSGWAPVCVHIRGVGMAKL

SEQ ID NO: 46717 - protein, 28 aa, Homo sapiens
  MAP TO AC007603.1; EXPRESSED IN ADULT LIVER, SIGNAL = 0.74
GEAGNSPAEKGFHTMHLICPTERNSTRK

SEQ ID NO: 46718 - protein, 17 aa, Homo sapiens
  MAP TO AC007603.1; EXPRESSED IN ADULT LIVER, SIGNAL = 0.74
RERQETHQQKRASTQCI

SEQ ID NO: 46719 - protein, 35 aa, Homo sapiens
  MAP TO AC004624.6; EXPRESSED IN LUNG, SIGNAL = 0.77; EXPRESSED IN HELA, SIGNAL = 0.65; EXPRESSED IN ADULT LIVER, SIGNAL = 0.71; EXPRESSED IN PLACENTA, SIGNAL = 0.63; EXPRESSED IN BONE MARROW, SIGNAL = 0.65
MEYVLFVLYFSFFLCLCALVCLYFSGCQEMTYKHE

SEQ ID NO: 46720 - protein, 22 aa, Homo sapiens
  MAP TO AC004624.6; EXPRESSED IN LUNG, SIGNAL = 0.77; EXPRESSED IN HELA, SIGNAL = 0.65; EXPRESSED IN ADULT LIVER, SIGNAL = 0.71; EXPRESSED IN PLACENTA, SIGNAL = 0.63; EXPRESSED IN BONE MARROW, SIGNAL = 0.65
CTSLSSCVSVPWCACTSLAARR

SEQ ID NO: 46721 - protein, 170 aa, Homo sapiens
  MAP TO AL021579.1; EXPRESSED IN HBL100, SIGNAL = 1.2; EXPRESSED IN HELA, SIGNAL = 0.99; EXPRESSED IN PLACENTA, SIGNAL = 1.3; EXPRESSED IN ADULT LIVER, SIGNAL = 1.1; EXPRESSED IN BT474, SIGNAL = 1.2; EXPRESSED IN LUNG, SIGNAL = 1.1; EXPRESSED IN BONE MARROW, SIGNAL = 0.96; SWISSPROT HIT: P48634, EVALUE 1.00e-06; EST_HUMAN HIT: BE046887.1, EVALUE 9.00e-28
HPPPDRQAVPGRPGPFPSKQQVADEDEIWKQRRRQQSEISAAVERARKRREEEERRMEEQRKAACAEKLKRLDEKLGILEKQPSPEEIREREREKEREREKELEKEQEQEREKEREKDRERQQEKEKELEKEQEKQREMEKERKQEKEKELERQKEKEKELQKMKEQEKE

SEQ ID NO: 46722 - protein, 34 aa, Homo sapiens
  MAP TO AP000162.1; EXPRESSED IN BONE MARROW, SIGNAL =   1; EXPRESSED IN FETAL LIVER, SIGNAL = 0.77; EXPRESSED IN ADULT LIVER, SIGNAL = 0.86; EXPRESSED IN PLACENTA, SIGNAL = 0.81; EXPRESSED IN LUNG, SIGNAL = 1.3; EST_HUMAN HIT: AW242717.1, EVALUE 1.00e-13; SWISSPROT HIT: P48972, EVALUE 1.60e+00
STKEKFSCLTIQEMFSDADVCKVRWGHEEEEELK

SEQ ID NO: 46723 - protein, 77 aa, Homo sapiens
  MAP TO AC005484.2; EXPRESSED IN BONE MARROW, SIGNAL = 0.81; EXPRESSED IN LUNG, SIGNAL = 0.71; EXPRESSED IN ADULT LIVER, SIGNAL = 1.1; SWISSPROT HIT: P82266, EVALUE 8.50e-01; EST_HUMAN HIT: BE220437.1, EVALUE 6.00e-37
KLIKTDESVVDRAKANASLWEARLEVTELSRIKYRDTSRILAKSNEDLKKKQCKMEKDIMSVLSYLKKQDQEKDNMV

SEQ ID NO: 46724 - protein, 99 aa, Homo sapiens
  MAP TO AL035696.14; EXPRESSED IN BT474, SIGNAL = 0.63; EXPRESSED IN BONE MARROW, SIGNAL = 0.71; EXPRESSED IN ADULT LIVER, SIGNAL = 0.92; EXPRESSED IN PLACENTA, SIGNAL = 0.69; EXPRESSED IN FETAL LIVER, SIGNAL = 0.57; EST_HUMAN HIT: AF109301.1, EVALUE 2.00e-16; SWISSPROT HIT: P40957, EVALUE 6.00e-03
LMNLQQSWKLYLQKCLYLAKKNQVIQQELLSMKEVQQKCKKLEEVNKILEQEVVNLKTHEKNMVEFGDVEECKLQLEERAGQEIEKLEEINLQVSFFNQ

SEQ ID NO: 46725 - protein, 20 aa, Homo sapiens
  MAP TO AC004832.2; EXPRESSED IN BONE MARROW, SIGNAL = 1.7; EXPRESSED IN FETAL LIVER, SIGNAL = 1.1; EXPRESSED IN ADULT LIVER, SIGNAL = 0.66; EST_HUMAN HIT: W86866.1, EVALUE 4.00e-04
FFGLLEENYPETLKFMLIVK

SEQ ID NO: 46726 - protein, 53 aa, Homo sapiens
  MAP TO AL033531.7; EXPRESSED IN HBL100, SIGNAL = 1.7; EXPRESSED IN HELA, SIGNAL = 1.2; EXPRESSED IN BONE MARROW, SIGNAL = 1.1; EXPRESSED IN FETAL LIVER, SIGNAL = 0.91; EXPRESSED IN ADULT LIVER, SIGNAL = 0.97; EXPRESSED IN BT474, SIGNAL =   1; EST_HUMAN HIT: AI192675.1, EVALUE 2.90e-02
NKFVFSLTLSNFLLSVLVLPFVVTSSIRREWIFGVVWCNFSALLYLLISSASM

SEQ ID NO: 46727 - protein, 25 aa, Homo sapiens
  MAP TO AL033531.7; EXPRESSED IN HBL100, SIGNAL = 1.7; EXPRESSED IN HELA, SIGNAL = 1.2; EXPRESSED IN BONE MARROW, SIGNAL = 1.1; EXPRESSED IN FETAL LIVER, SIGNAL = 0.91; EXPRESSED IN ADULT LIVER, SIGNAL = 0.97; EXPRESSED IN BT474, SIGNAL =   1; EST_HUMAN HIT: AI929343.1, EVALUE 5.00e-09
CSAHPTPRCTDHEPQLLPQLQEGAE

SEQ ID NO: 46728 - protein, 71 aa, Homo sapiens
  MAP TO AC011592.2; EXPRESSED IN BONE MARROW, SIGNAL = 0.94; EXPRESSED IN ADULT LIVER, SIGNAL = 0.97; EST_HUMAN HIT: AV723976.1, EVALUE 6.00e-21; SWISSPROT HIT: Q60376, EVALUE 4.30e-02
GEFKIAVLRKLKEIQDNKEKDFRILSDKFNEEIEIIKKNQSEIQGLKNAIHILTNASESFNSRIDQAEEII

SEQ ID NO: 46729 - protein, 30 aa, Homo sapiens
  MAP TO AL035670.16; EXPRESSED IN HBL100, SIGNAL =   1; EXPRESSED IN ADULT LIVER, SIGNAL = 1.1; EST_HUMAN HIT: BF092337.1, EVALUE 2.00e-10; SWISSPROT HIT: P30437, EVALUE 5.60e-01
VAFWTLAYVLSHPDIHKAIMEGISSVFGKA

SEQ ID NO: 46730 - protein, 18 aa, Homo sapiens
  MAP TO AL035670.16; EXPRESSED IN HBL100, SIGNAL =   1; EXPRESSED IN ADULT LIVER, SIGNAL = 1.1; EST_HUMAN HIT: BF092337.1, EVALUE 3.00e-03
ALPNTEDMPSIMALWISG

SEQ ID NO: 46731 - protein, 36 aa, Homo sapiens
  MAP TO AC008248.1; EXPRESSED IN FETAL LIVER, SIGNAL =   8; EXPRESSED IN ADULT LIVER, SIGNAL = 0.96
VHIKLAETVIQDKYIFSALEVVLVIQTASQPVSAVP

SEQ ID NO: 46732 - protein, 42 aa, Homo sapiens
  MAP TO AC007397.21; EXPRESSED IN HELA, SIGNAL = 4.9; EXPRESSED IN ADULT LIVER, SIGNAL = 0.69; EXPRESSED IN HBL100, SIGNAL = 2.6; EST_HUMAN HIT: R78539.1, EVALUE 9.30e+00
RHCQDWARSEPQKCHTLHIHLQTLSISTGSPEGGLSQPPGET

SEQ ID NO: 46733 - protein, 84 aa, Homo sapiens
  MAP TO AL031073.1; EXPRESSED IN ADULT LIVER, SIGNAL = 0.98; EXPRESSED IN BT474, SIGNAL = 1.1; EXPRESSED IN FETAL LIVER, SIGNAL = 0.98; EST_HUMAN HIT: BF026372.1, EVALUE 1.00e-44
EFIIWRRTVGHLPILQVMSLHPNFSEELPRLPIDEVLPPSIYPYCIQHFPDDLLRGTVALYEDHTQNNNQEAVLGHALIITTLI

SEQ ID NO: 46734 - protein, 54 aa, Homo sapiens
  MAP TO AC010809.2; EXPRESSED IN ADULT LIVER, SIGNAL = 0.98; EXPRESSED IN LUNG, SIGNAL = 1.1; EXPRESSED IN BONE MARROW, SIGNAL = 0.92; EST_HUMAN HIT: BE255659.1, EVALUE 8.40e-01; SWISSPROT HIT: P08973, EVALUE 2.30e-01
ENNEDCVNLFKADEYMNEAKNLHMFISNPFCDLLFLRYYHKSSITFTHVCMWRT

SEQ ID NO: 46735 - protein, 78 aa, Homo sapiens
  MAP TO D83253.1; EXPRESSED IN ADULT LIVER, SIGNAL = 0.95; SWISSPROT HIT: Q58533, EVALUE 1.50e+00
IFYVVCGKQKNKEIKNKRKMWLGKWALSAVISMKDQEFTEMLFVLLMSKVTSKIKVNNGLKVNIDVYGISIIKNWFNI

SEQ ID NO: 46736 - protein, 48 aa, Homo sapiens
  MAP TO AL096771.11; EXPRESSED IN HBL100, SIGNAL = 1.2; EXPRESSED IN HELA, SIGNAL = 1.3; EXPRESSED IN ADULT LIVER, SIGNAL = 1.1; EXPRESSED IN BT474, SIGNAL = 1.1; EST_HUMAN HIT: AU120639.1, EVALUE 4.00e-22; SWISSPROT HIT: Q99715, EVALUE 3.00e-23
TRGQEITVRGSETSHCFTGLSPDTDYGVTVFVQTPNLEGPGVSVKEHT

SEQ ID NO: 46737 - protein, 32 aa, Homo sapiens
  MAP TO AL109614.15; EXPRESSED IN ADULT LIVER, SIGNAL =   1
MLTLISKEEIQISPRSPGTILLVMLPKMALMS

SEQ ID NO: 46738 - protein, 17 aa, Homo sapiens
  MAP TO AJ239320.2; EXPRESSED IN LUNG, SIGNAL = 2.8; EXPRESSED IN BONE MARROW, SIGNAL = 8.4; EXPRESSED IN ADULT LIVER, SIGNAL =   1; EXPRESSED IN BT474, SIGNAL = 0.99; EXPRESSED IN HBL100, SIGNAL = 0.95
AVAGEQVAVGLVKGKTF

SEQ ID NO: 46739 - protein, 148 aa, Homo sapiens; identical to SEQ ID NO: 41723
  MAP TO AL049829.2; EXPRESSED IN FETAL LIVER, SIGNAL = 0.64; EXPRESSED IN ADULT LIVER, SIGNAL = 0.66; EXPRESSED IN BT474, SIGNAL = 1.3; EXPRESSED IN BONE MARROW, SIGNAL = 0.69; EXPRESSED IN HBL100, SIGNAL = 1.1; EXPRESSED IN HELA, SIGNAL = 0.64; EST_HUMAN HIT: AW057621.1, EVALUE 1.00e-72; EST_HUMAN HIT: AW057621.1, EVALUE 1.00e-72; SWISSPROT HIT: P48002, EVALUE 1.40e-02

SEQ ID NO: 46740 - protein, 777 aa, Homo sapiens
  MAP TO AC004889.1; EXPRESSED IN LUNG, SIGNAL = 1.5; EXPRESSED IN PLACENTA, SIGNAL = 1.8; EXPRESSED IN HELA, SIGNAL = 1.3; EXPRESSED IN BT474, SIGNAL = 1.6; EXPRESSED IN FETAL LIVER, SIGNAL = 1.3; EXPRESSED IN ADULT LIVER, SIGNAL = 1.6; EST_HUMAN HIT: BF678896.1, EVALUE 5.00e-93; SWISSPROT HIT: Q99323, EVALUE 5.00e-10
MEEPGATPQPYLGLVLEELRRVVAALPESMRPDENPYGFPSELVVCAAVIGFFVVLLFLWRSFRSVRSRLYVGREQKLGATLSGLIEEKCKLLEKFSLIQKEYEGYEVESSLEDASFEKAAAEEARSLEATCEKLNRSNSELEDEILCLEKDLKEEKSKHSQQDELMADISKSIQSLEDESKSLKSQIAEAKIICKTFKMSEERRAIAIKDALNENSQLQTSHKQLFQQEAEVWKGQVSELNKQKITFEDSKVHAEQVLNDKENHIKTLTGHLPMMKDQAAVLEEDTTDDDNLELEVNSQWENGANLDDPLKGALKKLIHAAKLNVSLKSLEGERNHIIIQLSEVDKTKEELTEHIKNLQTQQASLQSENIYFESENQKLQQKLKIMTEFYQENEMKLYRKLTVEENYRIEEEEKLSRVEEKISRATEGLETYRKLAKDLEEELERTVHFYQKQVISYEKRGHDNWLAARTAERNLSDLRKENAHNKQKLTETELKFELLEKDPNALDVSNTAFGREHSPCSPSPLGRPSSETRAFPSPQTLLEDPLRLSPVLPGGGGRGPSSPGNPLDHQITNERGEPSYDRLIDPHRAPSDTGSLSSPVEQDRRMMFPPPGQSYPDSTLPPQREDRFYSNSERLSGPAEPRSFKMTSLDKMDRSMPSEMESSRNDAKDDLGNLNVPDSSLPAENEATGPGFIPPPLAPVRGPLFPVDTRGPFMRRGPPFPPPPPGTMFGASRGYFPPRDFPGPPHAPFAMRNIYPPRGLPPYLHPRPGFYPNPTF

SEQ ID NO: 46741 - protein, 30 aa, Homo sapiens
  MAP TO AC004889.1; EXPRESSED IN LUNG, SIGNAL = 1.5; EXPRESSED IN PLACENTA, SIGNAL = 1.8; EXPRESSED IN HELA, SIGNAL = 1.3; EXPRESSED IN BT474, SIGNAL = 1.6; EXPRESSED IN FETAL LIVER, SIGNAL = 1.3; EXPRESSED IN ADULT LIVER, SIGNAL = 1.6; EST_HUMAN HIT: BE622114.1, EVALUE 4.00e-13; SWISSPROT HIT: P37677, EVALUE 5.00e+00
LWRSLVLPLSPTWGWSWRSYAELWQHYLRV

SEQ ID NO: 46742 - protein, 66 aa, Homo sapiens
  MAP TO AC004895.2; EXPRESSED IN FETAL LIVER, SIGNAL = 0.93; EXPRESSED IN LUNG, SIGNAL = 0.9; EXPRESSED IN ADULT LIVER, SIGNAL = 0.74; EXPRESSED IN PLACENTA, SIGNAL = 0.63; EXPRESSED IN BONE MARROW, SIGNAL = 0.98; EXPRESSED IN HBL100, SIGNAL = 0.88; EXPRESSED IN BT474, SIGNAL = 1.1; EXPRESSED IN HELA, SIGNAL = 0.77; SWISSPROT HIT: Q61068, EVALUE 6.00e-14; EST_HUMAN HIT: AW504799.1, EVALUE 9.00e-35
LGDGIAPPQKVLFPSEKICLKWQQTHRVGAGLQNLGNTCFANAALQCLTYTPPLANYMLSHEHSKT

SEQ ID NO: 46743 - protein, 77 aa, Homo sapiens
  MAP TO AP000039.1; EXPRESSED IN HELA, SIGNAL =  16; EXPRESSED IN ADULT LIVER, SIGNAL =   1; SWISSPROT HIT: P56926, EVALUE 2.70e+00; EST_HUMAN HIT: BE144396.1, EVALUE 5.60e+00
SGKYVTEVLNNISVLDQHYDNYFNIIDFYCELHLLYREYLIRQTSTYAKNASYSPSSARKFRRIRAIILSSSYIFGA

SEQ ID NO: 46744 - protein, 51 aa, Homo sapiens
  MAP TO AC007036.3; EXPRESSED IN ADULT LIVER, SIGNAL = 0.99; EXPRESSED IN FETAL LIVER, SIGNAL = 0.79; EXPRESSED IN LUNG, SIGNAL = 0.74
TILTNTELKLKSHDVERGAKIIYFLLESFSLNFPEVQIRVKTYPWTQELAT

SEQ ID NO: 46745 - protein, 76 aa, Homo sapiens
  MAP TO AC012140.1; EXPRESSED IN BONE MARROW, SIGNAL = 1.1; EXPRESSED IN HELA, SIGNAL = 0.97; EXPRESSED IN ADULT LIVER, SIGNAL = 1.1; EXPRESSED IN FETAL LIVER, SIGNAL =   1; EXPRESSED IN LUNG, SIGNAL = 0.99
LHHAATSTIHRRNIASFQIDPVCPFTAHPVPVPGPGSPGIAPVPVDAPALNISQQQSHRMWPLTEQHVLRLVCAVA

SEQ ID NO: 46746 - protein, 115 aa, Homo sapiens
  MAP TO AL034400.2; EXPRESSED IN ADULT LIVER, SIGNAL =   1; EXPRESSED IN LUNG, SIGNAL = 0.93; EXPRESSED IN BONE MARROW, SIGNAL = 0.93; EXPRESSED IN PLACENTA, SIGNAL = 1.4; EST_HUMAN HIT: AW590040.1, EVALUE 3.00e-51; SWISSPROT HIT: O75487, EVALUE 5.00e-63
FFKELLENAEKSLNDMFVKTYGHLYMQNSELFKDLFVELKRYYVVGNVNLEEMLNDFWARLLERMFRLVNSQYHFTDEYLECVSKYTEQLKPFGDVPRKLKLQVTRAFVAARTFA

SEQ ID NO: 46747 - protein, 35 aa, Homo sapiens
  MAP TO AL034400.2; EXPRESSED IN ADULT LIVER, SIGNAL =   1; EXPRESSED IN LUNG, SIGNAL = 0.93; EXPRESSED IN BONE MARROW, SIGNAL = 0.93; EXPRESSED IN PLACENTA, SIGNAL = 1.4
SYLNTENSRFSFFFFFFWCWFQNSSKNYLKMQRNP

SEQ ID NO: 46748 - protein, 99 aa, Homo sapiens
  MAP TO AL008631.1; EXPRESSED IN ADULT LIVER, SIGNAL =   1; SWISSPROT HIT: P34278, EVALUE 1.10e+00
PEKSAAVGTLVTIQFWSSTYVLSSLLLNFKNQNSKPKSSDTVELKERLSSNALRLPQEKLALNSHILPVSTGLPATAHHRFLMTQTHVQRSLILLNRTP

SEQ ID NO: 46749 - protein, 63 aa, Homo sapiens
  MAP TO AC000353.21; EXPRESSED IN HBL100, SIGNAL = 1.9; EXPRESSED IN FETAL LIVER, SIGNAL = 0.79; EXPRESSED IN LUNG, SIGNAL = 0.65; EXPRESSED IN HELA, SIGNAL = 1.1; EXPRESSED IN ADULT LIVER, SIGNAL = 0.68; EXPRESSED IN PLACENTA, SIGNAL = 0.66; EXPRESSED IN BT474, SIGNAL = 0.96; EXPRESSED IN BONE MARROW, SIGNAL = 0.99; SWISSPROT HIT: Q14181, EVALUE 2.00e-25; EST_HUMAN HIT: BE891092.1, EVALUE 2.00e-24
EPVTLLGQIGCDSNGKLNNKSVILEGDREHSSGAQIPVDLSELKEYSLFPGQVRLEEFHQNAG

SEQ ID NO: 46750 - protein, 29 aa, Homo sapiens
  MAP TO AC005037.2; EXPRESSED IN LUNG, SIGNAL = 0.63; EXPRESSED IN ADULT LIVER, SIGNAL = 0.67; EXPRESSED IN BONE MARROW, SIGNAL = 0.79; EST_HUMAN HIT: Z46120.1, EVALUE 3.00e-10
YNGQWDLGQEVLDDIIYRAQLELFSQPLL

SEQ ID NO: 46751 - protein, 43 aa, Homo sapiens
  MAP TO AC007279.3; EXPRESSED IN BT474, SIGNAL = 1.3; EXPRESSED IN ADULT LIVER, SIGNAL = 0.98; EST_HUMAN HIT: BE885688.1, EVALUE 4.00e-09; SWISSPROT HIT: Q13368, EVALUE 3.00e-10
LLSAHDTIAQKDFEPLLPPLPDNIPESEEAMRIVCLVKNQQPL

SEQ ID NO: 46752 - protein, 110 aa, Homo sapiens
  MAP TO AC007389.2; EXPRESSED IN PLACENTA, SIGNAL = 1.1; EXPRESSED IN BONE MARROW, SIGNAL = 1.3; EXPRESSED IN FETAL LIVER, SIGNAL = 1.1; EXPRESSED IN BT474, SIGNAL = 1.1; EXPRESSED IN HBL100, SIGNAL = 1.5; EXPRESSED IN LUNG, SIGNAL = 0.84; EXPRESSED IN HELA, SIGNAL =   1; EXPRESSED IN ADULT LIVER, SIGNAL = 1.2; EST_HUMAN HIT: AA305279.1, EVALUE 4.00e-23; SWISSPROT HIT: Q26609, EVALUE 8.00e+00
CNSFCSVAFGALSSSSFTVGLGSIGPTCFPVGGMGCVCGLGLVTSSLWFLVERLHQATHSRHWVQPLCLLQDEERLVGLVALDGLRVMLIQSSASSLLDYMAEPEHGTCC

SEQ ID NO: 46753 - protein, 137 aa, Homo sapiens
  MAP TO AL049834.2; EXPRESSED IN HBL100, SIGNAL = 0.86; EXPRESSED IN ADULT LIVER, SIGNAL = 0.77; EXPRESSED IN BT474, SIGNAL = 0.7; EST_HUMAN HIT: BE886115.1, EVALUE 6.00e-74; SWISSPROT HIT: P14503, EVALUE 3.60e-01
EKMRHLLHVLKVDLGCTSEENSVKQNDVDMLNVFDFEKAGNSEPNELKNESEVTIQQERQQYQKALDMLLSAPKDENEIFPSPTEFFMPIYKSKHSEGVIIQQVNDETNLETSTLDENHPSISDSLTDRETSVNVIE

SEQ ID NO: 46754 - protein, 41 aa, Homo sapiens
  MAP TO AC006020.2; EXPRESSED IN ADULT LIVER, SIGNAL = 1.2; EXPRESSED IN BT474, SIGNAL = 2.3e+02; EST_HUMAN HIT: BE937783.1, EVALUE 7.00e-06; SWISSPROT HIT: P39997, EVALUE 2.10e+00
RKVYGTVLSRHHHLVRKTDAVYDPAEYDKHPERYISRFNTD

SEQ ID NO: 46755 - protein, 36 aa, Homo sapiens
  MAP TO AC009230.2; EXPRESSED IN ADULT LIVER, SIGNAL = 1.1; SWISSPROT HIT: P14654, EVALUE 3.60e+00
KLTTYLPRPILTIPSAWNVFPFTQESSKTMREPGSY

SEQ ID NO: 46756 - protein, 35 aa, Homo sapiens
  MAP TO AL031132.1; EXPRESSED IN BT474, SIGNAL = 1.1; EXPRESSED IN ADULT LIVER, SIGNAL = 1.2; EXPRESSED IN LUNG, SIGNAL =   1; EXPRESSED IN HELA, SIGNAL = 1.3; EXPRESSED IN PLACENTA, SIGNAL =   1; EXPRESSED IN HBL100, SIGNAL = 1.1; EXPRESSED IN FETAL LIVER, SIGNAL = 1.1
RLGSPELEIKSGNMEIYCIIKLTMKMEEISQHQNL

SEQ ID NO: 46757 - protein, 109 aa, Homo sapiens
  MAP TO AL023280.1; EXPRESSED IN BT474, SIGNAL = 1.9; EXPRESSED IN HELA, SIGNAL = 1.1; EXPRESSED IN HBL100, SIGNAL = 1.6; EXPRESSED IN ADULT LIVER, SIGNAL = 1.1; EXPRESSED IN FETAL LIVER, SIGNAL = 1.2; EXPRESSED IN LUNG, SIGNAL = 1.1; EXPRESSED IN BONE MARROW, SIGNAL = 1.1; EXPRESSED IN PLACENTA, SIGNAL = 1.2; EST_HUMAN HIT: AW860145.1, EVALUE 9.00e-14; SWISSPROT HIT: P03360, EVALUE 4.00e-08
AEGGQVMEEGLIRLPDGRVAVPQLLGAAVVLAVHETTHLGQESLEKLLGWYFYISHLSALAKTVTQRCVTCRQHNARQGLAVPPGIQAYGEAPFEDLDPGGLHRDAKVW

SEQ ID NO: 46758 - protein, 37 aa, Homo sapiens
  MAP TO AL049692.13; EXPRESSED IN ADULT LIVER, SIGNAL = 1.1; EST_HUMAN HIT: AA172249.1, EVALUE 2.00e-15; SWISSPROT HIT: O62651, EVALUE 3.00e-17
RSASETSEKRPFMCAYPGCNKRYFKLSHLQMHSRKHT

SEQ ID NO: 46759 - protein, 54 aa, Homo sapiens
  MAP TO AC010099.3; EXPRESSED IN ADULT LIVER, SIGNAL =   1; EXPRESSED IN BT474, SIGNAL = 0.91; EXPRESSED IN HELA, SIGNAL = 3.6; SWISSPROT HIT: P03193, EVALUE 4.50e+00; EST_HUMAN HIT: BF341820.1, EVALUE 1.70e+00
RAVASSCVFAPAQMSLNLAVPENEFITIEEAGKSKINVPADLLSAEGSLSASEG

SEQ ID NO: 46760 - protein, 72 aa, Homo sapiens
  MAP TO AD000685.1; EXPRESSED IN ADULT LIVER, SIGNAL = 0.98; EXPRESSED IN FETAL LIVER, SIGNAL = 1.1; EST_HUMAN HIT: BF512006.1, EVALUE 4.00e-27; SWISSPROT HIT: Q08477, EVALUE 1.00e-35
RHQQILLYIDFLYYLTPDGQRFRRACRLVHDFTDAVIQERRRTLPSQGVDDFLQAKAKSKTLDFIDVLLLSK

SEQ ID NO: 46761 - protein, 25 aa, Homo sapiens
  MAP TO AL117258.1; EXPRESSED IN FETAL LIVER, SIGNAL = 1.4; EXPRESSED IN ADULT LIVER, SIGNAL = 1.1; SWISSPROT HIT: P56470, EVALUE 9.70e-01
SQNKPLIPPFPGCGHTHSLNSRTSV

SEQ ID NO: 46762 - protein, 38 aa, Homo sapiens
  MAP TO AC011413.1; EXPRESSED IN ADULT LIVER, SIGNAL = 0.94
KQQLHLQVLLEQALQLQILLTHPEKKEDKAFPLEIYKR

SEQ ID NO: 46763 - protein, 19 aa, Homo sapiens
  MAP TO AC011413.1; EXPRESSED IN ADULT LIVER, SIGNAL = 0.94
SLTLRRRKIKPFLWKSTKG

SEQ ID NO: 46764 - protein, 38 aa, Homo sapiens
  MAP TO AC011423.1; EXPRESSED IN HELA, SIGNAL =   1; EXPRESSED IN ADULT LIVER, SIGNAL =   1; EST_HUMAN HIT: AA417192.1, EVALUE 7.50e-01
VVVMSILGILAIQGRADGEGCMPILHPLILSADAQGHE

SEQ ID NO: 46765 - protein, 49 aa, Homo sapiens
  MAP TO AL034351.1; EXPRESSED IN HBL100, SIGNAL = 1.7; EXPRESSED IN ADULT LIVER, SIGNAL = 0.69; EST_HUMAN HIT: BE622765.1, EVALUE 8.70e+00
RTVFTFVKLRNFLLDLARSIRITCGPWTLLYQLPAAAGTSSFWPLSVPG

SEQ ID NO: 46766 - protein, 220 aa, Homo sapiens; identical to SEQ ID NO: 34106
  MAP TO AP000099.1; EXPRESSED IN BONE MARROW, SIGNAL = 2.4; EXPRESSED IN ADULT LIVER, SIGNAL = 1.3; SWISSPROT HIT: P04930, EVALUE 1.10e+00

SEQ ID NO: 46767 - protein, 144 aa, Homo sapiens
  MAP TO AP000099.1; EXPRESSED IN BONE MARROW, SIGNAL = 2.4; EXPRESSED IN ADULT LIVER, SIGNAL = 1.3; EST_HUMAN HIT: BE841675.1, EVALUE 1.70e-01; SWISSPROT HIT: O02491, EVALUE 2.60e+00
LHPDPLHPGPLHSGPLHPGPLYPGPLHPGPLYPGPLHPSEFHPGPLHPSELHPGALHPGALHPDSLHPDPLYLGPLHPSPLHPGPIHPDPLHPSPLHPDPLHPGPLHPGALHSGPLHPGPLHPGPLHLGPLHLGPLYPGPLHPG

SEQ ID NO: 46768 - protein, 27 aa, Homo sapiens
  MAP TO AP000099.1; EXPRESSED IN BONE MARROW, SIGNAL = 2.4; EXPRESSED IN ADULT LIVER, SIGNAL = 1.3
LHLGPLHPGPLHPGPLYLGPLYPGPLY

SEQ ID NO: 46769 - protein, 33 aa, Homo sapiens
  MAP TO AC004885.2; EXPRESSED IN ADULT LIVER, SIGNAL = 0.81
ELGVEKTFDAFEMLRNEDMVVVRICMSMPAVGQ

SEQ ID NO: 46770 - protein, 30 aa, Homo sapiens
  MAP TO AC004885.2; EXPRESSED IN ADULT LIVER, SIGNAL = 0.81
RQAWTCIFVQQPCLHFSAFQKHQTFSQPQA

SEQ ID NO: 46771 - protein, 49 aa, Homo sapiens
  MAP TO AC006448.4; EXPRESSED IN ADULT LIVER, SIGNAL = 0.66
AVITHTANVAMLLKTVNCTNDISLNKNETVCRLGFKGKGVCVYVSIYPP

SEQ ID NO: 46772 - protein, 36 aa, Homo sapiens
  MAP TO AC006499.11; EXPRESSED IN PLACENTA, SIGNAL = 0.7; EXPRESSED IN ADULT LIVER, SIGNAL = 1.7; EXPRESSED IN BONE MARROW, SIGNAL = 5.1
LPRSSSSSHPQIHGNLDSDDLQVQRGECFICRPCFH

SEQ ID NO: 46773 - protein, 28 aa, Homo sapiens
  MAP TO AC007364.2; EXPRESSED IN ADULT LIVER, SIGNAL = 0.74; EXPRESSED IN FETAL LIVER, SIGNAL = 0.71
NKEDLLLIEIEPAPDNLEGRPPQKVNHY

SEQ ID NO: 46774 - protein, 22 aa, Homo sapiens
  MAP TO AF121898.1; EXPRESSED IN PLACENTA, SIGNAL = 0.9; EXPRESSED IN ADULT LIVER, SIGNAL =   1; EXPRESSED IN FETAL LIVER, SIGNAL = 0.93
FKLEELETAERVEEWEEQEISK

SEQ ID NO: 46775 - protein, 79 aa, Homo sapiens
  MAP TO AC007935.1; EXPRESSED IN ADULT LIVER, SIGNAL = 0.83; EST_HUMAN HIT: AA921770.1, EVALUE 8.40e-01; SWISSPROT HIT: Q00900, EVALUE 1.10e+00
VIPIKLRLFVSYDFNTWPPLLLLKEKKDYEKSHSFIASPRTVVHHFHPLPIGQDLITWPILKEPGKWSLPVCPRRGNGI

SEQ ID NO: 46776 - protein, 30 aa, Homo sapiens
  MAP TO AC007935.1; EXPRESSED IN ADULT LIVER, SIGNAL = 0.83
DTYKTQALRVIRFQYMASIVAIEGEERLRK

SEQ ID NO: 46777 - protein, 70 aa, Homo sapiens
  MAP TO AC007455.7; EXPRESSED IN ADULT LIVER, SIGNAL = 0.67; EST_HUMAN HIT: BF569905.1, EVALUE 5.00e-20; SWISSPROT HIT: O76013, EVALUE 9.00e-22
WYGEGINSNEKETMQILNERLANYLQKVRMLERENAELESKIQEESNKELPVLCPDYLSYYTTIEELQQK

SEQ ID NO: 46778 - protein, 73 aa, Homo sapiens
  MAP TO AC007939.1; EXPRESSED IN HELA, SIGNAL = 0.71; EXPRESSED IN ADULT LIVER, SIGNAL = 0.71; EST_HUMAN HIT: AA862888.1, EVALUE 5.00e-05; SWISSPROT HIT: Q01129, EVALUE 1.00e-03
ISKMTKLTRLSINNNLLTGWEEHTFDNMLHLHSLSLENNRITSLSGLQKSFTLVELYISNNYIAVNQEMHNLK

SEQ ID NO: 46779 - protein, 173 aa, Homo sapiens
  MAP TO AB023056.1; EXPRESSED IN HELA, SIGNAL = 0.85; EXPRESSED IN ADULT LIVER, SIGNAL = 0.71; EXPRESSED IN BONE MARROW, SIGNAL = 0.8; EXPRESSED IN HBL100, SIGNAL = 1.3; EXPRESSED IN PLACENTA, SIGNAL = 0.64; EXPRESSED IN FETAL LIVER, SIGNAL = 0.67; EXPRESSED IN LUNG, SIGNAL = 1.2; SWISSPROT HIT: Q07283, EVALUE 7.00e-03; EST_HUMAN HIT: BF513344.1, EVALUE 3.70e-01
YCLVPEREMKHIERHIHQTGKAGEFKNKPFRQVLQPPNETKLPKIMPEGHGIQNAQRRKQVNEREQMQTKDHQERMIRGRELAEQRLKERILRRSQSQLLTYEKHERVKEIKEFERVIAYLLFQPCSRSRIKVSILMDKSQNGEKVNTIVKPYQRKFLAMPPFLRSQIGKIRD

SEQ ID NO: 46780 - protein, 52 aa, Homo sapiens
  MAP TO AC012444.1; EXPRESSED IN FETAL LIVER, SIGNAL = 0.98; EXPRESSED IN ADULT LIVER, SIGNAL = 0.95; EXPRESSED IN LUNG, SIGNAL =   1; SWISSPROT HIT: Q08108, EVALUE 2.60e+00
RLLHKKYFKILREILRDLRYIKEYTKMASNDKTVLKKRNRVAELIVPDIKID

SEQ ID NO: 46781 - protein, 20 aa, Homo sapiens
  MAP TO AC005399.14; EXPRESSED IN ADULT LIVER, SIGNAL = 0.92
KECLPGDPGSDTVEYKQVNQ

SEQ ID NO: 46782 - protein, 35 aa, Homo sapiens
  MAP TO AC006499.11; EXPRESSED IN ADULT LIVER, SIGNAL =   1
SISEADGMSQLLKPKMEPKAKNQGLLKGGEEPRKQ

SEQ ID NO: 46783 - protein, 46 aa, Homo sapiens
  MAP TO AC006390.8; EXPRESSED IN BONE MARROW, SIGNAL = 1.3; EXPRESSED IN BT474, SIGNAL = 0.67; EXPRESSED IN ADULT LIVER, SIGNAL = 0.65
ACFLLRSGSVTANCSWDGAPTPLAAGRRLLPSSRLRPMACFRVRWA

SEQ ID NO: 46784 - protein, 36 aa, Homo sapiens
  MAP TO AC007200.1; EXPRESSED IN ADULT LIVER, SIGNAL = 1.1; SWISSPROT HIT: Q03669, EVALUE 6.40e+00
IPPSPNVHSIVLLCVDISLRTMVFWQSPLPWLSEYH

SEQ ID NO: 46785 - protein, 57 aa, Homo sapiens
  MAP TO AL096794.3; EXPRESSED IN PLACENTA, SIGNAL = 0.65; EXPRESSED IN ADULT LIVER, SIGNAL = 0.67; EXPRESSED IN LUNG, SIGNAL = 0.63; EST_HUMAN HIT: AV724378.1, EVALUE 8.10e+00; SWISSPROT HIT: Q09435, EVALUE 7.70e+00
MLALHIPNDVQKSSKHFTVYKGQGRIWFSLWIKHGVYFWPLAPETFISKDGKGSKPS

SEQ ID NO: 46786 - protein, 31 aa, Homo sapiens
  MAP TO AL096794.3; EXPRESSED IN PLACENTA, SIGNAL = 0.65; EXPRESSED IN ADULT LIVER, SIGNAL = 0.67; EXPRESSED IN LUNG, SIGNAL = 0.63
CWLYTSLMMSRKVQSILLCIRDRAEYGSPCG

SEQ ID NO: 46787 - protein, 67 aa, Homo sapiens
  MAP TO AL049874.2; EXPRESSED IN PLACENTA, SIGNAL = 0.59; EXPRESSED IN ADULT LIVER, SIGNAL =  11; EST_HUMAN HIT: BF060843.1, EVALUE 2.40e+00
GDYDCDSTIHLVFCKLTVITFLQFGYKRKTRLVLPFESRSHQVTWIFILTDFLCKMPLNVRCGQRNH

SEQ ID NO: 46788 - protein, 85 aa, Homo sapiens; identical to SEQ ID NO: 35915
  MAP TO AC000052.8; EXPRESSED IN ADULT LIVER, SIGNAL = 0.65; EST_HUMAN HIT: AI740494.1, EVALUE 7.20e-01

SEQ ID NO: 46789 - protein, 36 aa, Homo sapiens
  MAP TO AC007158.5; EXPRESSED IN ADULT LIVER, SIGNAL = 2.1
DSLKGDTGCAGFSDLQKINVSKYPKLTWGFQDYAAR

SEQ ID NO: 46790 - protein, 62 aa, Homo sapiens
  MAP TO AB020875.1; EXPRESSED IN ADULT LIVER, SIGNAL = 1.6; EXPRESSED IN HBL100, SIGNAL = 1.2; EST_HUMAN HIT: AA626496.1, EVALUE 2.00e-02
HTLFLFLFSCTVAVKTNSLTSMVIVKTSSLTATGWDRKCLEISQKSIPRELSLFDLPDNSLE

SEQ ID NO: 46791 - protein, 50 aa, Homo sapiens
  MAP TO AC007739.1; EXPRESSED IN HELA, SIGNAL = 0.76; EXPRESSED IN ADULT LIVER, SIGNAL = 0.68; EXPRESSED IN PLACENTA, SIGNAL = 0.92; EXPRESSED IN BONE MARROW, SIGNAL = 0.65; EXPRESSED IN LUNG, SIGNAL = 0.73; EXPRESSED IN FETAL LIVER, SIGNAL = 0.58; SWISSPROT HIT: P00187, EVALUE 7.80e+00
KEINGTGGSRNQFSKWSFFLMLGMLEETSVIIPPKLPVDLRGRMVSTVYS

SEQ ID NO: 46792 - protein, 58 aa, Homo sapiens; identical to SEQ ID NO: 37226
  MAP TO AP000177.1; EXPRESSED IN ADULT LIVER, SIGNAL = 0.76; SWISSPROT HIT: P28968, EVALUE 8.80e-01; EST_HUMAN HIT: H28949.1, EVALUE 2.10e-02

SEQ ID NO: 46793 - protein, 23 aa, Homo sapiens
  MAP TO AP000177.1; EXPRESSED IN ADULT LIVER, SIGNAL = 0.76
LHFMLEMHKCALIPAHYRLGSLR

SEQ ID NO: 46794 - protein, 73 aa, Homo sapiens
  MAP TO AP000236.1; EXPRESSED IN ADULT LIVER, SIGNAL = 0.94; EXPRESSED IN PLACENTA, SIGNAL = 0.62; SWISSPROT HIT: P27023, EVALUE 2.20e-01; EST_HUMAN HIT: AI955467.1, EVALUE 3.40e+00
QIPLFYQLQTAEQKSLPHEADIVVQFTQPTFLSATMPSTQSGNKSPPNIVGEEIHQERLTEGMTGQKVLWAQV

SEQ ID NO: 46795 - protein, 31 aa, Homo sapiens
  MAP TO AP000236.1; EXPRESSED IN ADULT LIVER, SIGNAL = 0.94; EXPRESSED IN PLACENTA, SIGNAL = 0.62; EST_HUMAN HIT: R18602.1, EVALUE 7.90e-01
RYLYSTSCKQQNKSPCPMKLILWCNSLSQHS

SEQ ID NO: 46796 - protein, 33 aa, Homo sapiens
  MAP TO AL031586.2; EXPRESSED IN PLACENTA, SIGNAL = 0.92; EXPRESSED IN ADULT LIVER, SIGNAL =   1; EXPRESSED IN LUNG, SIGNAL =   1
RVFGHSLIIFMMMVITMMATIIMLIINIYSSLK

SEQ ID NO: 46797 - protein, 76 aa, Homo sapiens
  MAP TO AF155238.1; EXPRESSED IN HBL100, SIGNAL =   4; EXPRESSED IN BONE MARROW, SIGNAL = 0.91; EXPRESSED IN ADULT LIVER, SIGNAL =   1; EXPRESSED IN FETAL LIVER, SIGNAL =  10; SWISSPROT HIT: P10404, EVALUE 2.90e+00; EST_HUMAN HIT: R15049.1, EVALUE 8.50e-01
MLFDSTKVATIYPISHALLPCNSAMLPTRVAVSASPLDYSACDGSTPAGHGESNYVPCKAASTSSTGRCFWKPELT

SEQ ID NO: 46798 - protein, 68 aa, Homo sapiens
  MAP TO AF155238.1; EXPRESSED IN HBL100, SIGNAL =   4; EXPRESSED IN BONE MARROW, SIGNAL = 0.91; EXPRESSED IN ADULT LIVER, SIGNAL =   1; EXPRESSED IN FETAL LIVER, SIGNAL =  10; EST_HUMAN HIT: BE293109.1, EVALUE 2.70e-01
KLQPYIPSHMLFYHVTLPCSQPEWQFLPRPWTTQPATAPPQQGMERVIMFPAKQLPPPPLDAAFGNLS

SEQ ID NO: 46799 - protein, 36 aa, Homo sapiens
  MAP TO AL049610.9; EXPRESSED IN BONE MARROW, SIGNAL = 0.79; EXPRESSED IN ADULT LIVER, SIGNAL = 0.94; EXPRESSED IN FETAL LIVER, SIGNAL = 0.63; EXPRESSED IN PLACENTA, SIGNAL = 0.68; EXPRESSED IN HELA, SIGNAL = 0.75; EST_HUMAN HIT: AA436036.1, EVALUE 1.30e-01
EGEQQLKPNNSNAPNEDQEEEIQQSEQASGGFSIPT

SEQ ID NO: 46800 - protein, 40 aa, Homo sapiens
  MAP TO AF152365.1; EXPRESSED IN ADULT LIVER, SIGNAL = 0.93; EXPRESSED IN BONE MARROW, SIGNAL = 0.97
VMMDRFHFIQLPSSENIKMSKRRRSVIVSPATQILVQVMA

SEQ ID NO: 46801 - protein, 71 aa, Homo sapiens
  MAP TO AL031121.5; EXPRESSED IN FETAL LIVER, SIGNAL = 4.1; EXPRESSED IN ADULT LIVER, SIGNAL = 1.2; EXPRESSED IN HBL100, SIGNAL = 1.8; EXPRESSED IN HELA, SIGNAL =   1; EST_HUMAN HIT: AW997696.1, EVALUE 1.40e-01; SWISSPROT HIT: P51843, EVALUE 3.80e+00
VTVSVLTVKSLHELPATFPVTSYHSCLHSGTGLLQGTDVSLLGAFACAFCGLERFPHGSIIPGGLCQCPLL

SEQ ID NO: 46802 - protein, 37 aa, Homo sapiens
  MAP TO AL031591.18; EXPRESSED IN HBL100, SIGNAL = 0.72; EXPRESSED IN FETAL LIVER, SIGNAL = 0.6; EXPRESSED IN HELA, SIGNAL = 0.76; EXPRESSED IN ADULT LIVER, SIGNAL = 0.67; SWISSPROT HIT: P48739, EVALUE 2.00e-17; EST_HUMAN HIT: AU120667.1, EVALUE 3.00e-16
KELANSPDCPQMCAYKLVTIKFKWWGLQSKVENFIQK

SEQ ID NO: 46803 - protein, 70 aa, Homo sapiens; identical to SEQ ID NO: 46507
  MAP TO AL121756.6; EXPRESSED IN ADULT LIVER, SIGNAL = 1.1; EST_HUMAN HIT: BF126974.1, EVALUE 5.50e+00; SWISSPROT HIT: O43462, EVALUE 4.30e+00

SEQ ID NO: 46804 - protein, 146 aa, Homo sapiens
  MAP TO AL021393.1; EXPRESSED IN LUNG, SIGNAL = 0.98; EXPRESSED IN ADULT LIVER, SIGNAL = 0.97; SWISSPROT HIT: Q92452, EVALUE 1.30e+00; EST_HUMAN HIT: AA845499.1, EVALUE 8.00e-47
SKESSKEKKLTVRQDLEDRYAEHVAATQALPQDSGTAAWKGRVLLPETQKRQQLSEDTLTIHGLPTEGYQALYHAVVEPMLWNPSGTPKRYSLELGKAIKQKLWEALCSQGAISEGAQRDRFPGRKQPGVHEEPVLKKWPKLKSKK

SEQ ID NO: 46805 - protein, 69 aa, Homo sapiens
  MAP TO AP000136.1; EXPRESSED IN ADULT LIVER, SIGNAL = 0.66; SWISSPROT HIT: Q83949, EVALUE 1.10e+00
CLELSRKASTTKTNCEFYDVFVLTQAVHESVKRFPSRESIECEEERQRLSSTQERTECAKESETEHLRQ

SEQ ID NO: 46806 - protein, 50 aa, Homo sapiens
  MAP TO AP000117.1; EXPRESSED IN FETAL LIVER, SIGNAL = 0.94; EXPRESSED IN HELA, SIGNAL = 0.78; EXPRESSED IN ADULT LIVER, SIGNAL = 0.7; EST_HUMAN HIT: AI632369.1, EVALUE 3.00e-04
AAKRELERQRQLEWERNRRQELLNQRNKEQEDIVVLKAKKKTLEFELEAL

SEQ ID NO: 46807 - protein, 28 aa, Homo sapiens
  MAP TO AP000117.1; EXPRESSED IN FETAL LIVER, SIGNAL = 0.94; EXPRESSED IN HELA, SIGNAL = 0.78; EXPRESSED IN ADULT LIVER, SIGNAL = 0.7; EST_HUMAN HIT: AI671143.1, EVALUE 3.00e-09
SKARTTKSKKQRTRGHSCTESKEKDFGI

SEQ ID NO: 46808 - protein, 35 aa, Homo sapiens
  MAP TO AC009309.1; EXPRESSED IN HELA, SIGNAL = 0.67; EXPRESSED IN ADULT LIVER, SIGNAL = 0.76; EXPRESSED IN HBL100, SIGNAL = 0.75; EXPRESSED IN FETAL LIVER, SIGNAL = 0.63; EST_HUMAN HIT: BF371875.1, EVALUE 2.00e-13
RSFLLAKKSGENVAKFIINSYPKYFQKDIAEPHIP

SEQ ID NO: 46809 - protein, 26 aa, Homo sapiens
  MAP TO AC009309.1; EXPRESSED IN HELA, SIGNAL = 0.67; EXPRESSED IN ADULT LIVER, SIGNAL = 0.76; EXPRESSED IN HBL100, SIGNAL = 0.75; EXPRESSED IN FETAL LIVER, SIGNAL = 0.63; EST_HUMAN HIT: BF307586.1, EVALUE 4.00e-10; SWISSPROT HIT: P09866, EVALUE 1.10e-01
VHFYWQRNPGRMWPSLLLIHTPNIFR

SEQ ID NO: 46810 - protein, 94 aa, Homo sapiens; identical to SEQ ID NO: 42860
  MAP TO AL034431.13; EXPRESSED IN BONE MARROW, SIGNAL =   1; EXPRESSED IN ADULT LIVER, SIGNAL = 0.94; EST_HUMAN HIT: BE971475.1, EVALUE 3.40e+00

SEQ ID NO: 46811 - protein, 35 aa, Homo sapiens
  MAP TO AP000167.1; EXPRESSED IN FETAL LIVER, SIGNAL = 0.57; EXPRESSED IN HELA, SIGNAL = 0.6; EXPRESSED IN ADULT LIVER, SIGNAL = 0.67; EST_HUMAN HIT: BE252579.1, EVALUE 5.10e+00
QEALAVLKVLSLKVSGPGVGSRARGPGWEGTGPAV

SEQ ID NO: 46812 - protein, 24 aa, Homo sapiens
  MAP TO AP000167.1; EXPRESSED IN FETAL LIVER, SIGNAL = 0.57; EXPRESSED IN HELA, SIGNAL = 0.6; EXPRESSED IN ADULT LIVER, SIGNAL = 0.67
PRAQCLPILVLWLCFLHLGPTPSD

SEQ ID NO: 46813 - protein, 29 aa, Homo sapiens
  MAP TO AC008166.1; EXPRESSED IN FETAL LIVER, SIGNAL = 0.58; EXPRESSED IN LUNG, SIGNAL = 0.71; EXPRESSED IN HELA, SIGNAL = 0.9; EXPRESSED IN ADULT LIVER, SIGNAL = 0.7
AASSVIFGYIQHKEFKLYFKRETEEFMLE

SEQ ID NO: 46814 - protein, 51 aa, Homo sapiens
  MAP TO AL021307.1; EXPRESSED IN ADULT LIVER, SIGNAL = 1.1; EST_HUMAN HIT: BE064540.1, EVALUE 1.70e-01; SWISSPROT HIT: P14344, EVALUE 1.20e+00
IMRYVNKMVNVYVILLDNAVFLFTENIHIMFPTAVCENVFASTISAMYVAK

SEQ ID NO: 46815 - protein, 25 aa, Homo sapiens
  MAP TO AC007130.2; EXPRESSED IN BT474, SIGNAL = 0.74; EXPRESSED IN LUNG, SIGNAL = 0.8; EXPRESSED IN FETAL LIVER, SIGNAL = 0.58; EXPRESSED IN HELA, SIGNAL = 0.59; EXPRESSED IN ADULT LIVER, SIGNAL = 0.84; EST_HUMAN HIT: BF340337.1, EVALUE 3.00e-06; SWISSPROT HIT: P29266, EVALUE 5.00e-07
AAKICNNMLLAISMIGTAEAMNLGI

SEQ ID NO: 46816 - protein, 53 aa, Homo sapiens
  MAP TO AL121575.6; EXPRESSED IN FETAL LIVER, SIGNAL = 1.7; EXPRESSED IN ADULT LIVER, SIGNAL = 1.3; EXPRESSED IN BONE MARROW, SIGNAL = 1.4; SWISSPROT HIT: P05089, EVALUE 6.00e-26; EST_HUMAN HIT: AV652048.1, EVALUE 7.00e-25
LAIGSISGHARVHPDLGVIWVDAHTDINTPLTTTSGNLHGQPVSFLLKELKGK

SEQ ID NO: 46817 - protein, 34 aa, Homo sapiens
  MAP TO AP000076.1; EXPRESSED IN HBL100, SIGNAL = 0.91; EXPRESSED IN ADULT LIVER, SIGNAL = 1.2; EXPRESSED IN LUNG, SIGNAL = 0.93; EXPRESSED IN BONE MARROW, SIGNAL = 1.5
MPGERIKFPIDLPLSCNATKRRHILTDGVICPSE

SEQ ID NO: 46818 - protein, 55 aa, Homo sapiens
  MAP TO AC007539.8; EXPRESSED IN HELA, SIGNAL = 3.9; EXPRESSED IN ADULT LIVER, SIGNAL =   1; EXPRESSED IN PLACENTA, SIGNAL = 0.6; SWISSPROT HIT: P38250, EVALUE 3.50e-02; EST_HUMAN HIT: AU142869.1, EVALUE 6.00e-21
IQFGFVTLFVASFPLAPVFALLNNVIEVRLDAKKFVTELRRPDAVRTKDIGTCPT

SEQ ID NO: 46819 - protein, 64 aa, Homo sapiens
  MAP TO AC006430.15; EXPRESSED IN FETAL LIVER, SIGNAL = 1.3; EXPRESSED IN ADULT LIVER, SIGNAL = 1.6; EST_HUMAN HIT: AV660086.1, EVALUE 4.00e-30; SWISSPROT HIT: P01031, EVALUE 4.00e-31
YVISAPKIFRVGASENIVIQVYGYTEAFDATISIKSYPDKKFSYSSGHVHLSSENKFQNSAILT

SEQ ID NO: 46820 - protein, 51 aa, Homo sapiens
  MAP TO AC010766.2; EXPRESSED IN PLACENTA, SIGNAL = 1.6; EXPRESSED IN ADULT LIVER, SIGNAL = 0.97; EST_HUMAN HIT: BE061177.1, EVALUE 6.00e-12; SWISSPROT HIT: P03356, EVALUE 2.30e-01
GYISSLALCHNLIRRDLDGFLLLQNITLLVHYVDDIMLIGSSEQEVANALD

SEQ ID NO: 46821 - protein, 267 aa, Homo sapiens
  MAP TO AP000118.1; EXPRESSED IN PLACENTA, SIGNAL = 0.65; EXPRESSED IN HELA, SIGNAL = 0.85; EXPRESSED IN BT474, SIGNAL = 0.62; EXPRESSED IN FETAL LIVER, SIGNAL = 0.67; EXPRESSED IN LUNG, SIGNAL = 0.73; EXPRESSED IN ADULT LIVER, SIGNAL = 0.87; EST_HUMAN HIT: BE089541.1, EVALUE 4.00e-49; SWISSPROT HIT: P53794, EVALUE 0.00e+00
KEALKMLRNPTDEDVPWPGFILGQTPASVWYWCADQVIVQRVLAAKNIAHAKGSTLMAGFLKLLPMFIIVVPGMISRILFTDDIACINPEHCMLVCGSRAGCSNIAYPRLVMKLVPVGLRGLMMAVMIAALMSDLDSIFNSASTIFTLDVYKLIRKSASSRELMIVGRIFVAFMVVISIAWVPIIVEMQGGQMYLYIQEVADYLTPPVAALFLLAIFWKRCNEQGAFYGGMAGFVLGAVRLILAFAYRAPECDQPDNRPGFIKDIHY

SEQ ID NO: 46822 - protein, 31 aa, Homo sapiens
  MAP TO AC008039.1; EXPRESSED IN BONE MARROW, SIGNAL = 0.78; EXPRESSED IN ADULT LIVER, SIGNAL = 0.66; EXPRESSED IN BT474, SIGNAL = 0.65; EST_HUMAN HIT: AI023325.1, EVALUE 7.00e-11
LASTYSLTSCCLHSSVFTAVLEKPEVLKGHK

SEQ ID NO: 46823 - protein, 31 aa, Homo sapiens
  MAP TO AC008039.1; EXPRESSED IN BONE MARROW, SIGNAL = 0.78; EXPRESSED IN ADULT LIVER, SIGNAL = 0.66; EXPRESSED IN BT474, SIGNAL = 0.65; SWISSPROT HIT: P38241, EVALUE 8.30e+00; EST_HUMAN HIT: AI023325.1, EVALUE 1.00e-10
LWPFKTSGFSNTAVKTLLCRQQLVSEYVLAS

SEQ ID NO: 46824 - protein, 64 aa, Homo sapiens
  MAP TO AC010872.3; EXPRESSED IN FETAL LIVER, SIGNAL = 1.8; EXPRESSED IN ADULT LIVER, SIGNAL = 1.3; SWISSPROT HIT: P04114, EVALUE 9.00e-18
DMVNGIMLSVEKLIKDLKSKEVPEARAYLRILGEELGFASLHDLQLLGKLLLMGARTLQGIPQM

SEQ ID NO: 46825 - protein, 38 aa, Homo sapiens
  MAP TO AC012666.1; EXPRESSED IN ADULT LIVER, SIGNAL = 1.6; SWISSPROT HIT: P47492, EVALUE 2.80e+00; EST_HUMAN HIT: BE937409.1, EVALUE 3.20e+00
SRNITFTPSRGCPKHEEKNQTYQLSCNVPKDMMKCWGM

SEQ ID NO: 46826 - protein, 24 aa, Homo sapiens
  MAP TO AC012666.1; EXPRESSED IN ADULT LIVER, SIGNAL = 1.6
QAETSPLPLPEVAQSMRRKIRPIS

SEQ ID NO: 46827 - protein, 38 aa, Homo sapiens
  MAP TO AL035409.15; EXPRESSED IN LUNG, SIGNAL = 0.61; EXPRESSED IN ADULT LIVER, SIGNAL = 0.69; EXPRESSED IN PLACENTA, SIGNAL = 0.63; EST_HUMAN HIT: BF680959.1, EVALUE 9.60e+00
MLTVSQEQKGEGNQPGRRIESRVGSEMSEGHEADKIPT

SEQ ID NO: 46828 - protein, 27 aa, Homo sapiens
  MAP TO AC007739.1; EXPRESSED IN LUNG, SIGNAL = 0.62; EXPRESSED IN HELA, SIGNAL = 0.66; EXPRESSED IN ADULT LIVER, SIGNAL = 0.68; EXPRESSED IN PLACENTA, SIGNAL = 0.61
TAFFSATWCLGVLTCPNSSGNRPTTVT

SEQ ID NO: 46829 - protein, 51 aa, Homo sapiens
  MAP TO AE000658.1; EXPRESSED IN ADULT LIVER, SIGNAL =   1; SWISSPROT HIT: P29809, EVALUE 2.00e+00; EST_HUMAN HIT: BE541807.1, EVALUE 2.00e-01
SCGWSDAPSPTANFWPLPAWSKWQPLQQQQQDKRRKDDLTADSLHSRLWYQ

SEQ ID NO: 46830 - protein, 39 aa, Homo sapiens
  MAP TO AE000658.1; EXPRESSED IN ADULT LIVER, SIGNAL =   1
SAVDGQMPHLPLPISGPYQHGASGSRCSSSSRIKGGKMT

SEQ ID NO: 46831 - protein, 91 aa, Homo sapiens
  MAP TO AC006325.3; EXPRESSED IN ADULT LIVER, SIGNAL = 1.8; EXPRESSED IN BT474, SIGNAL = 2.2; SWISSPROT HIT: O32086, EVALUE 7.50e-01
TGLSCRMETQTMRSLSVTVTKGAIVTLTLSTILIQRATVTLTQLPSVKFPLCSPNYILANAHHNPMRYMFSLYVTGVKPDFQRPRSLANAT

SEQ ID NO: 46832 - protein, 219 aa, Homo sapiens
  MAP TO AC008269.1; EXPRESSED IN HELA, SIGNAL = 1.1; EXPRESSED IN ADULT LIVER, SIGNAL =   1; EXPRESSED IN BT474, SIGNAL = 1.3; EXPRESSED IN HBL100, SIGNAL = 0.92; EXPRESSED IN FETAL LIVER, SIGNAL = 0.6; SWISSPROT HIT: P12365, EVALUE 4.50e-01; EST_HUMAN HIT: AV728088.1, EVALUE 1.00e-106
MRLCCLGLCKPKIVHSNWNILNNFHNRMQSTDIIRYLFQDAFIFKSDVGFQTKGISTLTALRIERLLYAKRLFFDSKQSLVPVDKSDDELKKVNLNHEVSNEDVLTKETKPNRISSRKLSEECNSLSDVLDAFSKAPTFPSSNYFTAMWTIAKRLSDDQKRFEKRLMFSHPAFNQLCEHMMREAKIMQYKYLLFSLHAIVKLGIPQNTILVQTLLRVTQ

SEQ ID NO: 46833 - protein, 42 aa, Homo sapiens
  MAP TO AC007655.1; EXPRESSED IN ADULT LIVER, SIGNAL = 0.78; EST_HUMAN HIT: BE742519.1, EVALUE 4.00e-17; SWISSPROT HIT: P05307, EVALUE 2.10e-02
TVIGLFNSVIQIHLLLIMNKASPEYEENMHRYQKAAKLFQGK

SEQ ID NO: 46834 - protein, 39 aa, Homo sapiens
  MAP TO AP000221.1; EXPRESSED IN ADULT LIVER, SIGNAL = 5.1; EST_HUMAN HIT: AA203109.1, EVALUE 3.00e-05
DVSTQREGSHLQVRKQAFTRNPTGWHLDLGLLSLQTVRK

SEQ ID NO: 46835 - protein, 81 aa, Homo sapiens
  MAP TO AL031073.1; EXPRESSED IN BT474, SIGNAL = 0.94; EXPRESSED IN PLACENTA, SIGNAL = 1.1; EXPRESSED IN ADULT LIVER, SIGNAL = 1.3; EST_HUMAN HIT: AI961530.1, EVALUE 2.00e-26; SWISSPROT HIT: P31792, EVALUE 5.00e-21
LKEKLMSAPALGLSDLTKPFTLYASEREKIAVGVLTQTVGPWPRPVAYLSKQLDGVSKGWPPCLRALAATALLAQDADMLI

SEQ ID NO: 46836 - protein, 64 aa, Homo sapiens
  MAP TO AC007686.3; EXPRESSED IN LUNG, SIGNAL = 0.64; EXPRESSED IN BT474, SIGNAL = 0.62; EXPRESSED IN FETAL LIVER, SIGNAL = 0.6; EXPRESSED IN PLACENTA, SIGNAL = 0.72; EXPRESSED IN BONE MARROW, SIGNAL = 0.74; EXPRESSED IN ADULT LIVER, SIGNAL = 0.7
PWLVVLSLGPSSPSASLLELSLSKALPQDGLPLEVQGRDVDSGYFKALRVFLRQLQIESLTPEE

SEQ ID NO: 46837 - protein, 343 aa, Homo sapiens
  MAP TO AC010872.3; EXPRESSED IN ADULT LIVER, SIGNAL = 5.7; EXPRESSED IN FETAL LIVER, SIGNAL =  26; EST_HUMAN HIT: AI174984.1, EVALUE 2.00e-60; SWISSPROT HIT: P04114, EVALUE 0.00e+00
DFVTKSYNETKIKFDKYKAEKSHDELPRTFQIPGYTVPVVNVEVSPFTIEMSAFGYVFPKAVSMPSFSILGSDVRVPSYTLILPSLELPVLHVPRNLKLSLPDFKELCTISHIFIPAMGNITYDFSFKSSVITLNTNAELFNQSDIVAHLLSSSSSVIDALQYKLEGTTRLTRKRGLKLATALSLSNKFVEGSHNSTVSLTTKNMEVSVATTTKAQIPILRMNFKQELNGNTKSKPTVSSSMEFKYDFNSSMLYSTAKGAVDHKLSLESLTSYFSIESSTKGDVKGSVLSREYSGTIASEANTYLNSKSTRSSVKLQGTSKIDDIWNLEVKENFAGEATLQRI

SEQ ID NO: 46838 - protein, 23 aa, Homo sapiens
  MAP TO AP000039.1; EXPRESSED IN LUNG, SIGNAL = 0.65; EXPRESSED IN ADULT LIVER, SIGNAL = 0.65
EHFKVLQLKPSHCLCGHLIHITE

SEQ ID NO: 46839 - protein, 56 aa, Homo sapiens
  MAP TO AP000039.1; EXPRESSED IN LUNG, SIGNAL = 0.65; EXPRESSED IN ADULT LIVER, SIGNAL = 0.65; EST_HUMAN HIT: BE958756.1, EVALUE 2.80e+00; SWISSPROT HIT: P70698, EVALUE 7.70e+00
WEECGVETHAGLQKQVVTCSQVQCPLVQGCATPLPVEVKEGCWLFCYVDEMPTQAV

SEQ ID NO: 46840 - protein, 37 aa, Homo sapiens
  MAP TO AL078477.5; EXPRESSED IN ADULT LIVER, SIGNAL = 0.72; EXPRESSED IN HELA, SIGNAL = 0.72; EXPRESSED IN PLACENTA, SIGNAL = 0.66; SWISSPROT HIT: P13496, EVALUE 1.60e+00
TLERDNELQREKVKENEEKFLNLQNEHEKALGTWKRH

SEQ ID NO: 46841 - protein, 178 aa, Homo sapiens
  MAP TO AC007981.24; EXPRESSED IN ADULT LIVER, SIGNAL = 1.1; EXPRESSED IN HELA, SIGNAL = 1.4; EST_HUMAN HIT: AI904151.1, EVALUE 3.00e-35; SWISSPROT HIT: P18899, EVALUE 2.20e-02
TLYMTLLTRTLYKALLTRTLYTTSLMRTPYKTSPMRMLYMTSLMTPTRHANEDAVDDIAYKDTVQDITSEDAVYDIANEDVVYDIANEDALQDIANEVAVYDIANEDIVYDIANEDALYDITNEDAVYNIANEDAVYGIANEDAVYEFANKHAVYDIANEDTVQDICKKEDAANVRHF

SEQ ID NO: 46842 - protein, 33 aa, Homo sapiens
  MAP TO Z83845.14; EXPRESSED IN ADULT LIVER, SIGNAL = 0.71; SWISSPROT HIT: O71154, EVALUE 4.80e+00
DNWPKSSWGAQWRSLQKHLLCFWNCWQHPKVKW

SEQ ID NO: 46843 - protein, 39 aa, Homo sapiens
  MAP TO AC005060.2; EXPRESSED IN FETAL LIVER, SIGNAL = 1.2; EXPRESSED IN BONE MARROW, SIGNAL = 0.63; EXPRESSED IN LUNG, SIGNAL = 0.59; EXPRESSED IN ADULT LIVER, SIGNAL = 1.6; SWISSPROT HIT: Q05471, EVALUE 9.30e-01
MESMTYSTERKTNSLPLHSVKSIKSDFIDKAEESTQSKE

SEQ ID NO: 46844 - protein, 95 aa, Homo sapiens
  MAP TO AC004964.2; EXPRESSED IN PLACENTA, SIGNAL = 0.66; EXPRESSED IN ADULT LIVER, SIGNAL = 2.5; EST_HUMAN HIT: AW510591.1, EVALUE 5.00e-01; SWISSPROT HIT: O06491, EVALUE 2.30e+00
LRQGDGVSEAAGQQSTKKGVPSPHALTQPSTLCGQVGIQPDISVNLRDTRKEDEENLNCNSVLKPDAREVAGSDSVYLKIANLSFPQWSEKAQDE

SEQ ID NO: 46845 - protein, 51 aa, Homo sapiens
  MAP TO AL079305.2; EXPRESSED IN ADULT LIVER, SIGNAL = 1.5; SWISSPROT HIT: P39969, EVALUE 4.50e+00
TSSGKCCLMVLPASPSAAESKCYTRSRDHFRTEVVDAGKIKIQDNVETVYQ

SEQ ID NO: 46846 - protein, 1263 aa, Homo sapiens
  MAP TO AC010872.3; EXPRESSED IN FETAL LIVER, SIGNAL = 9.4; EXPRESSED IN ADULT LIVER, SIGNAL = 6.2; SWISSPROT HIT: P04114, EVALUE 0.00e+00; EST_HUMAN HIT: AA702484.1, EVALUE 0.00e+00; EST_HUMAN HIT: AA702484.1, EVALUE 0.00e+00
SYKADTVAKVQGVEFSHRLNTDIAGLASAIDMSTNYNSDSLHFSNVFRSVMAPFTMTIDAHTNGNGKLALWGEHTGQLYSKFLLKAEPLAFTFSHDYKGSTSHHLVSRKSISAALEHKVSALLTPAEQTGTWKLKTQFNNNEYSQDLDAYNTKDKIGVELTGRTLADLTLLDSPIKVPLLLSEPINIIDALEMRDAVEKPQEFTIVAFVKYDKNQDVHSINLPFFETLQEYFERNRQTIIVVLENVQRNLKHINIDQFVRKYRAALGKLPQQANDYLNSFNWERQVSHAKEKLTALTKKYRITENDIQIALDDAKINFNEKLSQLQTYMIQFDQYIKDSYDLHDLKIAIANIIDEIIEKLKSLDEHYHIRVNLVKTIHDLHLFIENIDFNKSGSSTASWIQNVDTKYQIRIQIQEKLQQLKRHIQNIDIQHLAGKLKQHIEAIDVRVLLDQLGTTISFERINDILEHVKHFVINLIGDFEVAEKINAFRAKVHELIERYEVDQQIQVLMDKLVELAHQYKLKETIQKLSNVLQQVKIKDYFEKLVGFIDDAVKKLNELSFKTFIEDVNKFLDMLIKKLKSFDYHQFVDETNDKIREVTQRLNGEIQALELPQKAEALKLFLEETKATVAVYLESLQDTKITLIINWLQEALSSASLAHMKAKFRETLEDTRDRMYQMDIQQELQRYLSLVGQVYSTLVTYISDWWTLAAKNLTDFAEQYSIQDWAKRMKALVEQGFTVPEIKTILGTMPAFEVSLQALQKATFQTPDFIVPLTDLRIPSVQINFKDLKNIKIPSRFSTPEFTILNTFHIPSFTIDFVEMKVKIIRTIDQMLNSELQWPVPDIYLRDLKVEDIPLARITLPDFRLPEIAIPEFIIPTLNLNDFQVPDLHIPEFQLPHISHTIEVPTFGKLYSILKIQSPLFTLDANADIGNGTTSANEAGIAASITAKGESKLEVLNFDFQANAQLSNPKINPLALKESVKFSSKYLRTEHGSEMLFFGNAIEGKSNTVASLHTEKNTLELSNGVIVKINNQLTLDSNTKYFHKLNIPKLDFSSQADLRNEIKTLLKAGHIAWTSSGKGSWKWACPRFSDEGTHESQISFTIEGPLTSFGLSNKINSKHLRVNQNLVYESGSLNFSKLEIQSQVDSQHVGHSVLTAKGMALFGEGKAEFTGRHDAHLNGKVIGTLKNSLFFSAQPFEITASTNNEGNLKVRFPLRLTGKIDFLNNYALFLSPSAQQASWQVSARFNQYKYNQNFSAGNNENIME

SEQ ID NO: 46847 - protein, 66 aa, Homo sapiens
  MAP TO AC009497.2; EXPRESSED IN BT474, SIGNAL = 1.5; EXPRESSED IN ADULT LIVER, SIGNAL = 1.2; SWISSPROT HIT: gi127998, EVALUE 8.00e-04; EST_HUMAN HIT: BF673026.1, EVALUE 4.00e-33
RLYRSVYEKNKMKIHIVPDMVEMVTAKDSQKKVSEIDYRLRLHEWICHPDLQVNDHVRKVTDQISD

SEQ ID NO: 46848 - protein, 85 aa, Homo sapiens
  MAP TO AL031117.1; EXPRESSED IN ADULT LIVER, SIGNAL = 1.3; SWISSPROT HIT: Q92178, EVALUE 1.00e-04; EST_HUMAN HIT: AU139678.1, EVALUE 5.00e-31
LLGCYEALDGLTITDIIVDFTGTLAETVDMQKGRYTELVEEKYKLFGELYKTFTKGGLICCSIEVCTHEKQPLYTHSWQKRLQSL

SEQ ID NO: 46849 - protein, 67 aa, Homo sapiens
  MAP TO AL031282.1; EXPRESSED IN ADULT LIVER, SIGNAL = 3.5; EST_HUMAN HIT: AW966554.1, EVALUE 3.00e-25; SWISSPROT HIT: P54311, EVALUE 3.00e-26
ALWDIETGQQTTTFTGHTGDVMSLSLAPDTRLFVSGACDASAKLWDVREGMCRQTFTGHESDINAIC

SEQ ID NO: 46850 - protein, 59 aa, Homo sapiens
  MAP TO AC007037.2; EXPRESSED IN ADULT LIVER, SIGNAL = 0.96; SWISSPROT HIT: Q10961, EVALUE 1.50e+00
GKQLMRIPHEIVLSSCTKGLAGVWKAWEMSFVDLVLEGCLMLGGQVPGAWQVIVHGSGG

SEQ ID NO: 46851 - protein, 36 aa, Homo sapiens
  MAP TO AC007364.2; EXPRESSED IN FETAL LIVER, SIGNAL = 0.61; EXPRESSED IN ADULT LIVER, SIGNAL = 2.6
LMKMEKKRQVTKPIGGKVETKAKYNTYGNDISNHRL

SEQ ID NO: 46852 - protein, 68 aa, Homo sapiens
  MAP TO AL049812.4; EXPRESSED IN ADULT LIVER, SIGNAL = 1.4; SWISSPROT HIT: P08281, EVALUE 3.30e+00; EST_HUMAN HIT: BF676729.1, EVALUE 9.60e+00
WQSPPFRQYHLSPSDHWKRKGRREYLLGNEVEKVSWSRLLAEEFESILGSANFKSFTSKEENVKVAFR

SEQ ID NO: 46853 - protein, 26 aa, Homo sapiens
  MAP TO AL049812.4; EXPRESSED IN ADULT LIVER, SIGNAL = 1.4
GKALPSGSITFHPQTTGKERVGESTY

SEQ ID NO: 46854 - protein, 27 aa, Homo sapiens
  MAP TO AL049833.3; EXPRESSED IN ADULT LIVER, SIGNAL = 1.2
AVVWSWPSSSSYWLARAAITKSCSLGG

SEQ ID NO: 46855 - protein, 26 aa, Homo sapiens
  MAP TO AL031542.1; EXPRESSED IN FETAL LIVER, SIGNAL =   1; EXPRESSED IN ADULT LIVER, SIGNAL = 1.1; EXPRESSED IN BT474, SIGNAL = 0.94
EKKVEEKFTELEMSGGKFCFEEENRK

SEQ ID NO: 46856 - protein, 39 aa, Homo sapiens
  MAP TO AL109933.8; EXPRESSED IN FETAL LIVER, SIGNAL = 3.3; EXPRESSED IN BONE MARROW, SIGNAL = 1.1; EXPRESSED IN HBL100, SIGNAL =   1; EXPRESSED IN ADULT LIVER, SIGNAL = 1.9; EST_HUMAN HIT: T60602.1, EVALUE 8.00e-19; SWISSPROT HIT: P12545, EVALUE 9.00e-20
ECMHCSGENYDGKISKTMSGLECQAWDSQSPHAHGYIPS

SEQ ID NO: 46857 - protein, 31 aa, Homo sapiens
  MAP TO AL050335.17; EXPRESSED IN ADULT LIVER, SIGNAL = 0.91
IKMEQSGGLGEKDNVVVIYCFGTPRSIHPTF

SEQ ID NO: 46858 - protein, 32 aa, Homo sapiens
  MAP TO AF188024.1; EXPRESSED IN HBL100, SIGNAL = 0.97; EXPRESSED IN ADULT LIVER, SIGNAL = 1.1
CTWAELASAFICAAVLASISHLNGKTPQKRKK

SEQ ID NO: 46859 - protein, 39 aa, Homo sapiens [sequence omitted]

SEQ ID NO: 46860 - protein, 45 aa, Homo sapiens
  MAP TO AC012528.1; EXPRESSED IN ADULT LIVER, SIGNAL = 0.98; SWISSPROT HIT: Q09990, EVALUE 6.10e+00; EST_HUMAN HIT: BE263117.1, EVALUE 4.10e-01
KFLWCKRWWHNVSNSWKRGNSTGRSKSTCSRGSAMATDMKCCCEH

SEQ ID NO: 46861 - protein, 82 aa, Homo sapiens
  MAP TO AC009336.2; EXPRESSED IN HBL100, SIGNAL = 1.3; EXPRESSED IN ADULT LIVER, SIGNAL =   1; EST_HUMAN HIT: AI971733.1, EVALUE 3.00e-36; SWISSPROT HIT: P35453, EVALUE 4.00e-42
DVALNQPDMCVYRRGRKKRVPYTKLQLKELENEYAINKFINKDKRRRISAATNLSERQVTIWFQNRRVKDKKIVSKLKDTVS

SEQ ID NO: 46862 - protein, 1706 aa, Homo sapiens
  MAP TO AC010872.3; EXPRESSED IN ADULT LIVER, SIGNAL = 5.9; EXPRESSED IN FETAL LIVER, SIGNAL = 8.1; SWISSPROT HIT: P04114, EVALUE 0.00e+00; EST_HUMAN HIT: AA702484.1, EVALUE 0.00e+00; EST_HUMAN HIT: AA702484.1, EVALUE 0.00e+00
SGETTYDHKNTFTLSYDGSLRHKFLDSNIKFSHVEKLGNNPVSKGLLIFDASSSWGPQMSASVHLDSKKKQHLFVKEVKIDGQFRVSSFYAKGTYGLSCQRDPNTGRLNGESNLRFNSSYLQGTNQITGRYEDGTLSLTSTSDLQSGIIKNTASLKYENYELTLKSDTNGKYKNFATSNKMDMTFSKQNALLRSEYQADYESLRFFSLLSGSLNSHGLELNADILGTDKINSGAHKATLRIGQDGISTSATTNLKCSLLVLENELNAELGLSGASMKLTTNGRFREHNAKFSLDGKAALTELSLGSAYQAMILGVDSKNIFNFKVSQEGLKLSNDMMGSYAEMKFDHTNSLNIAGLSLDFSSKLDNIYSSDKFYKQTVNLQLQPYSLVTTLNSDLKYNALDLTNNGKLRLEPLKLHVAGNLKGAYQNNEIKHIYAISSAALSASYKADTVAKVQGVEFSHRLNTDIAGLASAIDMSTNYNSDSLHFSNVFRSVMAPFTMTIDAHTNGNGKLALWGEHTGQLYSKFLLKAEPLAFTFSHDYKGSTSHHLVSRKSISAALEHKVSALLTPAEQTGTWKLKTQFNNNEYSQDLDAYNTKDKIGVELTGRTLADLTLLDSPIKVPLLLSEPINIIDALEMRDAVEKPQEFTIVAFVKYDKNQDVHSINLPFFETLQEYFERNRQTIIVVLENVQRNLKHINIDQFVRKYRAALGKLPQQANDYLNSFNWERQVSHAKEKLTALTKKYRITENDIQIALDDAKINFNEKLSQLQTYMIQFDQYIKDSYDLHDLKIAIANIIDEIIEKLKSLDEHYHIRVNLVKTIHDLHLFIENIDFNKSGSSTASWIQNVDTKYQIRIQIQEKLQQLKRHIQNIDIQHLAGKLKQHIEAIDVRVLLDQLGTTISFERINDILEHVKHFVINLIGDFEVAEKINAFRAKVHELIERYEVDQQIQVLMDKLVELAHQYKLKETIQKLSNVLQQVKIKDYFEKLVGFIDDAVKKLNELSFKTFIEDVNKFLDMLIKKLKSFDYHQFVDETNDKIREVTQRLNGEIQALELPQKAEALKLFLEETKATVAVYLESLQDTKITLIINWLQEALSSASLAHMKAKFRETLEDTRDRMYQMDIQQELQRYLSLVGQVYSTLVTYISDWWTLAAKNLTDFAEQYSIQDWAKRMKALVEQGFTVPEIKTILGTMPAFEVSLQALQKATFQTPDFIVPLTDLRIPSVQINFKDLKNIKIPSRFSTPEFTILNTFHIPSFTIDFVEMKVKIIRTIDQMLNSELQWPVPDIYLRDLKVEDIPLARITLPDFRLPEIAIPEFIIPTLNLNDFQVPDLHIPEFQLPHISHTIEVPTFGKLYSILKIQSPLFTLDANADIGNGTTSANEAGIAASITAKGESKLEVLNFDFQANAQLSNPKINPLALKESVKFSSKYLRTEHGSEMLFFGNAIEGKSNTVASLHTEKNTLELSNGVIVKINNQLTLDSNTKYFHKLNIPKLDFSSQADLRNEIKTLLKAGHIAWTSSGKGSWKWACPRFSDEGTHESQISFTIEGPLTSFGLSNKINSKHLRVNQNLVYESGSLNFSKLEIQSQVDSQHVGHSVLTAKGMALFGEGKAEFTGRHDAHLNGKVIGTLKNSLFFSAQPFEITASTNNEGNLKVRFPLRLTGKIDFLNNYALFLSPSAQQASWQVSARFNQYKYNQNFSAGNNENIME

SEQ ID NO: 46863 - protein, 105 aa, Homo sapiens
  MAP TO AF070718.1; EXPRESSED IN LUNG, SIGNAL = 1.1; EXPRESSED IN PLACENTA, SIGNAL =   1; EXPRESSED IN ADULT LIVER, SIGNAL =   1; EST_HUMAN HIT: AA984295.1, EVALUE 2.00e-29; SWISSPROT HIT: P27401, EVALUE 3.00e-08
GIPAGIAEIIATIKDLKDARVVIPITSFINSPIQPVQKADGSWRMTVDYCKLNKVVTPIAAAVPDVVSLLEQINTSPGTWYAAIYLANAFFSIPVHKVHQKQFAF

SEQ ID NO: 46864 - protein, 36 aa, Homo sapiens
  MAP TO AL031905.7; EXPRESSED IN LUNG, SIGNAL = 2.1; EXPRESSED IN ADULT LIVER, SIGNAL = 0.91; EXPRESSED IN HBL100, SIGNAL = 2.2; EST_HUMAN HIT: BE077198.1, EVALUE 1.00e-14; SWISSPROT HIT: P43772, EVALUE 4.80e+00
YIRIVGTHNTVNKIFHIVAFECMFTNKTFTLEKGLI

SEQ ID NO: 46865 - protein, 25 aa, Homo sapiens
  MAP TO AL023807.6; EXPRESSED IN BONE MARROW, SIGNAL = 0.97; EXPRESSED IN ADULT LIVER, SIGNAL = 0.73
ICAFKVMMEKPCVFTPHKTVNNLTQ

SEQ ID NO: 46866 - protein, 18 aa, Homo sapiens
  MAP TO AC004998.2; EXPRESSED IN ADULT LIVER, SIGNAL = 1.5
CTALVKAMNSAFWADVPG

SEQ ID NO: 46867 - protein, 72 aa, Homo sapiens [sequence omitted]

SEQ ID NO: 46868 - protein, 30 aa, Homo sapiens [sequence omitted]

SEQ ID NO: 46869 - protein, 37 aa, Homo sapiens; identical to SEQ ID NO: 38178
  MAP TO AL078623.21; EXPRESSED IN ADULT LIVER, SIGNAL =   1; EXPRESSED IN FETAL LIVER, SIGNAL = 0.93

SEQ ID NO: 46870 - protein, 203 aa, Homo sapiens
  MAP TO AC010872.3; EXPRESSED IN ADULT LIVER, SIGNAL = 0.99; EST_HUMAN HIT: AW953670.1, EVALUE 2.00e-04; SWISSPROT HIT: P25823, EVALUE 2.00e-09
QNPYDLIRPQIKDLPQPQIYLNAKVKGYVSNISNPANFHIQLAENESVIIRLADALNATARRLRERKSVKPLVGDLVVAEYSGDNAIYRAVIKKILPGNSFEVEFIDYGNSAIVNTSKIYELQREFLTVPQLGIHAFLSGVKWNEPDEIWDDKTVDYFTSKVHNKTVYCEFLKKHDQKWEVNMICDEKCVINELLKWKACSKL

SEQ ID NO: 46871 - protein, 31 aa, Homo sapiens
  MAP TO AC008269.1; EXPRESSED IN BONE MARROW, SIGNAL = 0.65; EXPRESSED IN ADULT LIVER, SIGNAL = 0.92; EST_HUMAN HIT: BE382722.1, EVALUE 2.00e-11
VEDPESLNMKNILSILHTYSSLNHVYKCQNK

SEQ ID NO: 46872 - protein, 43 aa, Homo sapiens
  MAP TO AC007395.2; EXPRESSED IN ADULT LIVER, SIGNAL = 0.71; SWISSPROT HIT: P41134, EVALUE 1.00e-03; EST_HUMAN HIT: BF035262.1, EVALUE 1.40e-02
ARLKALVPFLPQSRKPSKVDILKGATEYIQVLSDLLEGAKDSK

SEQ ID NO: 46873 - protein, 24 aa, Homo sapiens
  MAP TO AC009786.1; EXPRESSED IN ADULT LIVER, SIGNAL = 1.2; EXPRESSED IN LUNG, SIGNAL =  14
  unsure 18
PFILLCRKSISSGKAILXKSTALW

SEQ ID NO: 46874 - protein, 29 aa, Homo sapiens
  MAP TO AC010135.1; EXPRESSED IN HELA, SIGNAL = 0.97; EXPRESSED IN ADULT LIVER, SIGNAL =   1; EST_HUMAN HIT: AW382442.1, EVALUE 5.00e-07; SWISSPROT HIT: Q16831, EVALUE 8.30e+00
LLNVKTMKMKTFMMIHFHLINSKYIFSSL

SEQ ID NO: 46875 - protein, 54 aa, Homo sapiens
  MAP TO AC010937.2; EXPRESSED IN ADULT LIVER, SIGNAL = 1.4; EST_HUMAN HIT: BF331740.1, EVALUE 1.00e-25; SWISSPROT HIT: P09929, EVALUE 8.90e-01
AGITVLLTMLATGPSEGGYADNTPKYSGRLGGWRSLLSHITPDEPSAAARQDFY

SEQ ID NO: 46876 - protein, 80 aa, Homo sapiens
  MAP TO AC009893.1; EXPRESSED IN ADULT LIVER, SIGNAL = 0.92; SWISSPROT HIT: O15945, EVALUE 1.40e+00; EST_HUMAN HIT: BE620789.1, EVALUE 2.20e-01
VLLQQASAACAAFPAPGFSWAHGFPGTHLLHCGQPLPHQVLAAQAASPTQGSQHKEQPASSSSTGLGYFLAECIQQDTSL

SEQ ID NO: 46877 - protein, 33 aa, Homo sapiens
  MAP TO AC011504.2; EXPRESSED IN ADULT LIVER, SIGNAL =   1; EST_HUMAN HIT: BE064272.1, EVALUE 9.00e-02
ISSIGTARSNGRSTFSSLRNLLFSTVVVLVLVT

SEQ ID NO: 46878 - protein, 18 aa, Homo sapiens
  MAP TO AC011504.2; EXPRESSED IN ADULT LIVER, SIGNAL =   1
LLRELVQPLWKTEDSLKN

SEQ ID NO: 46879 - protein, 60 aa, Homo sapiens
  MAP TO AC012130.1; EXPRESSED IN ADULT LIVER, SIGNAL = 1.1; EST_HUMAN HIT: AI279229.1, EVALUE 2.30e+00; SWISSPROT HIT: P17147, EVALUE 4.40e+00
SYFEPRYILVVPMNKEKYEGYLRRKGLFSRAEIEFAVSRVDLYIKINQNFPGYFDEVINA

SEQ ID NO: 46880 - protein, 26 aa, Homo sapiens
  MAP TO AL049756.16; EXPRESSED IN ADULT LIVER, SIGNAL = 0.91
TLHMAPAEAPTISAAAVAAASVCGAH

SEQ ID NO: 46881 - protein, 59 aa, Homo sapiens
  MAP TO AP000494.1; EXPRESSED IN LUNG, SIGNAL = 7.1; EXPRESSED IN ADULT LIVER, SIGNAL = 1.2; EST_HUMAN HIT: AW270799.1, EVALUE 3.00e-04; SWISSPROT HIT: P12690, EVALUE 2.00e+00
IPNDLVKMHILTPEGCGLRFCISNTLPGDVTMLVHGPYSSSKGINDMITLPNNTKRPRK

SEQ ID NO: 46882 - protein, 59 aa, Homo sapiens
  MAP TO AL008638.1; EXPRESSED IN HBL100, SIGNAL =   1; EXPRESSED IN ADULT LIVER, SIGNAL = 1.2
TGQSDHIRVFCVNLFWLPVGRRLESFDSFENASNLGLGQPKIIKRRTVTKVCKGSNPCN

SEQ ID NO: 46883 - protein, 121 aa, Homo sapiens
  MAP TO AL031123.9; EXPRESSED IN ADULT LIVER, SIGNAL = 0.92; EXPRESSED IN LUNG, SIGNAL =  10; EST_HUMAN HIT: AV763053.1, EVALUE 3.00e-47; SWISSPROT HIT: O35973, EVALUE 2.20e-01
GYCLCLISRDHICSSQNKVCSAAGQFTAKIPNLRAEPKPEERKVTIGPKPHSRFQMSFCSPRAINCCLLAAARSLGPYTACIKSLQRLGGWRWETDGGLRFVFPKFTASPGGGGCSEGPPR

SEQ ID NO: 46884 - protein, 32 aa, Homo sapiens
  MAP TO AL031123.9; EXPRESSED IN ADULT LIVER, SIGNAL = 0.92; EXPRESSED IN LUNG, SIGNAL =  10
AIASASSPETTSAAPKTRSVLQLDNSLLKSQT

SEQ ID NO: 46885 - protein, 79 aa, Homo sapiens; identical to SEQ ID NO: 37001
  MAP TO AC007098.2; EXPRESSED IN ADULT LIVER, SIGNAL = 1.1; SWISSPROT HIT: Q59536, EVALUE 7.30e-02; EST_HUMAN HIT: Z21249.1, EVALUE 5.00e-41

SEQ ID NO: 46886 - protein, 24 aa, Homo sapiens
  MAP TO AC007098.2; EXPRESSED IN ADULT LIVER, SIGNAL = 1.1; EST_HUMAN HIT: AI334308.1, EVALUE 5.00e-06
LEKQKTLFIITAIIPLKRCRLHSI

SEQ ID NO: 46887 - protein, 42 aa, Homo sapiens
  MAP TO AC008169.1; EXPRESSED IN ADULT LIVER, SIGNAL = 0.68; EXPRESSED IN PLACENTA, SIGNAL = 0.66; EST_HUMAN HIT: AI381520.1, EVALUE 5.00e-19; SWISSPROT HIT: P93107, EVALUE 6.00e-04
GHMIASCDACGVTKLWDFRKLLPIVSIDIGPSPGNEVNFDSS

SEQ ID NO: 46888 - protein, 88 aa, Homo sapiens
  MAP TO AC010906.2; EXPRESSED IN ADULT LIVER, SIGNAL = 1.1; EST_HUMAN HIT: AA526781.1, EVALUE 5.00e-38; SWISSPROT HIT: P08150, EVALUE 3.60e-01
MDTTSFPQAGEAPISPIQGISVVAWHKGAGPAVGGLARQLSQDLSLEGSALLLPVAFPQVCGLEFAWMEPGATSEASGRQLRGGVLCC

SEQ ID NO: 46889 - protein, 48 aa, Homo sapiens
  MAP TO AC010906.2; EXPRESSED IN ADULT LIVER, SIGNAL = 1.1; EST_HUMAN HIT: AA526781.1, EVALUE 1.00e-20; SWISSPROT HIT: P03118, EVALUE 7.90e+00
HNTAPLPAAVCHLLHLWHLVPSKQTRVRTPVGRQPAGARQSPRGKGPG

SEQ ID NO: 46890 - protein, 147 aa, Homo sapiens
  MAP TO AC012130.1; EXPRESSED IN ADULT LIVER, SIGNAL = 1.1; EST_HUMAN HIT: AU132393.1, EVALUE 5.70e-01; SWISSPROT HIT: P12259, EVALUE 5.00e-04
GAPASKKTVSGVPAHLVPSPRCLAKLQADGQMTEHLSGMQIHAKHLENQSVTPAQNQELAQDGETHQKELSPDSHLNPELPQHLSSSALGLPQQAQDLSLNPTEEDVQQSDLPLKQIATETDVPEMEASEVGQSPITPTLVPPVHPS

SEQ ID NO: 46891 - protein, 24 aa, Homo sapiens
  MAP TO AC012130.1; EXPRESSED IN ADULT LIVER, SIGNAL = 1.1
LSLGCQHTWFHLPGAWRNCKQMAR

SEQ ID NO: 46892 - protein, 50 aa, Homo sapiens; identical to SEQ ID NO: 37153
  MAP TO AL080312.8; EXPRESSED IN ADULT LIVER, SIGNAL = 1.2; EST_HUMAN HIT: AL133853.1, EVALUE 1.00e-05; SWISSPROT HIT: P08548, EVALUE 7.00e-03

SEQ ID NO: 46893 - protein, 54 aa, Homo sapiens
  MAP TO AL118499.5; EXPRESSED IN ADULT LIVER, SIGNAL = 0.98; EXPRESSED IN LUNG, SIGNAL = 0.96; EST_HUMAN HIT: BE278123.1, EVALUE 1.00e-20
FMESELDLNDIIQEMHVVATMPDLYHLLVELNAVQSLLGLLGHDNTDILSDLTS

SEQ ID NO: 46894 - protein, 17 aa, Homo sapiens
  MAP TO AL118499.5; EXPRESSED IN ADULT LIVER, SIGNAL = 0.98; EXPRESSED IN LUNG, SIGNAL = 0.96
RCTWWPPCQTCTTFWWS

SEQ ID NO: 46895 - protein, 38 aa, Homo sapiens
  MAP TO AL118519.5; EXPRESSED IN ADULT LIVER, SIGNAL = 0.98; EST_HUMAN HIT: AW008066.1, EVALUE 7.30e+00
TVLLGIFMYMNLIENLHNRYRSYSIFNSESIPFGSLCL

SEQ ID NO: 46896 - protein, 37 aa, Homo sapiens
  MAP TO AC006296.8; EXPRESSED IN ADULT LIVER, SIGNAL = 1.1
LDTSLIPGIFYSPDTGRFNDLRVTLAHFDFVSKHVYY

SEQ ID NO: 46897 - protein, 33 aa, Homo sapiens
  MAP TO AL109941.9; EXPRESSED IN ADULT LIVER, SIGNAL = 1.9
MEDGEDWQEPQRAALEYSASADQQVRARKLTKA

SEQ ID NO: 46898 - protein, 32 aa, Homo sapiens
  MAP TO AL033521.2; EXPRESSED IN ADULT LIVER, SIGNAL =   1; EXPRESSED IN LUNG, SIGNAL = 1.4; SWISSPROT HIT: Q49424, EVALUE 4.80e+00
VKSNYFLHGKSNHKQHKNIAKGEKSGNHIMKG

SEQ ID NO: 46899 - protein, 67 aa, Homo sapiens
  MAP TO AC007421.11; EXPRESSED IN ADULT LIVER, SIGNAL = 2.5; EST_HUMAN HIT: AW949828.1, EVALUE 4.00e-05; SWISSPROT HIT: P14689, EVALUE 5.00e-25
SQGPLILLPTFLQVEVKMEGDSVLLEVDGEEVLRLRQVSGPLTSKRHPIMRIALGGLLFPASNLRLP

SEQ ID NO: 46900 - protein, 38 aa, Homo sapiens
  MAP TO AL035457.13; EXPRESSED IN ADULT LIVER, SIGNAL = 1.3; EXPRESSED IN BT474, SIGNAL = 0.96; EST_HUMAN HIT: AA702383.1, EVALUE 9.80e-01
FQIKRLRLTKRASHLCPASSLGCRRGSETQHLELWQPS

SEQ ID NO: 46901 - protein, 76 aa, Homo sapiens
  MAP TO AC007163.2; EXPRESSED IN ADULT LIVER, SIGNAL = 1.2; SWISSPROT HIT: Q06278, EVALUE 2.00e-39; EST_HUMAN HIT: AV655595.1, EVALUE 4.00e-39
VRIINMYKEIDQTPYKQEINAKNLIQCWRECMAMSSYSLRKVAVEKFNAENYWKKKGLAMVPLKFPVGLGSRAAGQ

SEQ ID NO: 46902 - protein, 43 aa, Homo sapiens
  MAP TO AC007446.8; EXPRESSED IN ADULT LIVER, SIGNAL = 0.91; SWISSPROT HIT: P00520, EVALUE 3.60e+00; EST_HUMAN HIT: BE620555.1, EVALUE 4.10e+00
VCDFEYKNGQGQSNKHLDLTTSGLWYPGPCSRNCKPCSHQESK

SEQ ID NO: 46903 - protein, 42 aa, Homo sapiens
  MAP TO AC007446.8; EXPRESSED IN ADULT LIVER, SIGNAL = 0.91
RFVTLNTRMGRASQINIWTSQPQGCGTLGHAAGTANLAHTKK

SEQ ID NO: 46904 - protein, 64 aa, Homo sapiens
  MAP TO L10641.1; EXPRESSED IN FETAL LIVER, SIGNAL = 8.5; EXPRESSED IN ADULT LIVER, SIGNAL = 1.1; EST_HUMAN HIT: R11123.1, EVALUE 1.00e-33; SWISSPROT HIT: P02774, EVALUE 9.00e-35
HTVKLCDNLSTKNSKFEDCCQEKTAMDVFVCTYFMPAAQLPELPDVELPTNKDVCDPGNTKVMD

SEQ ID NO: 46905 - protein, 44 aa, Homo sapiens
  MAP TO AC007690.11; EXPRESSED IN ADULT LIVER, SIGNAL = 1.1; EST_HUMAN HIT: AW291061.1, EVALUE 3.00e-08; SWISSPROT HIT: P27920, EVALUE 4.60e+00
NYCVPGALCTKLFIYSSHKPMKRGVSSPFSDEVTRALVTARAQS

SEQ ID NO: 46906 - protein, 20 aa, Homo sapiens
  MAP TO AC007690.11; EXPRESSED IN ADULT LIVER, SIGNAL = 1.1; EST_HUMAN HIT: AW291061.1, EVALUE 4.00e-04
TTVCQVLYVLSYSFILHTSL

SEQ ID NO: 46907 - protein, 41 aa, Homo sapiens
  MAP TO AC009234.2; EXPRESSED IN ADULT LIVER, SIGNAL = 0.76
IKLNQTDGINNYVKPIKVFEGFVVEVKCDNPRKHLASAWYT

SEQ ID NO: 46908 - protein, 78 aa, Homo sapiens
  MAP TO AC009224.1; EXPRESSED IN ADULT LIVER, SIGNAL = 0.85; EST_HUMAN HIT: BE895093.1, EVALUE 7.20e+00; SWISSPROT HIT: Q04719, EVALUE 3.10e+00
QSPERAVRKSPAKTELTPGVQRVLHGCCLYICTGYISYILRIERQLQDPGMSKLCYQKAFLSHHPVGKRSQKGTKNNK

SEQ ID NO: 46909 - protein, 41 aa, Homo sapiens
  MAP TO AC006464.3; EXPRESSED IN LUNG, SIGNAL = 0.63; EXPRESSED IN PLACENTA, SIGNAL = 0.6; EXPRESSED IN BONE MARROW, SIGNAL = 0.52; EXPRESSED IN ADULT LIVER, SIGNAL = 0.51; SWISSPROT HIT: Q98631, EVALUE 3.70e+00
GPSKGVSAQCLFDLLQSLEGETTDILDILELVKAEKPLKSL

SEQ ID NO: 46910 - protein, 93 aa, Homo sapiens
  MAP TO AC004949.1; EXPRESSED IN ADULT LIVER, SIGNAL = 0.52; EXPRESSED IN PLACENTA, SIGNAL = 0.59; EXPRESSED IN LUNG, SIGNAL = 0.78; EXPRESSED IN BONE MARROW, SIGNAL = 0.49; EST_HUMAN HIT: AL038948.1, EVALUE 1.10e+00
LTTPAFLLSCVMYSYLMLFIIIVVVFTSTLLLFISICLMPFLLICSSFSLSKCFLSGILISLMIFFTIFFDIFILAVILGLAIYILIYQNHLL

SEQ ID NO: 46911 - protein, 52 aa, Homo sapiens
  MAP TO AC003026.1; EXPRESSED IN PLACENTA, SIGNAL = 1.6; EXPRESSED IN BONE MARROW, SIGNAL = 0.53; EXPRESSED IN ADULT LIVER, SIGNAL = 0.46; EXPRESSED IN LUNG, SIGNAL = 0.61; SWISSPROT HIT: P33527, EVALUE 4.00e-21; EST_HUMAN HIT: AL043477.1, EVALUE 1.00e-16
VALCTFAVYVTIDENNILDAQTAFVSLALFNILRFPLNILPMVISSIVQVQG

SEQ ID NO: 46912 - protein, 44 aa, Homo sapiens
  MAP TO AC005019.1; EXPRESSED IN LUNG, SIGNAL = 0.57; EXPRESSED IN ADULT LIVER, SIGNAL = 0.45; SWISSPROT HIT: P47319, EVALUE 6.30e+00
PVGSYAALNGNSGLVLPIRDSDFDLDTQLAAEISHATADQITAQ

SEQ ID NO: 46913 - protein, 83 aa, Homo sapiens; identical to SEQ ID NO: 40005
  MAP TO AC006321.1; EXPRESSED IN LUNG, SIGNAL = 0.52; EXPRESSED IN ADULT LIVER, SIGNAL = 0.52; EXPRESSED IN PLACENTA, SIGNAL = 0.58; EXPRESSED IN BONE MARROW, SIGNAL = 0.6

SEQ ID NO: 46914 - protein, 34 aa, Homo sapiens
  MAP TO AC006461.2; EXPRESSED IN PLACENTA, SIGNAL = 0.67; EXPRESSED IN LUNG, SIGNAL = 0.68; EXPRESSED IN ADULT LIVER, SIGNAL = 0.62; EXPRESSED IN BONE MARROW, SIGNAL = 0.71; EST_HUMAN HIT: AW890941.1, EVALUE 1.00e-06
DSNYMTFQKRHNEGDKKKISGCQGLGQEGNEEVE

SEQ ID NO: 46915 - protein, 151 aa, Homo sapiens
  MAP TO AC004099.1; EXPRESSED IN ADULT LIVER, SIGNAL = 0.71; EXPRESSED IN BONE MARROW, SIGNAL = 0.59; EXPRESSED IN LUNG, SIGNAL = 0.55; EST_HUMAN HIT: BF130916.1, EVALUE 1.00e-80; SWISSPROT HIT: Q64623, EVALUE 3.00e-26
SEGDIGGIAQITSSLFLGRGSVASNRHLLQARGITCIVNATIEIPNFNWPQFEYVKVPLADMPHAPIGLYFDTVADKIHSVSRKHGATLVHCAAGVSRSATLCIAYLMKFHNVCLLEAYNWVKARRPVIRPNVGFWRQLIDYERQLFGKST

SEQ ID NO: 46916 - protein, 46 aa, Homo sapiens
  MAP TO AC005495.1; EXPRESSED IN ADULT LIVER, SIGNAL = 0.97; EXPRESSED IN PLACENTA, SIGNAL = 0.74; EXPRESSED IN LUNG, SIGNAL = 0.72; EXPRESSED IN BONE MARROW, SIGNAL = 0.59; EXPRESSED IN FETAL LIVER, SIGNAL = 0.73; EST_HUMAN HIT: AW808665.1, EVALUE 1.00e-06
TSVIGAPNKTHMDEILLENLPYAMGIIFNETFSYKLIFFQGYNSPL

SEQ ID NO: 46917 - protein, 36 aa, Homo sapiens
  MAP TO AC005495.1; EXPRESSED IN ADULT LIVER, SIGNAL = 0.97; EXPRESSED IN PLACENTA, SIGNAL = 0.74; EXPRESSED IN LUNG, SIGNAL = 0.72; EXPRESSED IN BONE MARROW, SIGNAL = 0.59; EXPRESSED IN FETAL LIVER, SIGNAL = 0.73; EST_HUMAN HIT: AA618196.1, EVALUE 8.60e-01; SWISSPROT HIT: P46560, EVALUE 1.30e+00
EQVSLGHQIKHTWTKYFWKIYHMLWESSLMKLSLIS

SEQ ID NO: 46918 - protein, 140 aa, Homo sapiens
  MAP TO AC004080.1; EXPRESSED IN PLACENTA, SIGNAL = 0.62; EXPRESSED IN ADULT LIVER, SIGNAL = 0.42; EXPRESSED IN LUNG, SIGNAL = 0.43; EST_HUMAN HIT: AI660911.1, EVALUE 5.00e-24
MDLLHPGVHHGLLALQAQRALVGQEQRARGGAAPCRDAWGGGGRLAAPRGRWGHGARLQGRRQLGLQDVARMQAVRWALGLRRGLLGLGRPPGAGAAAVAIGVGGVRGPMRGVQRGSRVGGLAGGPRRVVGGSGLSAAAR

SEQ ID NO: 46919 - protein, 37 aa, Homo sapiens
  MAP TO AC004080.1; EXPRESSED IN PLACENTA, SIGNAL = 0.62; EXPRESSED IN ADULT LIVER, SIGNAL = 0.42; EXPRESSED IN LUNG, SIGNAL = 0.43; EST_HUMAN HIT: AI660911.1, EVALUE 9.00e-07
PRRPGRGQRPRVPAALGRQEPAGPEGQGARGVPLDEE

SEQ ID NO: 46920 - protein, 57 aa, Homo sapiens
  MAP TO AC006313.1; EXPRESSED IN PLACENTA, SIGNAL = 0.61; EXPRESSED IN BONE MARROW, SIGNAL = 0.58; EXPRESSED IN ADULT LIVER, SIGNAL = 0.56; EXPRESSED IN LUNG, SIGNAL = 0.63; EST_HUMAN HIT: BF477726.1, EVALUE 9.00e-12; SWISSPROT HIT: O43749, EVALUE 2.00e-16
TLAVIVTPFLCIIFSYLRIMVTVLRIPSAAGKWKAFSTCGSHLTAVALFYGSIIYVY

SEQ ID NO: 46921 - protein, 25 aa, Homo sapiens
  MAP TO AC005030.1; EXPRESSED IN ADULT LIVER, SIGNAL = 0.57; EXPRESSED IN LUNG, SIGNAL = 0.46
MKTNFELMDGKEKKKEEEKEEEEEE

SEQ ID NO: 46922 - protein, 40 aa, Homo sapiens
  MAP TO AC005668.1; EXPRESSED IN LUNG, SIGNAL = 0.6; EXPRESSED IN BONE MARROW, SIGNAL = 0.64; EXPRESSED IN ADULT LIVER, SIGNAL = 0.56; EST_HUMAN HIT: BF676787.1, EVALUE 9.40e+00
IHALDPIVKGLECHAQEAGIYLEGSGKPQTSCEQKGINEH

SEQ ID NO: 46923 - protein, 66 aa, Homo sapiens
  MAP TO AC004041.1; EXPRESSED IN BONE MARROW, SIGNAL = 0.49; EXPRESSED IN ADULT LIVER, SIGNAL = 0.41; EXPRESSED IN LUNG, SIGNAL = 0.43; SWISSPROT HIT: P12753, EVALUE 9.00e-03; EST_HUMAN HIT: BE074872.1, EVALUE 2.00e-32
IDNIKRNHNLALGRQKGYEEEIIHFKKELREPQFRDAEEKYREMMIVMRTTELVNKDLDIYYKTLD

SEQ ID NO: 46924 - protein, 78 aa, Homo sapiens
  MAP TO AC006412.1; EXPRESSED IN BONE MARROW, SIGNAL = 0.5; EXPRESSED IN ADULT LIVER, SIGNAL = 0.46; EXPRESSED IN LUNG, SIGNAL = 0.59; SWISSPROT HIT: P36797, EVALUE 2.50e+00; EST_HUMAN HIT: AI076307.1, EVALUE 1.40e-01
IPLHIDKELRNVPKHKGMTNTTSQIHLCGNISWNNASINSFSEGPIRRQTKHKNLRRECLKWTFIYYKWIAIQSLLEA

SEQ ID NO: 46925 - protein, 41 aa, Homo sapiens
  MAP TO AC005589.1; EXPRESSED IN ADULT LIVER, SIGNAL = 0.46; EXPRESSED IN LUNG, SIGNAL = 0.45; EXPRESSED IN BONE MARROW, SIGNAL = 0.52; SWISSPROT HIT: P08548, EVALUE 1.00e-05; EST_HUMAN HIT: AA876319.1, EVALUE 6.00e-06
FDKIKHLFMMKTFSKLGTERCILTLIKAINKKPTAKIILKE

SEQ ID NO: 46926 - protein, 41 aa, Homo sapiens
  MAP TO AP000053.1; EXPRESSED IN PLACENTA, SIGNAL = 1.5; EXPRESSED IN LUNG, SIGNAL = 0.59; EXPRESSED IN BONE MARROW, SIGNAL = 1.4; EXPRESSED IN FETAL LIVER, SIGNAL = 0.6; EXPRESSED IN ADULT LIVER, SIGNAL = 1.7
CVKRLNLFFTPEVITMNITSSRVASHVGRCGCRSVWRMKST

SEQ ID NO: 46927 - protein, 26 aa, Homo sapiens
  MAP TO AP000233.1; EXPRESSED IN FETAL LIVER, SIGNAL = 9.3; EXPRESSED IN PLACENTA, SIGNAL = 3.6; EXPRESSED IN BONE MARROW, SIGNAL = 1.4; EXPRESSED IN ADULT LIVER, SIGNAL = 2.1; EST_HUMAN HIT: AA169135.1, EVALUE 8.00e-04
LICISVNPLYYLIGRMRAELHAPCLK

SEQ ID NO: 46928 - protein, 42 aa, Homo sapiens
  MAP TO AC003080.1; EXPRESSED IN PLACENTA, SIGNAL = 0.86; EXPRESSED IN ADULT LIVER, SIGNAL = 0.58; EXPRESSED IN LUNG, SIGNAL = 0.48; EXPRESSED IN BONE MARROW, SIGNAL = 0.54; EST_HUMAN HIT: BE089509.1, EVALUE 4.00e-15
EKSVLEEIDVIVASLLDILLRTILEITSRPQPSSSAMRFQFQ

SEQ ID NO: 46929 - protein, 41 aa, Homo sapiens
  MAP TO AC003080.1; EXPRESSED IN PLACENTA, SIGNAL = 0.86; EXPRESSED IN ADULT LIVER, SIGNAL = 0.58; EXPRESSED IN LUNG, SIGNAL = 0.48; EXPRESSED IN BONE MARROW, SIGNAL = 0.54; EST_HUMAN HIT: BE089509.1, EVALUE 5.00e-18
KICAGGNRCDSGQLAGYSAEDHIGDHQPTSAIQLSNAVPVP

SEQ ID NO: 46930 - protein, 66 aa, Homo sapiens
  MAP TO AC002480.1; EXPRESSED IN LUNG, SIGNAL = 0.67; EXPRESSED IN PLACENTA, SIGNAL = 0.61; EXPRESSED IN BONE MARROW, SIGNAL = 0.64; EXPRESSED IN ADULT LIVER, SIGNAL = 0.56; EST_HUMAN HIT: BF220231.1, EVALUE 5.00e-01; SWISSPROT HIT: O24746, EVALUE 6.80e-01
MEYRKQKIHRCGEGKGNLLESGEGRSQDDDYTLIEEGSQYRLEHRDSGGGLSTVIAKSSAIILVFL

SEQ ID NO: 46931 - protein, 38 aa, Homo sapiens
  MAP TO AC006477.2; EXPRESSED IN FETAL LIVER, SIGNAL = 0.75; EXPRESSED IN ADULT LIVER, SIGNAL = 0.81; EXPRESSED IN PLACENTA, SIGNAL = 0.94; EXPRESSED IN LUNG, SIGNAL =   1; EXPRESSED IN BONE MARROW, SIGNAL = 0.75; SWISSPROT HIT: P12698, EVALUE 6.40e+00
GSSVTVSTEDGLLKAKYLYTESSFLSSAAGDITLGSVH

SEQ ID NO: 46932 - protein, 37 aa, Homo sapiens
  MAP TO AC005022.1; EXPRESSED IN PLACENTA, SIGNAL = 0.73; EXPRESSED IN LUNG, SIGNAL = 0.62; EXPRESSED IN ADULT LIVER, SIGNAL = 0.63; SWISSPROT HIT: P53626, EVALUE 8.40e+00
EKGLIDSQFSLAGEAPGNLQLWQKVKEARGNLQLWQK

SEQ ID NO: 46933 - protein, 85 aa, Homo sapiens
  MAP TO AC004558.1; EXPRESSED IN LUNG, SIGNAL = 0.6; EXPRESSED IN BONE MARROW, SIGNAL = 0.51; EXPRESSED IN ADULT LIVER, SIGNAL = 0.5; SWISSPROT HIT: P53297, EVALUE 4.90e-01
MAQTTPTFPPLTPITIQGKTSTSPATQPLTHPHSILGRLMGSSKNQHKSSLSPKSLKRIVESTSVSFATQPLTAGVSRSRRSQSL

SEQ ID NO: 46934 - protein, 85 aa, Homo sapiens
  MAP TO AC004558.1; EXPRESSED IN LUNG, SIGNAL = 0.6; EXPRESSED IN BONE MARROW, SIGNAL = 0.51; EXPRESSED IN ADULT LIVER, SIGNAL = 0.5; SWISSPROT HIT: P06731, EVALUE 2.00e-24
FGSIFFAPDGPDDPNISPSYSYYHPGENLNLSCNTASNPPPQYSWQINGKFQKSAQELFISKITKKNSGIYICFVRNSATDSRCF

SEQ ID NO: 46935 - protein, 20 aa, Homo sapiens
  MAP TO AC007539.8; EXPRESSED IN FETAL LIVER, SIGNAL =   3; EXPRESSED IN ADULT LIVER, SIGNAL = 2.8; EXPRESSED IN HELA, SIGNAL = 1.4; EXPRESSED IN PLACENTA, SIGNAL = 2.3; EXPRESSED IN LUNG, SIGNAL = 1.2; EST_HUMAN HIT: AU142869.1, EVALUE 3.00e-04
LLKFVNAYSPIFYVAFFKGR

SEQ ID NO: 46936 - protein, 27 aa, Homo sapiens
  MAP TO AC007567.1; EXPRESSED IN FETAL LIVER, SIGNAL = 1.7; EXPRESSED IN ADULT LIVER, SIGNAL = 2.3; EXPRESSED IN PLACENTA, SIGNAL = 1.4; EXPRESSED IN BONE MARROW, SIGNAL = 1.4; EXPRESSED IN LUNG, SIGNAL = 1.2; SWISSPROT HIT: P13186, EVALUE 1.00e+00
VVYTYVHSNDIIHKNRKVETIQVSIKE

SEQ ID NO: 46937 - protein, 28 aa, Homo sapiens
  MAP TO Z95114.19; EXPRESSED IN PLACENTA, SIGNAL = 1.5; EXPRESSED IN BONE MARROW, SIGNAL = 1.3; EXPRESSED IN LUNG, SIGNAL = 1.7; EXPRESSED IN FETAL LIVER, SIGNAL = 1.3; EXPRESSED IN ADULT LIVER, SIGNAL = 2.4
GAAKPILADSASFEPLDFVGHRLHVQNH

SEQ ID NO: 46938 - protein, 19 aa, Homo sapiens
  MAP TO AC005350.1; EXPRESSED IN PLACENTA, SIGNAL = 0.64; EXPRESSED IN LUNG, SIGNAL = 0.69; EXPRESSED IN BONE MARROW, SIGNAL = 0.56; EXPRESSED IN ADULT LIVER, SIGNAL = 0.48
IPISIIIPFCKEGNVQTTY

SEQ ID NO: 46939 - protein, 38 aa, Homo sapiens
  MAP TO AC005906.1; EXPRESSED IN FETAL LIVER, SIGNAL = 0.68; EXPRESSED IN BONE MARROW, SIGNAL = 0.69; EXPRESSED IN PLACENTA, SIGNAL = 0.67; EXPRESSED IN LUNG, SIGNAL = 1.1; EXPRESSED IN ADULT LIVER, SIGNAL = 0.68
SQSESTASDLLGEKWGSACRFQGRRGWRLRGSWSPSGT

SEQ ID NO: 46940 - protein, 48 aa, Homo sapiens
  MAP TO AC005832.1; EXPRESSED IN LUNG, SIGNAL = 0.5; EXPRESSED IN ADULT LIVER, SIGNAL = 0.49; EST_HUMAN HIT: BF326624.1, EVALUE 2.00e-21
DFCKHKRNHRSGVKLHRLQTALSLYSTSLCGLVLLVDNRINSYSGIKR

SEQ ID NO: 46941 - protein, 42 aa, Homo sapiens
  MAP TO AC002094.1; EXPRESSED IN PLACENTA, SIGNAL = 0.58; EXPRESSED IN LUNG, SIGNAL = 0.65; EXPRESSED IN FETAL LIVER, SIGNAL = 0.74; EXPRESSED IN ADULT LIVER, SIGNAL = 0.63; EXPRESSED IN BONE MARROW, SIGNAL = 0.61; SWISSPROT HIT: Q10255, EVALUE 2.80e-02
FRNLLKWYAKEFKDPLLQEPPAWFKSFLFCELVFQLPFFPIA

SEQ ID NO: 46942 - protein, 30 aa, Homo sapiens
  MAP TO AC006548.19; EXPRESSED IN BONE MARROW, SIGNAL = 9.6; EXPRESSED IN LUNG, SIGNAL = 4.9; EXPRESSED IN ADULT LIVER, SIGNAL = 1.6; SWISSPROT HIT: P06310, EVALUE 1.00e-03
MRLPAQLLGLLMLWVPGKDRNKMRWENGVG

SEQ ID NO: 46943 - protein, 35 aa, Homo sapiens
  MAP TO AL022238.1; EXPRESSED IN ADULT LIVER, SIGNAL = 1.5; EXPRESSED IN PLACENTA, SIGNAL = 1.2; EST_HUMAN HIT: AA400214.1, EVALUE 4.00e-14
LYEANELRGVLTGEVCMQPLLCPNNSFVDLACDES

SEQ ID NO: 46944 - protein, 51 aa, Homo sapiens
  MAP TO AP000356.1; EXPRESSED IN ADULT LIVER, SIGNAL = 5.5; EXPRESSED IN PLACENTA, SIGNAL = 1.2; SWISSPROT HIT: Q03248, EVALUE 7.00e-20
HQDFGYFYGSSYVAAPDSSRTPGLSRSRDGLLVAKLDLNLCQQVNDVWNFK

SEQ ID NO: 46945 - protein, 26 aa, Homo sapiens
  MAP TO AP000356.1; EXPRESSED IN ADULT LIVER, SIGNAL = 5.5; EXPRESSED IN PLACENTA, SIGNAL = 1.2; EST_HUMAN HIT: AV718545.1, EVALUE 6.00e-09
TFMARAMWQPLTAAGLLGCPVAGMDC

SEQ ID NO: 46946 - protein, 24 aa, Homo sapiens
  MAP TO AP000356.1; EXPRESSED IN ADULT LIVER, SIGNAL = 7.6; SWISSPROT HIT: Q03248, EVALUE 4.00e-05
RYEMYARELAEAVKSNYSPTIVKE

SEQ ID NO: 46947 - protein, 21 aa, Homo sapiens
  MAP TO AP000356.1; EXPRESSED IN ADULT LIVER, SIGNAL = 7.6; EST_HUMAN HIT: AV718545.1, EVALUE 1.00e-05
GMRCTHGSSPKLSSPTTAPPS

SEQ ID NO: 46948 - protein, 33 aa, Homo sapiens
  MAP TO AP000356.1; EXPRESSED IN ADULT LIVER, SIGNAL = 2.4
MSVQISVQVPAAIVFKTLGKTFGPAPCFAMKPR

SEQ ID NO: 46949 - protein, 29 aa, Homo sapiens
  MAP TO AP000233.1; EXPRESSED IN PLACENTA, SIGNAL = 1.5; EXPRESSED IN BONE MARROW, SIGNAL = 1.3; EXPRESSED IN ADULT LIVER, SIGNAL = 1.6
RPYKKEKRMIHVQAAQVWEGGVGEEYEKR

SEQ ID NO: 46950 - protein, 34 aa, Homo sapiens
  MAP TO AB016897.1; EXPRESSED IN PLACENTA, SIGNAL = 1.4; EXPRESSED IN FETAL LIVER, SIGNAL = 1.4; EXPRESSED IN ADULT LIVER, SIGNAL = 2.1
TRNLCEVGCERRCCRCGQYHFERSTFSVCHIFSK

SEQ ID NO: 46951 - protein, 44 aa, Homo sapiens
  MAP TO AC006548.19; EXPRESSED IN LUNG, SIGNAL = 9.1; EXPRESSED IN ADULT LIVER, SIGNAL = 2.2; EXPRESSED IN BONE MARROW, SIGNAL =  35; SWISSPROT HIT: P02467, EVALUE 3.70e+00
STAPCPEDFLIGWSHPVQESAPVRTQHGREGPHSAPGAPGALAA

SEQ ID NO: 46952 - protein, 37 aa, Homo sapiens
  MAP TO AC004832.3; EXPRESSED IN PLACENTA, SIGNAL = 1.3; EXPRESSED IN LUNG, SIGNAL = 1.4; EXPRESSED IN FETAL LIVER, SIGNAL = 1.9; EXPRESSED IN ADULT LIVER, SIGNAL = 1.6; EST_HUMAN HIT: AA258502.1, EVALUE 7.50e-02
MLSTIRTATTSILSKMLLPWAVLDMGALLDTSWSPAE

SEQ ID NO: 46953 - protein, 18 aa, Homo sapiens
  MAP TO AC008283.3; EXPRESSED IN LUNG, SIGNAL = 1.3; EXPRESSED IN FETAL LIVER, SIGNAL = 1.7; EXPRESSED IN ADULT LIVER, SIGNAL = 1.6; EXPRESSED IN PLACENTA, SIGNAL = 1.7
KLANATHQFSPPPPWLCP

SEQ ID NO: 46954 - protein, 39 aa, Homo sapiens
  MAP TO AL035682.16; EXPRESSED IN PLACENTA, SIGNAL = 1.5; EXPRESSED IN BONE MARROW, SIGNAL = 1.4; EXPRESSED IN ADULT LIVER, SIGNAL =   2
RMESDKTEKAWVPGMMGPAYQPWTAYPCAVTRGRNHLSC

SEQ ID NO: 46955 - protein, 38 aa, Homo sapiens
  MAP TO AP000041.1; EXPRESSED IN BONE MARROW, SIGNAL = 1.7; EXPRESSED IN ADULT LIVER, SIGNAL = 1.7; EXPRESSED IN PLACENTA, SIGNAL = 1.2; SWISSPROT HIT: P19615, EVALUE 2.20e+00
IISKRSPKLQGRKWVCPSLPVNGNKPPMPYRKSNTICV

SEQ ID NO: 46956 - protein, 32 aa, Homo sapiens
  MAP TO AP000359.1; EXPRESSED IN FETAL LIVER, SIGNAL = 1.9; EXPRESSED IN ADULT LIVER, SIGNAL = 1.6; EXPRESSED IN HELA, SIGNAL = 1.6; EXPRESSED IN PLACENTA, SIGNAL = 2.1; EXPRESSED IN LUNG, SIGNAL = 1.3; EXPRESSED IN BONE MARROW, SIGNAL = 1.3
RENSANIWQKEIRNMTLVFGTASHATDSGRSH

SEQ ID NO: 46957 - protein, 46 aa, Homo sapiens
  MAP TO AL022318.2; EXPRESSED IN PLACENTA, SIGNAL = 1.3; EXPRESSED IN LUNG, SIGNAL = 1.3; EXPRESSED IN ADULT LIVER, SIGNAL = 1.9; EXPRESSED IN FETAL LIVER, SIGNAL =   2; SWISSPROT HIT: P51857, EVALUE 1.20e+00
VPSFGPSAGLSSDGTNSRSPSTSRGRCTGSLKIPIDNGAVPQPVKT

SEQ ID NO: 46958 - protein, 35 aa, Homo sapiens
  MAP TO AC004832.3; EXPRESSED IN ADULT LIVER, SIGNAL = 4.1; SWISSPROT HIT: P49638, EVALUE 2.20e+00
NWKEVLLKHISPDQVPVEYGGTMTDPDGNPKCKSK

SEQ ID NO: 46959 - protein, 28 aa, Homo sapiens
  MAP TO AB016897.1; EXPRESSED IN ADULT LIVER, SIGNAL = 2.6
NMCYSESERNTAKLISLGWEKRDKHGYL

SEQ ID NO: 46960 - protein, 19 aa, Homo sapiens
  MAP TO AC004624.6; EXPRESSED IN ADULT LIVER, SIGNAL = 1.5; EXPRESSED IN PLACENTA, SIGNAL = 1.4
WPEKKRKSAVSCPEERPWP

SEQ ID NO: 46961 - protein, 42 aa, Homo sapiens
  MAP TO AC004832.3; EXPRESSED IN ADULT LIVER, SIGNAL = 4.7; EXPRESSED IN FETAL LIVER, SIGNAL = 2.9; EXPRESSED IN PLACENTA, SIGNAL = 1.2; SWISSPROT HIT: P49193, EVALUE 1.90e-01
VLRFDNTYSFIHAKKVNFTVEVLLPDKASEEKMKQLGAGTPK

SEQ ID NO: 46962 - protein, 18 aa, Homo sapiens
  MAP TO AP000356.1; EXPRESSED IN ADULT LIVER, SIGNAL = 1.9
PVAIWLVQAPSTALFPLV

SEQ ID NO: 46963 - protein, 80 aa, Homo sapiens
  MAP TO AP000233.1; EXPRESSED IN ADULT LIVER, SIGNAL = 1.7; EXPRESSED IN FETAL LIVER, SIGNAL = 3.3; EXPRESSED IN PLACENTA, SIGNAL = 3.3; EXPRESSED IN HELA, SIGNAL = 1.5; EXPRESSED IN LUNG, SIGNAL = 1.5; EST_HUMAN HIT: W92423.1, EVALUE 8.00e-03; SWISSPROT HIT: Q9ZD57, EVALUE 7.60e-01
KFSYPTPSLASFKIFSLSFVFGFLQFEYITRHVHILVFVCLVFSELSEYVIWCLPLVKKNTSAIVISNSSPFYLYFFLVF

SEQ ID NO: 46964 - protein, 64 aa, Homo sapiens
  MAP TO AC003670.1; EXPRESSED IN LUNG, SIGNAL = 0.59; EXPRESSED IN BONE MARROW, SIGNAL = 0.61; EXPRESSED IN PLACENTA, SIGNAL = 0.6; EXPRESSED IN ADULT LIVER, SIGNAL = 0.55; EST_HUMAN HIT: BE387642.1, EVALUE 5.00e-24; SWISSPROT HIT: P04374, EVALUE 6.00e-25
REKFDDENLILKHTGPGVMFMVNAGLSTNNSQFFICTAKTEWLHSKPVVFGKIKEGMNIVETME

SEQ ID NO: 46965 - protein, 43 aa, Homo sapiens
  MAP TO AC005815.1; EXPRESSED IN PLACENTA, SIGNAL = 0.59; EXPRESSED IN LUNG, SIGNAL = 4.2; EXPRESSED IN BONE MARROW, SIGNAL = 0.57; EXPRESSED IN ADULT LIVER, SIGNAL = 0.47; EST_HUMAN HIT: AI928181.1, EVALUE 8.00e-20; SWISSPROT HIT: Q62786, EVALUE 1.70e-02
NVAVQDSGTYSCHVEEWLPSPSGMWYKRAEDTAGQTALTVMRP

SEQ ID NO: 46966 - protein, 19 aa, Homo sapiens
  MAP TO AC005815.1; EXPRESSED IN PLACENTA, SIGNAL = 0.59; EXPRESSED IN LUNG, SIGNAL = 4.2; EXPRESSED IN BONE MARROW, SIGNAL = 0.57; EXPRESSED IN ADULT LIVER, SIGNAL = 0.47; EST_HUMAN HIT: AI928181.1, EVALUE 2.20e-02
SRLRLSQAQGNLSVLETRQ

SEQ ID NO: 46967 - protein, 70 aa, Homo sapiens
  MAP TO AC006398.1; EXPRESSED IN LUNG, SIGNAL = 0.47; EXPRESSED IN ADULT LIVER, SIGNAL = 0.44; SWISSPROT HIT: P27918, EVALUE 1.50e+00; EST_HUMAN HIT: BF572443.1, EVALUE 2.40e+00
RNGIHSYVHCRLTSTWNRWTTWKTLALVFTASISISSQTHSALFMETTMLVAHSLSLAQVFSEELQSLDV

SEQ ID NO: 46968 - protein, 25 aa, Homo sapiens
  MAP TO AC006398.1; EXPRESSED IN LUNG, SIGNAL = 0.47; EXPRESSED IN ADULT LIVER, SIGNAL = 0.44
TEMGSTPTSTAGSLVHGTDGLHGKL

SEQ ID NO: 46969 - protein, 42 aa, Homo sapiens
  MAP TO AC005026.1; EXPRESSED IN BONE MARROW, SIGNAL = 0.55; EXPRESSED IN LUNG, SIGNAL = 0.76; EXPRESSED IN ADULT LIVER, SIGNAL = 0.97; EST_HUMAN HIT: BF104215.1, EVALUE 1.40e+00
PKSYPLFKTQYKHHPLHQASQGAPWDRVLLPPFSIIQVGQNQ

SEQ ID NO: 46970 - protein, 65 aa, Homo sapiens
  MAP TO AC005026.1; EXPRESSED IN BONE MARROW, SIGNAL = 0.55; EXPRESSED IN LUNG, SIGNAL = 0.76; EXPRESSED IN ADULT LIVER, SIGNAL = 0.97; EST_HUMAN HIT: AI986287.1, EVALUE 2.60e+00; SWISSPROT HIT: P18769, EVALUE 4.50e+00
KRTEDEHRAVRGQGSGEDMMRVQVEFLGSSLLVLANLNYGEGRKEHSIPWSPLGSLMEGVVFVLS

SEQ ID NO: 46971 - protein, 47 aa, Homo sapiens
  MAP TO AC005035.1; EXPRESSED IN BONE MARROW, SIGNAL = 0.54; EXPRESSED IN ADULT LIVER, SIGNAL = 0.51
DTSYQEGTSPASYSLPFLFLRRPLLSPFPGAVVAEESRISRRKTHWE

SEQ ID NO: 46972 - protein, 18 aa, Homo sapiens
  MAP TO AC005348.1; EXPRESSED IN LUNG, SIGNAL = 0.66; EXPRESSED IN ADULT LIVER, SIGNAL = 0.51; EXPRESSED IN PLACENTA, SIGNAL = 0.63; EXPRESSED IN BONE MARROW, SIGNAL = 0.51
HCDDDDDNDDNDDADDDK

SEQ ID NO: 46973 - protein, 66 aa, Homo sapiens
  MAP TO AC005296.1; EXPRESSED IN PLACENTA, SIGNAL = 0.59; EXPRESSED IN LUNG, SIGNAL = 0.63; EXPRESSED IN FETAL LIVER, SIGNAL = 0.77; EXPRESSED IN BONE MARROW, SIGNAL = 0.58; EXPRESSED IN ADULT LIVER, SIGNAL = 0.63; SWISSPROT HIT: P41247, EVALUE 1.00e-24; EST_HUMAN HIT: AI087823.1, EVALUE 7.00e-24
DVLLTCADVRCFFPQKWVDGGLTNALPILPVGRTVTISPFSGRLDISPQDKGQLDLYVNIAKQDIM

SEQ ID NO: 46974 - protein, 42 aa, Homo sapiens
  MAP TO AC005296.1; EXPRESSED IN PLACENTA, SIGNAL = 0.59; EXPRESSED IN LUNG, SIGNAL = 0.63; EXPRESSED IN FETAL LIVER, SIGNAL = 0.77; EXPRESSED IN BONE MARROW, SIGNAL = 0.58; EXPRESSED IN ADULT LIVER, SIGNAL = 0.63; SWISSPROT HIT: Q29451, EVALUE 4.80e+00; EST_HUMAN HIT: AI087823.1, EVALUE 1.00e-19
VGGRRPHQRSSHPARRPDSNHLPLQWTTGHLPAGQRAARSVC

SEQ ID NO: 46975 - protein, 26 aa, Homo sapiens
  MAP TO AC000015.2; EXPRESSED IN LUNG, SIGNAL = 0.62; EXPRESSED IN FETAL LIVER, SIGNAL = 0.86; EXPRESSED IN BONE MARROW, SIGNAL = 0.82; EXPRESSED IN PLACENTA, SIGNAL = 0.64; EXPRESSED IN ADULT LIVER, SIGNAL = 0.62; EST_HUMAN HIT: AL044446.1, EVALUE 6.00e-08
TLASCPIDRKPFQAVFKFSALEGYVK

SEQ ID NO: 46976 - protein, 33 aa, Homo sapiens
  MAP TO AC004925.1; EXPRESSED IN LUNG, SIGNAL = 0.45; EXPRESSED IN BONE MARROW, SIGNAL = 0.71; EXPRESSED IN ADULT LIVER, SIGNAL = 0.49; SWISSPROT HIT: Q9WVA4, EVALUE 6.50e+00; EST_HUMAN HIT: BF697474.1, EVALUE 2.60e+00
FVLEVVICNMETLVKKSTENMYNFSQNYYKEGK

SEQ ID NO: 46977 - protein, 338 aa, Homo sapiens
  MAP TO AC003682.1; EXPRESSED IN BONE MARROW, SIGNAL = 0.53; EXPRESSED IN ADULT LIVER, SIGNAL = 0.6; SWISSPROT HIT: P51523, EVALUE 2.00e-88; EST_HUMAN HIT: AI114826.1, EVALUE 1.00e-102
DRAQVHTREPTTYPPVLSERAFLRGSLTLESSTSSDSRLGRARDEEGLLEMQKGKVTPETDLHKETHLGKVSLEGEGLGTDDGLHSRALQEWLSADVLHECDSQQPGKDALIHAGTNPYKCKQCGKGFNRKWYLVRHQRVHTGMKPYECNACGKAFSQSSTLIRHYLIHTGEKPYKCLECGKAFKRRSYLMQHHPIHTGEKPYECSQCRKAFTHRSTFIRHNRTHTGEKPFECKECEKAFSNRAHLIQHYIIHTGEKPYDCMACGKAFRCSSELIQHQRIHTGEKPYECTQCGKAFHRSTYLIQHSVIHTGEMPYKCIECGKAFKRRSHLLQHQRVHT

SEQ ID NO: 46978 - protein, 67 aa, Homo sapiens
  MAP TO AC005877.2; EXPRESSED IN PLACENTA, SIGNAL = 0.66; EXPRESSED IN LUNG, SIGNAL = 0.53; EXPRESSED IN BONE MARROW, SIGNAL = 0.49; EXPRESSED IN ADULT LIVER, SIGNAL = 0.44; EST_HUMAN HIT: W67356.1, EVALUE 4.00e-36; SWISSPROT HIT: P37275, EVALUE 4.00e-37
TPDAFSQLLTCPYCDRGYKRFTSLKEHIKYRHEKNEDNFSCSLCSYTFAYRTQLERHMTSHKSGRDQ

SEQ ID NO: 46979 - protein, 54 aa, Homo sapiens
  MAP TO AC004531.1; EXPRESSED IN PLACENTA, SIGNAL = 0.58; EXPRESSED IN LUNG, SIGNAL = 1.3; EXPRESSED IN FETAL LIVER, SIGNAL = 0.72; EXPRESSED IN BONE MARROW, SIGNAL = 0.55; EXPRESSED IN ADULT LIVER, SIGNAL = 0.47; EST_HUMAN HIT: BE257384.1, EVALUE 8.00e-24; SWISSPROT HIT: Q12968, EVALUE 6.00e-25
DCAGILKLRNSDIELRKGETDIGRKNTRVRLVFRVHIPQPSGKVLSLQIASIPV

SEQ ID NO: 46980 - protein, 82 aa, Homo sapiens
  MAP TO AC002115.1; EXPRESSED IN LUNG, SIGNAL = 0.56; EXPRESSED IN FETAL LIVER, SIGNAL = 0.69; EXPRESSED IN ADULT LIVER, SIGNAL = 0.66; EXPRESSED IN PLACENTA, SIGNAL = 0.65; EXPRESSED IN BONE MARROW, SIGNAL = 1.5; EST_HUMAN HIT: BF683645.1, EVALUE 8.00e-38; SWISSPROT HIT: O00322, EVALUE 4.00e-32
LSLFAETIWVTADQYRVYPLMGVSGKDDVFAGAWIAIFCGFSFFMVASFGVGAALCRRRSMVLTVRLQGLGDGDTENGVQHH

SEQ ID NO: 46981 - protein, 55 aa, Homo sapiens
  MAP TO AC003043.1; EXPRESSED IN BONE MARROW, SIGNAL = 0.57; EXPRESSED IN PLACENTA, SIGNAL = 0.6; EXPRESSED IN LUNG, SIGNAL = 0.54; EXPRESSED IN FETAL LIVER, SIGNAL = 0.72; EXPRESSED IN ADULT LIVER, SIGNAL = 0.53; EST_HUMAN HIT: BF530718.1, EVALUE 8.00e-28; SWISSPROT HIT: P21894, EVALUE 4.60e+00
YDYLTDEEERHSAESSTSEDNSPEHPYLPLVTDEDSWYSKWHKMEQKFRIVYAQK

SEQ ID NO: 46982 - protein, 38 aa, Homo sapiens
  MAP TO AC003043.1; EXPRESSED IN BONE MARROW, SIGNAL = 0.57; EXPRESSED IN PLACENTA, SIGNAL = 0.6; EXPRESSED IN LUNG, SIGNAL = 0.54; EXPRESSED IN FETAL LIVER, SIGNAL = 0.72; EXPRESSED IN ADULT LIVER, SIGNAL = 0.53; EST_HUMAN HIT: BF530718.1, EVALUE 9.00e-13; SWISSPROT HIT: Q9ZGE6, EVALUE 3.70e+00
APSPKLRLPDGRGGAAQRREQHERGQLARAPVPPARHR

SEQ ID NO: 46983 - protein, 131 aa, Homo sapiens
  MAP TO AC003687.1; EXPRESSED IN LUNG, SIGNAL = 0.61; EXPRESSED IN ADULT LIVER, SIGNAL = 0.48; EXPRESSED IN BONE MARROW, SIGNAL = 0.64; EST_HUMAN HIT: AI567447.1, EVALUE 1.50e-02; SWISSPROT HIT: Q62962, EVALUE 1.00e-05
DAPFCTPEQHKECAEPALGQYSGDRWNHGGRGPETEIMEIIWVWGKIKWKKEWREDEKKGAGRVELLQGWEREMERRKKRRLGRELVQEDEGWKWDWGEKEIWKVEMEKEWVSGETEGAKECRGEDRGGER

SEQ ID NO: 46984 - protein, 30 aa, Homo sapiens
  MAP TO AC004942.1; EXPRESSED IN PLACENTA, SIGNAL = 0.66; EXPRESSED IN LUNG, SIGNAL = 0.64; EXPRESSED IN BONE MARROW, SIGNAL = 0.65; EXPRESSED IN ADULT LIVER, SIGNAL = 0.72; EST_HUMAN HIT: AW296885.1, EVALUE 1.40e-01
ESASAFSEGFGKLTIVMEGEEGAGLSHDKK

SEQ ID NO: 46985 - protein, 43 aa, Homo sapiens
  MAP TO AC005859.1; EXPRESSED IN LUNG, SIGNAL = 0.79; EXPRESSED IN PLACENTA, SIGNAL = 0.96; EXPRESSED IN FETAL LIVER, SIGNAL = 0.84; EXPRESSED IN ADULT LIVER, SIGNAL = 0.76; EXPRESSED IN BONE MARROW, SIGNAL = 0.73
HTYRCCLRNLWNKDEAMFMLFAYICELHKEDEFEKSEVQYKFM

SEQ ID NO: 46986 - protein, 42 aa, Homo sapiens
  MAP TO AC005859.1; EXPRESSED IN LUNG, SIGNAL = 0.79; EXPRESSED IN PLACENTA, SIGNAL = 0.96; EXPRESSED IN FETAL LIVER, SIGNAL = 0.84; EXPRESSED IN ADULT LIVER, SIGNAL = 0.76; EXPRESSED IN BONE MARROW, SIGNAL = 0.73; SWISSPROT HIT: P16811, EVALUE 2.10e+00; EST_HUMAN HIT: BF104145.1, EVALUE 4.10e+00
IPTGAVSETCGTKMKQCSCYSPTSVNYTRKTSLRNPKFSTNL

SEQ ID NO: 46987 - protein, 69 aa, Homo sapiens
  MAP TO AC005342.1; EXPRESSED IN BONE MARROW, SIGNAL = 0.54; EXPRESSED IN LUNG, SIGNAL = 0.49; EXPRESSED IN ADULT LIVER, SIGNAL = 0.47; EST_HUMAN HIT: BE789172.1, EVALUE 2.00e-32; SWISSPROT HIT: Q39586, EVALUE 1.50e+00
HGREQSTLPRQTLPISGSQTGSSGVISPQELLKKLQIVQQEQQLHASNRPALAAKFPVLAQSSGTGKPL

SEQ ID NO: 46988 - protein, 24 aa, Homo sapiens
  MAP TO AC005342.1; EXPRESSED IN BONE MARROW, SIGNAL = 0.54; EXPRESSED IN LUNG, SIGNAL = 0.49; EXPRESSED IN ADULT LIVER, SIGNAL = 0.47; EST_HUMAN HIT: AA676552.1, EVALUE 3.00e-06
MEENSPHSQDKHSPSLVVRLAALE

SEQ ID NO: 46989 - protein, 26 aa, Homo sapiens
  MAP TO AC006529.1; EXPRESSED IN LUNG, SIGNAL = 0.74; EXPRESSED IN FETAL LIVER, SIGNAL = 0.73; EXPRESSED IN PLACENTA, SIGNAL = 0.6; EXPRESSED IN BONE MARROW, SIGNAL = 0.65; EXPRESSED IN ADULT LIVER, SIGNAL = 0.63; EST_HUMAN HIT: BE795994.1, EVALUE 3.00e-09
RNCVPCMTFLTCLRPGNFFEKSLLGR

SEQ ID NO: 46990 - protein, 27 aa, Homo sapiens
  MAP TO AC006529.1; EXPRESSED IN LUNG, SIGNAL = 0.74; EXPRESSED IN FETAL LIVER, SIGNAL = 0.73; EXPRESSED IN PLACENTA, SIGNAL = 0.6; EXPRESSED IN BONE MARROW, SIGNAL = 0.65; EXPRESSED IN ADULT LIVER, SIGNAL = 0.63; EST_HUMAN HIT: BE795994.1, EVALUE 2.00e-08
KKLRPLYDIPYMFEAREFLRKKLIGKK

SEQ ID NO: 46991 - protein, 33 aa, Homo sapiens; identical to SEQ ID NO: 44348
  MAP TO AC005079.1; EXPRESSED IN ADULT LIVER, SIGNAL = 0.49; EXPRESSED IN PLACENTA, SIGNAL = 0.64; EXPRESSED IN LUNG, SIGNAL = 0.53; EST_HUMAN HIT: AA687472.1, EVALUE 5.00e-12

SEQ ID NO: 46992 - protein, 43 aa, Homo sapiens
  MAP TO AC005042.1; EXPRESSED IN LUNG, SIGNAL = 0.47; EXPRESSED IN BONE MARROW, SIGNAL = 0.49; EXPRESSED IN ADULT LIVER, SIGNAL = 0.49; SWISSPROT HIT: P08843, EVALUE 3.70e+00
GSLRWAQVKDKEQGDVIYRHRDSTKPGLVHCRNAEISKLREEK

SEQ ID NO: 46993 - protein, 63 aa, Homo sapiens
  MAP TO AC005664.1; EXPRESSED IN BONE MARROW, SIGNAL = 0.82; EXPRESSED IN LUNG, SIGNAL = 0.58; EXPRESSED IN FETAL LIVER, SIGNAL = 0.98; EXPRESSED IN ADULT LIVER, SIGNAL = 0.53; EST_HUMAN HIT: BE737185.1, EVALUE 6.00e-15; SWISSPROT HIT: P54797, EVALUE 9.00e-14
GPHISVPGRRAHACSCGHSICPLPTGELVTHFLTTDVDSLSYLKKVSMEGHLYNGFNLIAADL

SEQ ID NO: 46994 - protein, 17 aa, Homo sapiens
  MAP TO AC005664.1; EXPRESSED IN BONE MARROW, SIGNAL = 0.82; EXPRESSED IN LUNG, SIGNAL = 0.58; EXPRESSED IN FETAL LIVER, SIGNAL = 0.98; EXPRESSED IN ADULT LIVER, SIGNAL = 0.53
VDTASVPCLQVNLSPTF

SEQ ID NO: 46995 - protein, 27 aa, Homo sapiens
  MAP TO AC006478.2; EXPRESSED IN LUNG, SIGNAL = 0.56; EXPRESSED IN BONE MARROW, SIGNAL = 0.56; EXPRESSED IN ADULT LIVER, SIGNAL = 0.51
KRVKESKMEECHKIILMGRDWACSGWY

SEQ ID NO: 46996 - protein, 25 aa, Homo sapiens
  MAP TO AC004063.1; EXPRESSED IN PLACENTA, SIGNAL = 0.82; EXPRESSED IN ADULT LIVER, SIGNAL = 0.57; EXPRESSED IN LUNG, SIGNAL = 0.78; EXPRESSED IN BONE MARROW, SIGNAL = 0.79
LPDSKVFSNTEEEDWNDIPLEFDKN

SEQ ID NO: 46997 - protein, 24 aa, Homo sapiens
  MAP TO AC006484.2; EXPRESSED IN LUNG, SIGNAL = 0.57; EXPRESSED IN FETAL LIVER, SIGNAL = 1.5; EXPRESSED IN BONE MARROW, SIGNAL = 0.53; EXPRESSED IN ADULT LIVER, SIGNAL = 0.53
WRRYTGSLPPAGQMMLRTTWLPLL

SEQ ID NO: 46998 - protein, 92 aa, Homo sapiens
  MAP TO AC005669.1; EXPRESSED IN BONE MARROW, SIGNAL = 0.53; EXPRESSED IN LUNG, SIGNAL = 0.44; EXPRESSED IN ADULT LIVER, SIGNAL = 0.5; SWISSPROT HIT: P23071, EVALUE 2.50e-01; EST_HUMAN HIT: AA126482.1, EVALUE 5.00e-03
ILKTVVDPKERVRIAAFPDLLGQGMPFHPPLTRLPPLATNILRTLVLRGPTLPVSPGLRGFLGRGTFSTKIGKIPGHLGNASLEGERDWSLR

SEQ ID NO: 46999 - protein, 28 aa, Homo sapiens
  MAP TO AC004687.1; EXPRESSED IN LUNG, SIGNAL = 0.79; EXPRESSED IN FETAL LIVER, SIGNAL = 0.69; EXPRESSED IN BONE MARROW, SIGNAL = 0.57; EXPRESSED IN PLACENTA, SIGNAL = 0.66; EXPRESSED IN ADULT LIVER, SIGNAL = 0.54
QVFVIDDVSPDHKDTTRRLRGRVLKGSL

SEQ ID NO: 47000 - protein, 36 aa, Homo sapiens
  MAP TO AC002044.1; EXPRESSED IN LUNG, SIGNAL = 0.51; EXPRESSED IN BONE MARROW, SIGNAL = 0.62; EXPRESSED IN ADULT LIVER, SIGNAL = 0.48
KESEKEENEKRSLVTGSMLLLLLKGTQEPPKAPFPE

SEQ ID NO: 47001 - protein, 23 aa, Homo sapiens
  MAP TO AC002044.1; EXPRESSED IN LUNG, SIGNAL = 0.51; EXPRESSED IN BONE MARROW, SIGNAL = 0.62; EXPRESSED IN ADULT LIVER, SIGNAL = 0.48
VRRVKKRKMRNAPWSQGPCCSFY

SEQ ID NO: 47002 - protein, 41 aa, Homo sapiens
  MAP TO AC005884.1; EXPRESSED IN PLACENTA, SIGNAL = 0.61; EXPRESSED IN LUNG, SIGNAL = 0.56; EXPRESSED IN ADULT LIVER, SIGNAL = 0.52; EXPRESSED IN FETAL LIVER, SIGNAL = 1.1; EXPRESSED IN BONE MARROW, SIGNAL = 0.56; EST_HUMAN HIT: AW401433.1, EVALUE 7.00e-07
MSRFQKSAGLEEIEQELTSKQGGRCSPVPGLSSSPSGSPLH

SEQ ID NO: 47003 - protein, 40 aa, Homo sapiens
  MAP TO AC000121.1; EXPRESSED IN LUNG, SIGNAL = 0.42; EXPRESSED IN ADULT LIVER, SIGNAL = 0.48
SCPSGITKGQGALSTKMLYSLARDAMLREEACMICLRDAL

SEQ ID NO: 47004 - protein, 20 aa, Homo sapiens
  MAP TO AC000121.1; EXPRESSED IN LUNG, SIGNAL = 0.42; EXPRESSED IN ADULT LIVER, SIGNAL = 0.48
PVPVGSRRGKEPSAQKCCIH

SEQ ID NO: 47005 - protein, 111 aa, Homo sapiens
  MAP TO AC002115.1; EXPRESSED IN PLACENTA, SIGNAL = 0.58; EXPRESSED IN LUNG, SIGNAL = 0.61; EXPRESSED IN BONE MARROW, SIGNAL = 0.53; EXPRESSED IN ADULT LIVER, SIGNAL = 0.54
EEPAAPRELGLGLGLGLKEKEEAVVAAAAGLEEASAAVAVGAGGAPAGPAVIGPSLPLALAMPLPEPEPLPLPLEVVRGLLPPLRIPELLSLRPRPRPPRPEPPPGLMALE

SEQ ID NO: 47006 - protein, 57 aa, Homo sapiens
  MAP TO AC000380.1; EXPRESSED IN ADULT LIVER, SIGNAL = 0.44; EXPRESSED IN BONE MARROW, SIGNAL = 0.59; SWISSPROT HIT: Q99460, EVALUE 2.70e+00; EST_HUMAN HIT: BE266559.1, EVALUE 1.00e-26
LIDIARKLDKAEREPLLLCATYLKKLDSPGYAAETYLKMGDLKSLVQLHVETQRWDE

SEQ ID NO: 47007 - protein, 24 aa, Homo sapiens
  MAP TO AC000380.1; EXPRESSED IN ADULT LIVER, SIGNAL = 0.44; EXPRESSED IN BONE MARROW, SIGNAL = 0.59; EST_HUMAN HIT: BE938549.1, EVALUE 1.00e-07
ASPCCCALPTSRSWTALAMLLRPT

SEQ ID NO: 47008 - protein, 47 aa, Homo sapiens
  MAP TO AC004676.1; EXPRESSED IN PLACENTA, SIGNAL = 0.61; EXPRESSED IN LUNG, SIGNAL = 0.65; EXPRESSED IN BONE MARROW, SIGNAL = 0.71; EXPRESSED IN ADULT LIVER, SIGNAL = 0.6; EST_HUMAN HIT: AW027705.1, EVALUE 1.00e-10
SDILDGSSSSSGLSSDPLAKGSATAESPVACSNSCSSFILMDDLSPK

SEQ ID NO: 47009 - protein, 47 aa, Homo sapiens
  MAP TO AC005281.2; EXPRESSED IN PLACENTA, SIGNAL = 0.67; EXPRESSED IN LUNG, SIGNAL = 0.64; EXPRESSED IN BONE MARROW, SIGNAL = 0.75; EXPRESSED IN ADULT LIVER, SIGNAL = 0.67; EST_HUMAN HIT: H42803.1, EVALUE 7.00e-13; SWISSPROT HIT: Q60604, EVALUE 1.00e-21
LNHVLTNDLTAKRLLHVKGRRVVRATEVPLSWDSFNKGDCFIIDLGT

SEQ ID NO: 47010 - protein, 26 aa, Homo sapiens
  MAP TO AC005670.1; EXPRESSED IN PLACENTA, SIGNAL = 0.74; EXPRESSED IN LUNG, SIGNAL = 0.51; EXPRESSED IN BONE MARROW, SIGNAL = 0.61; EXPRESSED IN ADULT LIVER, SIGNAL = 0.59; EST_HUMAN HIT: W44493.1, EVALUE 5.00e-04
LSAVSRRPMQDWISWTCLSKEEGGNE

SEQ ID NO: 47011 - protein, 51 aa, Homo sapiens
  MAP TO AC003098.1; EXPRESSED IN LUNG, SIGNAL = 0.91; EXPRESSED IN FETAL LIVER, SIGNAL = 0.98; EXPRESSED IN PLACENTA, SIGNAL = 0.92; EXPRESSED IN BONE MARROW, SIGNAL = 0.94; EXPRESSED IN ADULT LIVER, SIGNAL = 0.89; SWISSPROT HIT: Q13368, EVALUE 4.00e-21; EST_HUMAN HIT: T27219.1, EVALUE 2.00e-18
WLSRQAVLMVHDTVAQKNFDPVLPPLPDNIDEDFDEESVKIVRLVKNKEPL

SEQ ID NO: 47012 - protein, 95 aa, Homo sapiens
  MAP TO AC005600.1; EXPRESSED IN BONE MARROW, SIGNAL = 0.54; EXPRESSED IN LUNG, SIGNAL = 0.45; EXPRESSED IN ADULT LIVER, SIGNAL = 0.41; EST_HUMAN HIT: AW853983.1, EVALUE 2.00e-51; SWISSPROT HIT: P96095, EVALUE 1.90e-01
LHLWPHQRDCVVLFAEARKSHSPVKRPRKAQRLRVAYEGSDSEKGEGAEPLKVPVWEPQDWQQQLVNIRAMRNKKDAPVDHLGTEHCYDSSAPPK

SEQ ID NO: 47013 - protein, 37 aa, Homo sapiens
  MAP TO AC005600.1; EXPRESSED IN BONE MARROW, SIGNAL = 0.54; EXPRESSED IN LUNG, SIGNAL = 0.45; EXPRESSED IN ADULT LIVER, SIGNAL = 0.41; EST_HUMAN HIT: AW853983.1, EVALUE 1.00e-14; SWISSPROT HIT: Q60707, EVALUE 4.90e+00
PSPVAPPEGLRGAFCRSEEKPQPREASAESTETACGL

SEQ ID NO: 47014 - protein, 44 aa, Homo sapiens
  MAP TO AC004862.1; EXPRESSED IN LUNG, SIGNAL = 0.61; EXPRESSED IN ADULT LIVER, SIGNAL = 0.58; SWISSPROT HIT: P29348, EVALUE 1.00e-19; EST_HUMAN HIT: W28895.1, EVALUE 3.00e-16
NRMHESLHLFNSICNHKYFSTTSIVLFLNKKDIFQEKVTKVHLS

SEQ ID NO: 47015 - protein, 32 aa, Homo sapiens
  MAP TO AC006337.2; EXPRESSED IN PLACENTA, SIGNAL = 1.1; EXPRESSED IN FETAL LIVER, SIGNAL = 0.71; EXPRESSED IN BONE MARROW, SIGNAL =   3; EXPRESSED IN ADULT LIVER, SIGNAL = 1.1; EXPRESSED IN LUNG, SIGNAL = 0.73
RPFLAQFLMSPNGLLIPVLTLSSQGDRLGLLP

SEQ ID NO: 47016 - protein, 64 aa, Homo sapiens
  MAP TO AC005913.1; EXPRESSED IN LUNG, SIGNAL = 0.71; EXPRESSED IN HELA, SIGNAL = 2.7; EXPRESSED IN FETAL LIVER, SIGNAL = 1.7; EXPRESSED IN BONE MARROW, SIGNAL = 1.3; EXPRESSED IN ADULT LIVER, SIGNAL = 0.82; EXPRESSED IN PLACENTA, SIGNAL = 0.62; EST_HUMAN HIT: H83186.1, EVALUE 8.00e-25; SWISSPROT HIT: P33551, EVALUE 7.00e-26
EFEYRHVMLPKDIAKLVPETHLMSESEWRNLGIQQSQGWVHYMIHEPEPHVLLFRRPLPKKPKK

SEQ ID NO: 47017 - protein, 68 aa, Homo sapiens
  MAP TO AC004031.1; EXPRESSED IN PLACENTA, SIGNAL = 0.66; EXPRESSED IN BONE MARROW, SIGNAL = 0.89; EXPRESSED IN ADULT LIVER, SIGNAL = 0.76; EXPRESSED IN LUNG, SIGNAL = 0.73; EXPRESSED IN FETAL LIVER, SIGNAL = 0.85; EST_HUMAN HIT: AW502437.1, EVALUE 7.00e-26; SWISSPROT HIT: P18260, EVALUE 1.50e+00
GTISSSSILLAQSLQHCIHSQNCSATDLFYQGNSQTVREWLNVAITRTLHQGEESLLELTKQICSFLQ

SEQ ID NO: 47018 - protein, 20 aa, Homo sapiens
  MAP TO AC004031.1; EXPRESSED IN PLACENTA, SIGNAL = 0.66; EXPRESSED IN BONE MARROW, SIGNAL = 0.89; EXPRESSED IN ADULT LIVER, SIGNAL = 0.76; EXPRESSED IN LUNG, SIGNAL = 0.73; EXPRESSED IN FETAL LIVER, SIGNAL = 0.85; EST_HUMAN HIT: AW502437.1, EVALUE 4.00e-04
ASIPRTAPPRTSFTRATPRQ

SEQ ID NO: 47019 - protein, 32 aa, Homo sapiens
  MAP TO AC002486.1; EXPRESSED IN BONE MARROW, SIGNAL = 0.57; EXPRESSED IN ADULT LIVER, SIGNAL = 0.52; EXPRESSED IN PLACENTA, SIGNAL = 0.59; EXPRESSED IN LUNG, SIGNAL = 0.52; EST_HUMAN HIT: AU123160.1, EVALUE 9.00e-05
ALITWEAPGWERLKEDSDEWRRSLGGWRRTMI

SEQ ID NO: 47020 - protein, 29 aa, Homo sapiens
  MAP TO AC002486.1; EXPRESSED IN BONE MARROW, SIGNAL = 0.57; EXPRESSED IN ADULT LIVER, SIGNAL = 0.52; EXPRESSED IN PLACENTA, SIGNAL = 0.59; EXPRESSED IN LUNG, SIGNAL = 0.52
ESSSSSSRPSSSATRQSPPSAVPSPGPPR

SEQ ID NO: 47021 - protein, 48 aa, Homo sapiens
  MAP TO AC005678.1; EXPRESSED IN LUNG, SIGNAL = 0.62; EXPRESSED IN ADULT LIVER, SIGNAL = 0.57; EXPRESSED IN PLACENTA, SIGNAL = 0.71; EXPRESSED IN BONE MARROW, SIGNAL = 0.61; SWISSPROT HIT: O43309, EVALUE 2.00e-21; EST_HUMAN HIT: BE929604.1, EVALUE 7.00e-10
VSVHTGEQEMFLQETVRLRKEGEPSMSLQSMKAQPKYESPELESQQEQ

SEQ ID NO: 47022 - protein, 31 aa, Homo sapiens
  MAP TO AC005678.1; EXPRESSED IN LUNG, SIGNAL = 0.62; EXPRESSED IN ADULT LIVER, SIGNAL = 0.57; EXPRESSED IN PLACENTA, SIGNAL = 0.71; EXPRESSED IN BONE MARROW, SIGNAL = 0.61; EST_HUMAN HIT: BE929604.1, EVALUE 4.00e-11
RSQSTLGNRKCSCRRRYVYEKKENPVCPSSP

SEQ ID NO: 47023 - protein, 30 aa, Homo sapiens
  MAP TO AC005906.1; EXPRESSED IN LUNG, SIGNAL = 0.45; EXPRESSED IN ADULT LIVER, SIGNAL = 0.44; EST_HUMAN HIT: AA278183.1, EVALUE 4.00e-07
LSSRSRLPWKYPCYLGHMIQQIPWCLQWQW

SEQ ID NO: 47024 - protein, 38 aa, Homo sapiens
  MAP TO AC004452.1; EXPRESSED IN PLACENTA, SIGNAL = 0.59; EXPRESSED IN LUNG, SIGNAL = 0.59; EXPRESSED IN ADULT LIVER, SIGNAL = 1.5; EXPRESSED IN FETAL LIVER, SIGNAL = 0.79; EXPRESSED IN BONE MARROW, SIGNAL = 0.69; EST_HUMAN HIT: AW663302.1, EVALUE 5.60e+00
ATPFFISLMLLELVVSWILKGKPPGRLDDALTSISAGV

SEQ ID NO: 47025 - protein, 59 aa, Homo sapiens
  MAP TO AC002042.1; EXPRESSED IN BONE MARROW, SIGNAL = 0.49; EXPRESSED IN ADULT LIVER, SIGNAL = 0.52; EXPRESSED IN LUNG, SIGNAL = 0.49
VTAPASAAAHAKPSQAKQASQPAKPARPAQPAKPAKPPSRPSHPSQPTNPARQASQATQ

SEQ ID NO: 47026 - protein, 34 aa, Homo sapiens
  MAP TO AC005969.4; EXPRESSED IN LUNG, SIGNAL = 0.59; EXPRESSED IN ADULT LIVER, SIGNAL = 0.52
FGTEVHNLDAKVDSGKTVKLNSPLEKINSFSPQK

SEQ ID NO: 47027 - protein, 17 aa, Homo sapiens
  MAP TO AC005969.4; EXPRESSED IN LUNG, SIGNAL = 0.59; EXPRESSED IN ADULT LIVER, SIGNAL = 0.52
LEQKYTIWMQKLIQERL

SEQ ID NO: 47028 - protein, 29 aa, Homo sapiens
  MAP TO AC005939.1; EXPRESSED IN LUNG, SIGNAL = 0.63; EXPRESSED IN BONE MARROW, SIGNAL = 0.55; EXPRESSED IN PLACENTA, SIGNAL = 0.62; EXPRESSED IN ADULT LIVER, SIGNAL = 0.5; SWISSPROT HIT: O33815, EVALUE 1.30e+00
MVSQRMESPWELRKTYLPNWKLDTKCLLC

SEQ ID NO: 47029 - protein, 37 aa, Homo sapiens
  MAP TO AC004962.1; EXPRESSED IN BONE MARROW, SIGNAL = 0.69; EXPRESSED IN ADULT LIVER, SIGNAL = 0.7; EXPRESSED IN LUNG, SIGNAL = 0.67; EXPRESSED IN FETAL LIVER, SIGNAL = 0.71; EST_HUMAN HIT: AW263056.1, EVALUE 1.00e-15
MGLGGMPDRNHLACAKADLEEVVRVCPGFKAYLDIGQ

SEQ ID NO: 47030 - protein, 50 aa, Homo sapiens
  MAP TO AC004962.1; EXPRESSED IN BONE MARROW, SIGNAL = 0.69; EXPRESSED IN ADULT LIVER, SIGNAL = 0.7; EXPRESSED IN LUNG, SIGNAL = 0.67; EXPRESSED IN FETAL LIVER, SIGNAL = 0.71; EST_HUMAN HIT: BF511635.1, EVALUE 3.00e-25; SWISSPROT HIT: P39963, EVALUE 4.70e+00
TSEPTCMTSSGPRWVSGACLTGTTWPVPRLTLRKWSGCAQASRRTWTSAR

SEQ ID NO: 47031 - protein, 36 aa, Homo sapiens
  MAP TO AC001231.1; EXPRESSED IN ADULT LIVER, SIGNAL = 0.51
KLNFCLGVHVVQGKLTALPAMMGAHDWSTLINGFHA

SEQ ID NO: 47032 - protein, 19 aa, Homo sapiens
  MAP TO AC005166.1; EXPRESSED IN LUNG, SIGNAL = 0.59; EXPRESSED IN BONE MARROW, SIGNAL = 0.59; EXPRESSED IN ADULT LIVER, SIGNAL = 0.61; EST_HUMAN HIT: AI991175.1, EVALUE 6.30e+00
PGAKTPSCKHLPSLCLRIC

SEQ ID NO: 47033 - protein, 55 aa, Homo sapiens
  MAP TO AC003071.1; EXPRESSED IN LUNG, SIGNAL = 0.67; EXPRESSED IN PLACENTA, SIGNAL = 0.64; EXPRESSED IN BONE MARROW, SIGNAL = 0.66; EXPRESSED IN ADULT LIVER, SIGNAL = 0.56; EXPRESSED IN FETAL LIVER, SIGNAL = 0.68; SWISSPROT HIT: P00750, EVALUE 7.90e+00
CSVRRATMWRASMAWGVSAKWSNEGITSVGDPQWECQSWSLSRVSRVIYMGKRPK

SEQ ID NO: 47034 - protein, 65 aa, Homo sapiens
  MAP TO AC004465.1; EXPRESSED IN LUNG, SIGNAL = 0.42; EXPRESSED IN ADULT LIVER, SIGNAL = 0.47; SWISSPROT HIT: P01833, EVALUE 5.20e+00; EST_HUMAN HIT: AA577812.1, EVALUE 6.00e-04
FQLCCSVVLNELPNLSASQFLHVGNEDNNNNYLIGLFWEFTKSIYYVCLDQSLALCRCSVNISHS

SEQ ID NO: 47035 - protein, 35 aa, Homo sapiens
  MAP TO AC006143.1; EXPRESSED IN LUNG, SIGNAL = 0.55; EXPRESSED IN BONE MARROW, SIGNAL = 0.54; EXPRESSED IN ADULT LIVER, SIGNAL = 0.51; SWISSPROT HIT: P75130, EVALUE 8.40e+00
IASQQTDCYGSVLLASIDQQHFAKIQDNPKHFINE

SEQ ID NO: 47036 - protein, 54 aa, Homo sapiens
  MAP TO AC005317.1; EXPRESSED IN LUNG, SIGNAL = 0.77; EXPRESSED IN BONE MARROW, SIGNAL = 0.64; EXPRESSED IN ADULT LIVER, SIGNAL = 0.59; EXPRESSED IN PLACENTA, SIGNAL = 0.68; EST_HUMAN HIT: AW500861.1, EVALUE 2.00e-15
DVPLTAEEVEFVVEKALSMFSKMNLQEIPPLVYQLLVLSSKVQMENCFSLVLVV

SEQ ID NO: 47037 - protein, 59 aa, Homo sapiens
  MAP TO AC004039.1; EXPRESSED IN BONE MARROW, SIGNAL = 0.57; EXPRESSED IN LUNG, SIGNAL = 0.59; EXPRESSED IN FETAL LIVER, SIGNAL = 0.8; EXPRESSED IN ADULT LIVER, SIGNAL = 0.73; EST_HUMAN HIT: AW953230.1, EVALUE 2.00e-29; SWISSPROT HIT: P79339, EVALUE 1.00e-30
NTTEKETFCRAATVLRQFYSHHEKDTRCLGATAQQFHRHKQLIRFLKRLDRNLWGLAGL

SEQ ID NO: 47038 - protein, 49 aa, Homo sapiens
  MAP TO AC004039.1; EXPRESSED IN BONE MARROW, SIGNAL = 0.57; EXPRESSED IN LUNG, SIGNAL = 0.59; EXPRESSED IN FETAL LIVER, SIGNAL = 0.8; EXPRESSED IN ADULT LIVER, SIGNAL = 0.73; EST_HUMAN HIT: AW953230.1, EVALUE 1.00e-16
ICGICLSRTQLRRKPSAGLRLCSGSSTATMRRTLAAWVRLHSSSTGTSS

SEQ ID NO: 47039 - protein, 96 aa, Homo sapiens
  MAP TO AC004147.1; EXPRESSED IN PLACENTA, SIGNAL = 0.71; EXPRESSED IN LUNG, SIGNAL = 0.52; EXPRESSED IN ADULT LIVER, SIGNAL = 0.58; EXPRESSED IN BONE MARROW, SIGNAL = 1.2; EST_HUMAN HIT: AI553866.1, EVALUE 5.00e-25; SWISSPROT HIT: Q16515, EVALUE 2.00e-51
NGFRFSRLTTNDLYHAGELLALLDVNLQIPDPHLADPSVLEALRQKANFKHYKPKQFSMLEFLHRVGHDLKDMMLYCKFKGQECGHQDFTTVSTWF

SEQ ID NO: 47040 - protein, 27 aa, Homo sapiens
  MAP TO AC005969.4; EXPRESSED IN BONE MARROW, SIGNAL = 0.54; EXPRESSED IN ADULT LIVER, SIGNAL = 0.51; EXPRESSED IN LUNG, SIGNAL = 0.63; EXPRESSED IN PLACENTA, SIGNAL = 0.7
DHTCVHPEVVGNFNRNEKCMELLDGKN

SEQ ID NO: 47041 - protein, 85 aa, Homo sapiens
  MAP TO AC004692.1; EXPRESSED IN PLACENTA, SIGNAL = 0.87; EXPRESSED IN LUNG, SIGNAL = 0.67; EXPRESSED IN BONE MARROW, SIGNAL = 0.69; EXPRESSED IN ADULT LIVER, SIGNAL = 0.56; SWISSPROT HIT: Q43950, EVALUE 2.50e+00; EST_HUMAN HIT: AI250165.1, EVALUE 2.20e+00
FLDTNRQWGWGQAVTYSACHWLVTVFAGGETAAMAWTAASCPPDCSDCTEFSYSAGPRAALASEAKASASLESQLGSYPDSRGPA

SEQ ID NO: 47042 - protein, 41 aa, Homo sapiens
  MAP TO AC005868.1; EXPRESSED IN LUNG, SIGNAL = 0.53; EXPRESSED IN BONE MARROW, SIGNAL = 0.59; EXPRESSED IN ADULT LIVER, SIGNAL = 0.63
WDLNTDIWVKALTAALVQNELSHHTQRSQPLESESKKNTSN

SEQ ID NO: 47043 - protein, 19 aa, Homo sapiens
  MAP TO AC005868.1; EXPRESSED IN LUNG, SIGNAL = 0.53; EXPRESSED IN BONE MARROW, SIGNAL = 0.59; EXPRESSED IN ADULT LIVER, SIGNAL = 0.63
LGPQHRHLGEGLDSSAGAK

SEQ ID NO: 47044 - protein, 24 aa, Homo sapiens
  MAP TO AC004051.1; EXPRESSED IN LUNG, SIGNAL = 0.47; EXPRESSED IN ADULT LIVER, SIGNAL = 0.68; EXPRESSED IN BONE MARROW, SIGNAL = 0.49
YQNVHYVVLLYLNYTRRVKQYTVP

SEQ ID NO: 47045 - protein, 115 aa, Homo sapiens
  MAP TO AC005919.1; EXPRESSED IN LUNG, SIGNAL = 1.8; EXPRESSED IN PLACENTA, SIGNAL = 1.1; EXPRESSED IN BONE MARROW, SIGNAL = 0.68; EXPRESSED IN ADULT LIVER, SIGNAL =   1; SWISSPROT HIT: P19012, EVALUE 4.00e-12; EST_HUMAN HIT: W95802.1, EVALUE 7.00e-16
MSFRLSGGSRRICSRTGSGRLSGGGTGFVAGNVCVGSGARSSFSCTLEGISSGGSFCNSGGGLGSGACAGFLGNEHSLLSGNEKVTMQNLNDRLASYLDHVHALEEANADLEQKI

SEQ ID NO: 47046 - protein, 53 aa, Homo sapiens
  MAP TO AC004601.1; EXPRESSED IN LUNG, SIGNAL = 0.44; EXPRESSED IN ADULT LIVER, SIGNAL = 0.5; SWISSPROT HIT: P46601, EVALUE 6.10e+00
WKREQDFDLQLLERVVQGEKKDKEENGWLKVQAMPVTELDLEPQDYDLDISRE

SEQ ID NO: 47047 - protein, 35 aa, Homo sapiens
  MAP TO AC004601.1; EXPRESSED IN LUNG, SIGNAL = 0.44; EXPRESSED IN ADULT LIVER, SIGNAL = 0.5; EST_HUMAN HIT: BF317238.1, EVALUE 4.40e+00; SWISSPROT HIT: P27918, EVALUE 4.90e+00
TSCSVASGSVSRTLTCSCWNGSCKGKKRTRRRMAG

SEQ ID NO: 47048 - protein, 44 aa, Homo sapiens
  MAP TO AC002093.1; EXPRESSED IN ADULT LIVER, SIGNAL = 0.43
  unsure 17
  unsure 23
  unsure 30
GSFTRTSTPSPPPVSFXTGLSHXNTAAPTXILKDRDRCYSQHGP

SEQ ID NO: 47049 - protein, 23 aa, Homo sapiens
  MAP TO AC002093.1; EXPRESSED IN ADULT LIVER, SIGNAL = 0.43
  unsure 14
  unsure 16
  unsure 21
VRVENNICLCPLVXKXGQLYXCG

SEQ ID NO: 47050 - protein, 75 aa, Homo sapiens
  MAP TO AC004613.1; EXPRESSED IN ADULT LIVER, SIGNAL = 0.41; EST_HUMAN HIT: BE789914.1, EVALUE 2.50e+00
YILVDHFLKLHVMKVLMMLECNPLFPKCRCVVVSEIQMPLCALVELSLDTHVRDACKSNMTVFRENEFLKSQQKV

SEQ ID NO: 47051 - protein, 53 aa, Homo sapiens
  MAP TO AC005562.1; EXPRESSED IN LUNG, SIGNAL = 0.42; EXPRESSED IN PLACENTA, SIGNAL = 1.1; EXPRESSED IN BONE MARROW, SIGNAL = 0.71; EXPRESSED IN ADULT LIVER, SIGNAL = 0.53; SWISSPROT HIT: P13264, EVALUE 1.60e+00; EST_HUMAN HIT: AW369688.1, EVALUE 1.00e-18
GNKFKNKIFEKKIRNCATTGKPPGKDSKCRQKPAESEQSPHGPKEHPGKALQK

SEQ ID NO: 47052 - protein, 48 aa, Homo sapiens
  MAP TO AC004027.1; EXPRESSED IN LUNG, SIGNAL = 0.52; EXPRESSED IN BONE MARROW, SIGNAL = 0.61; EXPRESSED IN ADULT LIVER, SIGNAL = 0.47; EST_HUMAN HIT: T80357.1, EVALUE 1.40e-02
VLAHEEKSTGTGNSQAALVLMKDLGEGDFFSFSSTTENSWSFSHEISA

SEQ ID NO: 47053 - protein, 52 aa, Homo sapiens
  MAP TO AC006478.2; EXPRESSED IN LUNG, SIGNAL = 0.61; EXPRESSED IN FETAL LIVER, SIGNAL = 0.67; EXPRESSED IN ADULT LIVER, SIGNAL = 0.51; SWISSPROT HIT: O70546, EVALUE 8.00e+00
LSSARCVPSAASSQLAALKTRIVGNEGASGTGDADSQAHLQAMLAGEQLHLR

SEQ ID NO: 47054 - protein, 25 aa, Homo sapiens
  MAP TO AC006484.2; EXPRESSED IN BONE MARROW, SIGNAL = 0.69; EXPRESSED IN ADULT LIVER, SIGNAL = 0.57; EXPRESSED IN PLACENTA, SIGNAL = 0.82; EXPRESSED IN LUNG, SIGNAL = 0.6
NYFPSLDVHQNLQKIMFKNIDYKFQ

SEQ ID NO: 47055 - protein, 19 aa, Homo sapiens
  MAP TO AC006484.2; EXPRESSED IN BONE MARROW, SIGNAL = 0.69; EXPRESSED IN ADULT LIVER, SIGNAL = 0.57; EXPRESSED IN PLACENTA, SIGNAL = 0.82; EXPRESSED IN LUNG, SIGNAL = 0.6
TTSQAWMFIRISRKSCLKI

SEQ ID NO: 47056 - protein, 27 aa, Homo sapiens
  MAP TO AC004686.1; EXPRESSED IN LUNG, SIGNAL = 0.5; EXPRESSED IN BONE MARROW, SIGNAL = 0.66; EXPRESSED IN ADULT LIVER, SIGNAL = 0.61; EXPRESSED IN PLACENTA, SIGNAL = 0.66; EST_HUMAN HIT: H04661.1, EVALUE 3.00e-08; SWISSPROT HIT: P21425, EVALUE 2.00e-09
EEDVSQFDSKFTRQTPVDSPDDSTLSE

SEQ ID NO: 47057 - protein, 48 aa, Homo sapiens
  MAP TO AC004960.1; EXPRESSED IN LUNG, SIGNAL = 0.53; EXPRESSED IN BONE MARROW, SIGNAL = 0.73; EXPRESSED IN ADULT LIVER, SIGNAL = 0.56; SWISSPROT HIT: P14210, EVALUE 2.00e-22; EST_HUMAN HIT: AV759905.1, EVALUE 2.00e-21
GQRKRRNTIHEFKKSAKTTLIKIDPALKIKTKKVNTADQCANRCTRNK

SEQ ID NO: 47058 - protein, 63 aa, Homo sapiens
  MAP TO AC004057.1; EXPRESSED IN BONE MARROW, SIGNAL = 0.53; EXPRESSED IN LUNG, SIGNAL = 0.8; EXPRESSED IN ADULT LIVER, SIGNAL = 0.41; EST_HUMAN HIT: T06245.1, EVALUE 2.00e-27; SWISSPROT HIT: Q01484, EVALUE 3.00e-31
NGYTPLHIAAKKNQMQIASTLLNYGAETNIVTKQGVTPLHLASQEGHTDMVTLLLDKGANIHM

SEQ ID NO: 47059 - protein, 72 aa, Homo sapiens
  MAP TO AC004583.1; EXPRESSED IN ADULT LIVER, SIGNAL = 0.67; EXPRESSED IN PLACENTA, SIGNAL = 0.8; EXPRESSED IN LUNG, SIGNAL = 0.76; EXPRESSED IN BONE MARROW, SIGNAL = 0.73; SWISSPROT HIT: Q00121, EVALUE 2.30e-01; EST_HUMAN HIT: BE074020.1, EVALUE 9.00e-13
VNELKECLSVLVKEQQALAVQSATTTLSALRLKQRLVILERYFIALNRTVFQENVKVKWKSSGISLPPVDKK

SEQ ID NO: 47060 - protein, 27 aa, Homo sapiens
  MAP TO AC004583.1; EXPRESSED IN ADULT LIVER, SIGNAL = 0.67; EXPRESSED IN PLACENTA, SIGNAL = 0.8; EXPRESSED IN LUNG, SIGNAL = 0.76; EXPRESSED IN BONE MARROW, SIGNAL = 0.73
CWLKSSRPWPSSQPPPPSQPCDSSRGW

SEQ ID NO: 47061 - protein, 47 aa, Homo sapiens
  MAP TO AC002452.1; EXPRESSED IN BONE MARROW, SIGNAL = 0.51; EXPRESSED IN PLACENTA, SIGNAL = 0.59; EXPRESSED IN LUNG, SIGNAL = 0.68; EXPRESSED IN ADULT LIVER, SIGNAL = 0.71; SWISSPROT HIT: O14576, EVALUE 7.00e-25
HNKPLYSFEDNADYVYDVMWSPVHPALFACVDGMGRLDLWNLNNDTE

SEQ ID NO: 47062 - protein, 43 aa, Homo sapiens
  MAP TO AC002452.1; EXPRESSED IN BONE MARROW, SIGNAL = 0.51; EXPRESSED IN PLACENTA, SIGNAL = 0.59; EXPRESSED IN LUNG, SIGNAL = 0.68; EXPRESSED IN ADULT LIVER, SIGNAL = 0.71; SWISSPROT HIT: P56680, EVALUE 6.30e+00
STTSRSTPLKTMQTMCTMSCGPPCILRFLPAWTGWGAWTSGTS

SEQ ID NO: 47063 - protein, 83 aa, Homo sapiens
  MAP TO AC004893.1; EXPRESSED IN PLACENTA, SIGNAL = 0.61; EXPRESSED IN LUNG, SIGNAL = 0.75; EXPRESSED IN BONE MARROW, SIGNAL = 0.54; EXPRESSED IN ADULT LIVER, SIGNAL = 0.44; SWISSPROT HIT: P08798, EVALUE 5.60e-01
DCQPSALNCFVEAMSQCVPPIPIRPCVLKYLGKTHNLWFRSTLMLEHQAFEKGLSLQIKPKQTTEFYEQESITPPQQVRVRLS

SEQ ID NO: 47064 - protein, 195 aa, Homo sapiens
  MAP TO AC005600.1; EXPRESSED IN PLACENTA, SIGNAL = 0.64; EXPRESSED IN BONE MARROW, SIGNAL = 0.64; EXPRESSED IN ADULT LIVER, SIGNAL = 0.47; EXPRESSED IN LUNG, SIGNAL = 0.47; SWISSPROT HIT: P49815, EVALUE 2.00e-43
WRDHQVSPDMEGLVDTSVAKIVSDRNLPFVARQMALHANVSGGGSRRELVGQAQVPPDSELTPCLRPQMASQVHHSRSNPTDIYPSKWIARLRHIKRLRQRVGNMGLPQRGVLAAQAVGRVCGQSGCHASQTYCPSRLCLQICEEAAYSNPSLPLVHPPSHSKAPAQTPAEPTPGYEVGQRKRLISSVEDFTEFV

SEQ ID NO: 47065 - protein, 21 aa, Homo sapiens
  MAP TO AC005510.3; EXPRESSED IN LUNG, SIGNAL = 0.78; EXPRESSED IN ADULT LIVER, SIGNAL = 0.89; EXPRESSED IN PLACENTA, SIGNAL = 0.73; EXPRESSED IN FETAL LIVER, SIGNAL = 0.89; EXPRESSED IN BONE MARROW, SIGNAL = 0.83
LHEIAIIIIIIIIIIIIIISL

SEQ ID NO: 47066 - protein, 26 aa, Homo sapiens
  MAP TO AC004864.1; EXPRESSED IN ADULT LIVER, SIGNAL = 0.64; EXPRESSED IN PLACENTA, SIGNAL = 0.6; EXPRESSED IN LUNG, SIGNAL = 0.68; EXPRESSED IN BONE MARROW, SIGNAL = 0.55
GCELISTPDQDHTDFTKCLKMLQKKI

SEQ ID NO: 47067 - protein, 44 aa, Homo sapiens
  MAP TO AC004870.2; EXPRESSED IN ADULT LIVER, SIGNAL = 0.53; EXPRESSED IN LUNG, SIGNAL = 0.64; EXPRESSED IN PLACENTA, SIGNAL = 0.67; EXPRESSED IN BONE MARROW, SIGNAL = 0.59
WNSTTNKTPQQQQNLGTCSRQGQQVPLLRAWLWSRSCSFCSTPP

SEQ ID NO: 47068 - protein, 49 aa, Homo sapiens; identical to SEQ ID NO: 44385
  MAP TO AC005702.1; EXPRESSED IN LUNG, SIGNAL = 0.64; EXPRESSED IN PLACENTA, SIGNAL = 0.74; EXPRESSED IN BONE MARROW, SIGNAL = 0.59; EXPRESSED IN ADULT LIVER, SIGNAL = 0.74; SWISSPROT HIT: P21425, EVALUE 3.00e-22

SEQ ID NO: 47069 - protein, 18 aa, Homo sapiens
  MAP TO AC006145.2; EXPRESSED IN PLACENTA, SIGNAL = 0.66; EXPRESSED IN ADULT LIVER, SIGNAL = 0.41
FRNLMQNAPDWPFVCVFL

SEQ ID NO: 47070 - protein, 45 aa, Homo sapiens
  MAP TO AC005959.1; EXPRESSED IN PLACENTA, SIGNAL = 0.85; EXPRESSED IN LUNG, SIGNAL = 0.71; EXPRESSED IN ADULT LIVER, SIGNAL = 0.61; EXPRESSED IN BONE MARROW, SIGNAL = 8.7; SWISSPROT HIT: O15503, EVALUE 6.30e+00
AMKVKTPLRALKSLWDYDFLIYDGVIDNTAPDFLAFKEHFSLAWG

SEQ ID NO: 47071 - protein, 24 aa, Homo sapiens
  MAP TO AC003081.1; EXPRESSED IN LUNG, SIGNAL = 0.42; EXPRESSED IN ADULT LIVER, SIGNAL = 0.47
QYESNKTNLNMVDEETEDQNECKK

SEQ ID NO: 47072 - protein, 65 aa, Homo sapiens
  MAP TO AC005589.1; EXPRESSED IN PLACENTA, SIGNAL = 0.68; EXPRESSED IN LUNG, SIGNAL = 0.8; EXPRESSED IN FETAL LIVER, SIGNAL = 0.83; EXPRESSED IN BONE MARROW, SIGNAL = 0.78; EXPRESSED IN ADULT LIVER, SIGNAL = 0.79; SWISSPROT HIT: P98106, EVALUE 3.40e+00
VLIPMSRSLKPLNGFCTSVISKLSRKLMHFLERKPGFQRRGGKILETDEGGVETLPKPTMHQVEK

SEQ ID NO: 47073 - protein, 31 aa, Homo sapiens
  MAP TO AC003959.1; EXPRESSED IN PLACENTA, SIGNAL = 0.64; EXPRESSED IN LUNG, SIGNAL = 0.77; EXPRESSED IN FETAL LIVER, SIGNAL = 0.72; EXPRESSED IN ADULT LIVER, SIGNAL = 0.55; EXPRESSED IN BONE MARROW, SIGNAL = 0.65
LPAASPEDGQQRNKKMDSLAAGELNASHQPW

SEQ ID NO: 47074 - protein, 49 aa, Homo sapiens
  MAP TO AC006011.2; EXPRESSED IN LUNG, SIGNAL = 0.96; EXPRESSED IN FETAL LIVER, SIGNAL = 1.4; EXPRESSED IN BONE MARROW, SIGNAL = 0.87; EXPRESSED IN PLACENTA, SIGNAL = 0.98; EXPRESSED IN ADULT LIVER, SIGNAL = 1.1; SWISSPROT HIT: P42841, EVALUE 6.00e-07
AHDSPVRAMTWSHNDMWMLTADHGGYVKYWQSNMNNVKMFQAHKEAIRE

SEQ ID NO: 47075 - protein, 37 aa, Homo sapiens
  MAP TO AC003046.1; EXPRESSED IN PLACENTA, SIGNAL = 0.59; EXPRESSED IN LUNG, SIGNAL = 0.48; EXPRESSED IN ADULT LIVER, SIGNAL = 0.48
KLYDKKDTNRIPFLKDYAGFCSPWLCSDNKCMLRGSP

SEQ ID NO: 47076 - protein, 24 aa, Homo sapiens
  MAP TO AC003046.1; EXPRESSED IN PLACENTA, SIGNAL = 0.59; EXPRESSED IN LUNG, SIGNAL = 0.48; EXPRESSED IN ADULT LIVER, SIGNAL = 0.48
KCCFTIPWPTFQANLLQKQFLWGL

SEQ ID NO: 47077 - protein, 37 aa, Homo sapiens
  MAP TO AC005886.1; EXPRESSED IN LUNG, SIGNAL = 0.71; EXPRESSED IN BONE MARROW, SIGNAL = 0.56; EXPRESSED IN ADULT LIVER, SIGNAL = 0.51
FAPMLFSMETGTAVNTGQDGFRRVMDSVYRAQTYFVP

SEQ ID NO: 47078 - protein, 21 aa, Homo sapiens
  MAP TO AC005886.1; EXPRESSED IN LUNG, SIGNAL = 0.71; EXPRESSED IN BONE MARROW, SIGNAL = 0.56; EXPRESSED IN ADULT LIVER, SIGNAL = 0.51
FCPHAVFNGNWNSSEHRSGWV

SEQ ID NO: 47079 - protein, 37 aa, Homo sapiens
  MAP TO AC006484.2; EXPRESSED IN PLACENTA, SIGNAL = 0.93; EXPRESSED IN FETAL LIVER, SIGNAL = 0.71; EXPRESSED IN BONE MARROW, SIGNAL = 0.95; EXPRESSED IN ADULT LIVER, SIGNAL = 0.71; EXPRESSED IN LUNG, SIGNAL = 0.83
GNIKFTEVNGKTTFKEILRIIVFAKHLAKMWVRESGQ

SEQ ID NO: 47080 - protein, 32 aa, Homo sapiens
  MAP TO AC006321.1; EXPRESSED IN PLACENTA, SIGNAL = 0.59; EXPRESSED IN LUNG, SIGNAL = 0.5; EXPRESSED IN BONE MARROW, SIGNAL = 0.57; EXPRESSED IN ADULT LIVER, SIGNAL = 0.59
VPDHDVIASTSSFNLGIPLCRTQELPTIDAIN

SEQ ID NO: 47081 - protein, 31 aa, Homo sapiens; identical to SEQ ID NO: 44749
  MAP TO AC006321.1; EXPRESSED IN PLACENTA, SIGNAL = 0.59; EXPRESSED IN LUNG, SIGNAL = 0.5; EXPRESSED IN BONE MARROW, SIGNAL = 0.57; EXPRESSED IN ADULT LIVER, SIGNAL = 0.59; SWISSPROT HIT: Q10441, EVALUE 8.50e+00

SEQ ID NO: 47082 - protein, 100 aa, Homo sapiens
  MAP TO AC002086.1; EXPRESSED IN PLACENTA, SIGNAL = 0.59; EXPRESSED IN ADULT LIVER, SIGNAL = 0.51; EXPRESSED IN LUNG, SIGNAL = 0.7
ASGSGRGNVLQFVQEPQAQQSRPFPAGAQLSLELLFSDWGMEWAQPRLPKPALPLPVVVAFSRAADCAVDHHFRFCLLLRLLRQLLTLLRDEEREVNPWQ

SEQ ID NO: 47083 - protein, 28 aa, Homo sapiens
  MAP TO AC002091.1; EXPRESSED IN PLACENTA, SIGNAL = 0.82; EXPRESSED IN ADULT LIVER, SIGNAL = 0.48; EXPRESSED IN LUNG, SIGNAL = 0.8; EXPRESSED IN BONE MARROW, SIGNAL = 0.71
NHLCAEKQPPCSLFCCPRQPHPPPPTPK

SEQ ID NO: 47084 - protein, 28 aa, Homo sapiens
  MAP TO AC002091.1; EXPRESSED IN PLACENTA, SIGNAL = 0.82; EXPRESSED IN ADULT LIVER, SIGNAL = 0.48; EXPRESSED IN LUNG, SIGNAL = 0.8; EXPRESSED IN BONE MARROW, SIGNAL = 0.71
PPLCRKATTLFSILLPETTTSSSSYTQR

SEQ ID NO: 47085 - protein, 48 aa, Homo sapiens
  MAP TO AC005045.2; EXPRESSED IN LUNG, SIGNAL = 0.5; EXPRESSED IN ADULT LIVER, SIGNAL = 0.48; SWISSPROT HIT: P11466, EVALUE 3.00e-16
KPFANQEEYKKTEEIVQKFQSGIGEKLHQKLLERAKGKRNWVFVVIIE

SEQ ID NO: 47086 - protein, 74 aa, Homo sapiens
  MAP TO AC004104.1; EXPRESSED IN BONE MARROW, SIGNAL =  52; EXPRESSED IN ADULT LIVER, SIGNAL = 0.67; EXPRESSED IN LUNG, SIGNAL = 0.54; SWISSPROT HIT: P30414, EVALUE 1.80e+00
FAKNGEVAKIDKALVETANNFNPGVDEDDTEELLEVVPEELTNEKLELEQECIVKKKGKRKENCRRRKRIPKKI

SEQ ID NO: 47087 - protein, 83 aa, Homo sapiens
  MAP TO AC004125.1; EXPRESSED IN LUNG, SIGNAL = 0.54; EXPRESSED IN ADULT LIVER, SIGNAL = 0.57; EXPRESSED IN BONE MARROW, SIGNAL = 0.81; SWISSPROT HIT: P23964, EVALUE 1.00e-03
MLEYVCNPDYLGGQGGKITGALDMEAAVSYNPISLHSSLGNRDILKEARVLDSIMALLLQAKSFYLNNSHYMMKTDSFTYFTP

SEQ ID NO: 47088 - protein, 33 aa, Homo sapiens
  MAP TO AC006451.1; EXPRESSED IN PLACENTA, SIGNAL = 0.99; EXPRESSED IN LUNG, SIGNAL = 0.48; EXPRESSED IN BONE MARROW, SIGNAL = 0.6; EXPRESSED IN ADULT LIVER, SIGNAL = 0.53; SWISSPROT HIT: Q05209, EVALUE 1.00e-12
EQYELVHRAIAQLFEKQLQLYEIHGAQKIADGV

SEQ ID NO: 47089 - protein, 32 aa, Homo sapiens
  MAP TO AC006451.1; EXPRESSED IN PLACENTA, SIGNAL = 0.99; EXPRESSED IN LUNG, SIGNAL = 0.48; EXPRESSED IN BONE MARROW, SIGNAL = 0.6; EXPRESSED IN ADULT LIVER, SIGNAL = 0.53
LIIFLLHRSNMNLFIELLPNCLKNSYNYMKFM

SEQ ID NO: 47090 - protein, 68 aa, Homo sapiens
  MAP TO AC005703.1; EXPRESSED IN LUNG, SIGNAL = 0.46; EXPRESSED IN PLACENTA, SIGNAL = 0.65; EXPRESSED IN BONE MARROW, SIGNAL = 0.51; EXPRESSED IN ADULT LIVER, SIGNAL = 0.51; SWISSPROT HIT: P87035, EVALUE 3.00e-01
WAKFTDDNILRSQSERAASAKLRDDIENLLVVTANEMWNQFNKVNLSFTNRIAETADAKNKIQTHLAK

SEQ ID NO: 47091 - protein, 21 aa, Homo sapiens
  MAP TO AC005703.1; EXPRESSED IN LUNG, SIGNAL = 0.46; EXPRESSED IN PLACENTA, SIGNAL = 0.65; EXPRESSED IN BONE MARROW, SIGNAL = 0.51; EXPRESSED IN ADULT LIVER, SIGNAL = 0.51
GPNLQMTIFSAPRVNGQLPLS

SEQ ID NO: 47092 - protein, 59 aa, Homo sapiens
  MAP TO AC002092.1; EXPRESSED IN LUNG, SIGNAL = 0.49; EXPRESSED IN ADULT LIVER, SIGNAL = 0.5; EXPRESSED IN PLACENTA, SIGNAL = 0.58; EXPRESSED IN BONE MARROW, SIGNAL = 0.5; SWISSPROT HIT: P08418, EVALUE 6.00e+00
MSLSSHHLPLPVCVQYAWVEKYFGPDFLEQIVLTRDKTVVSADLLIDDRPDITGKWPAT

SEQ ID NO: 47093 - protein, 42 aa, Homo sapiens
  MAP TO AC004226.1; EXPRESSED IN BONE MARROW, SIGNAL = 0.61; EXPRESSED IN LUNG, SIGNAL = 0.44; EXPRESSED IN ADULT LIVER, SIGNAL = 0.43
PVTDERHTLTQIFCLSVWLRGSALSLEHRLNKPVKFALFSTD

SEQ ID NO: 47094 - protein, 58 aa, Homo sapiens
  MAP TO AC005562.1; EXPRESSED IN PLACENTA, SIGNAL = 0.65; EXPRESSED IN LUNG, SIGNAL = 0.64; EXPRESSED IN ADULT LIVER, SIGNAL = 0.68; EXPRESSED IN BONE MARROW, SIGNAL = 0.58
GSPFPLPCCLPPPSTPPSLRANGPVAGGSVAVSGGGGFAARRDVGAVWGGGGRKIIHT

SEQ ID NO: 47095 - protein, 64 aa, Homo sapiens
  MAP TO AC002081.1; EXPRESSED IN LUNG, SIGNAL = 0.55; EXPRESSED IN BONE MARROW, SIGNAL = 0.52; EXPRESSED IN ADULT LIVER, SIGNAL = 0.49; SWISSPROT HIT: Q00019, EVALUE 8.90e-01
FSCASGEYLEMKNQVCSKCGEGTYSLGSGIKFDEWDELPAGFSNIATFMDTVVGPSDSRPDGCN

SEQ ID NO: 47096 - protein, 70 aa, Homo sapiens
  MAP TO AC004833.1; EXPRESSED IN LUNG, SIGNAL = 0.41; EXPRESSED IN ADULT LIVER, SIGNAL = 0.55; SWISSPROT HIT: P17814, EVALUE 3.40e+00
AHAKNTPGIHAEMTKIIITFGHIMHSFLKLAEMYFLTLQLKAHLTFPEVPVAMVPGHSEEELTEDDTSQM

SEQ ID NO: 47097 - protein, 34 aa, Homo sapiens
  MAP TO AC003677.1; EXPRESSED IN LUNG, SIGNAL = 0.56; EXPRESSED IN ADULT LIVER, SIGNAL = 0.42; EXPRESSED IN BONE MARROW, SIGNAL = 0.49
MGSFLPRLPPPVPSQAISGATSMGLLQEGNQQAK

SEQ ID NO: 47098 - protein, 64 aa, Homo sapiens
  MAP TO AC005078.1; EXPRESSED IN BONE MARROW, SIGNAL = 0.76; EXPRESSED IN ADULT LIVER, SIGNAL = 0.76; EXPRESSED IN LUNG, SIGNAL = 0.7; EXPRESSED IN FETAL LIVER, SIGNAL = 0.77; EXPRESSED IN PLACENTA, SIGNAL = 0.79; SWISSPROT HIT: P39057, EVALUE 3.00e-15
GIDSHMLLQQPLIYCHFADRGKDPHYMPVKDWEVLKTILTETLDNYNELNAAMHLVLFEDAMQH

SEQ ID NO: 47099 - protein, 36 aa, Homo sapiens
  MAP TO AC005181.1; EXPRESSED IN LUNG, SIGNAL = 0.44; EXPRESSED IN BONE MARROW, SIGNAL = 0.54; EXPRESSED IN ADULT LIVER, SIGNAL = 0.47
QKKTKQNNNKTLLSSFIATNCSQNIAVRKIPAASRS

SEQ ID NO: 47100 - protein, 31 aa, Homo sapiens
  MAP TO AC003658.1; EXPRESSED IN LUNG, SIGNAL = 0.62; EXPRESSED IN ADULT LIVER, SIGNAL = 0.62; SWISSPROT HIT: Q58586, EVALUE 2.20e+00
LYSLDTILNDSVLQFSQLKNEDNNGAHLIGL

SEQ ID NO: 47101 - protein, 67 aa, Homo sapiens
  MAP TO AC005224.1; EXPRESSED IN BONE MARROW, SIGNAL = 0.63; EXPRESSED IN LUNG, SIGNAL = 0.76; EXPRESSED IN FETAL LIVER, SIGNAL = 0.71; EXPRESSED IN ADULT LIVER, SIGNAL = 0.67; EXPRESSED IN PLACENTA, SIGNAL = 0.67; SWISSPROT HIT: P48529, EVALUE 1.60e+00
LVLRTLMEATSFYPDGVFWGCGFGGWEVQKHISEGCELFVVDQPPDVADGWIVSPRSSGAERGTSRQ

SEQ ID NO: 47102 - protein, 90 aa, Homo sapiens
  MAP TO AC005612.1; EXPRESSED IN BONE MARROW, SIGNAL = 0.57; EXPRESSED IN PLACENTA, SIGNAL = 0.59; EXPRESSED IN LUNG, SIGNAL = 0.72; EXPRESSED IN ADULT LIVER, SIGNAL = 0.59; SWISSPROT HIT: P20591, EVALUE 2.00e-35
SKIEDIRAEQEREGEKLIRLHFQMEQIVYCQDQVYRGALQKVREKELEEEKKKKSWDFGAFQSSSATDSSMEEIFQHLMAYHQVRLRVVQ

SEQ ID NO: 47103 - protein, 124 aa, Homo sapiens
  MAP TO AC004013.1; EXPRESSED IN ADULT LIVER, SIGNAL = 0.47; EXPRESSED IN LUNG, SIGNAL = 0.51; EXPRESSED IN PLACENTA, SIGNAL = 0.64; SWISSPROT HIT: P50468, EVALUE 6.00e-04
DLLKELQKQLEEKHSRIVELLNETEKYKLDSLQTRQQMEKDRQVHRKTLQTEQEANTEGQKKMHELQSKVEDLQRQLEEKRQQVYKLDLEGQRLQGIMQEFQKQELEREEKRESRRILYQNLNE

SEQ ID NO: 47104 - protein, 68 aa, Homo sapiens
  MAP TO AC005083.1; EXPRESSED IN PLACENTA, SIGNAL = 0.7; EXPRESSED IN LUNG, SIGNAL = 0.49; EXPRESSED IN BONE MARROW, SIGNAL = 0.5; EXPRESSED IN ADULT LIVER, SIGNAL = 0.48; SWISSPROT HIT: P43802, EVALUE 8.80e-01
ALLKMDCQELVARLIQEAAVLTSAVKLGKGWRELAEKLVRLTKQQMEAYEIPHRGNTGDVAVEVRLLF

SEQ ID NO: 47105 - protein, 81 aa, Homo sapiens
  MAP TO AC006457.2; EXPRESSED IN PLACENTA, SIGNAL = 0.69; EXPRESSED IN ADULT LIVER, SIGNAL = 0.55; EXPRESSED IN LUNG, SIGNAL = 0.61; SWISSPROT HIT: Q80903, EVALUE 2.80e-01
ADLLPVPPGEPGDPGDRHPRPTPTPSSLCAGSSTPMLSESMAPGRGRGSSRTGQPFSRTHPRPCSSPWPRRTTEGLASQGG

SEQ ID NO: 47106 - protein, 46 aa, Homo sapiens
  MAP TO AC003657.1; EXPRESSED IN LUNG, SIGNAL = 0.64; EXPRESSED IN BONE MARROW, SIGNAL = 0.52; EXPRESSED IN ADULT LIVER, SIGNAL = 0.42
LHFPLASFESFELPSTPIFVMHLQLPHSHIAVGRSSHAEDAKANLK

SEQ ID NO: 47107 - protein, 78 aa, Homo sapiens
  MAP TO AC005741.1; EXPRESSED IN LUNG, SIGNAL = 0.84; EXPRESSED IN PLACENTA, SIGNAL = 0.73; EXPRESSED IN BONE MARROW, SIGNAL = 0.6; EXPRESSED IN ADULT LIVER, SIGNAL = 0.77; SWISSPROT HIT: Q02224, EVALUE 4.40e-02
MARMLIKIQEKVETQCKESKESSKIIQELKDKIAILRKNQPELLEVQNSLQEFHNAVRSINSRINKPRKNSQSSKTGS

SEQ ID NO: 47108 - protein, 24 aa, Homo sapiens
  MAP TO AC005741.1; EXPRESSED IN LUNG, SIGNAL = 0.84; EXPRESSED IN PLACENTA, SIGNAL = 0.73; EXPRESSED IN BONE MARROW, SIGNAL = 0.6; EXPRESSED IN ADULT LIVER, SIGNAL = 0.77
WQECLLRSRRKLKPNAKNPRNPVK

SEQ ID NO: 47109 - protein, 139 aa, Homo sapiens
  MAP TO AC003098.1; EXPRESSED IN LUNG, SIGNAL = 0.62; EXPRESSED IN BONE MARROW, SIGNAL = 2.6; EXPRESSED IN ADULT LIVER, SIGNAL = 0.49; SWISSPROT HIT: P45646, EVALUE 4.70e-01
VSEYSCRELHFTRYVTDGPCRSAKPVTELVCSGQCGPARLLPNAIGRGKWWRPSGPDFRCIPDRYRAQRVQLLCPGGEAPRARKVRLVASCKCKRLTRFHNQSELKDFGTEAARPQKGRKPRPRARSAKANQAELENAY

SEQ ID NO: 47110 - protein, 40 aa, Homo sapiens
  MAP TO AC005229.1; EXPRESSED IN ADULT LIVER, SIGNAL = 0.54; EXPRESSED IN LUNG, SIGNAL = 0.52
QAPNAFHIAAPTITTTNPNMQKIMNRQIRLALQIGRDRTV

SEQ ID NO: 47111 - protein, 45 aa, Homo sapiens
  MAP TO AC005192.1; EXPRESSED IN LUNG, SIGNAL = 0.59; EXPRESSED IN BONE MARROW, SIGNAL = 1.2; EXPRESSED IN ADULT LIVER, SIGNAL = 0.63; EXPRESSED IN PLACENTA, SIGNAL = 1.4; SWISSPROT HIT: O00458, EVALUE 1.00e-19
DFFYEDMESLTQMLRALATDGNKHRAKVDKRKQRSVFRDVLRAVE

SEQ ID NO: 47112 - protein, 151 aa, Homo sapiens
  MAP TO AC006322.2; EXPRESSED IN LUNG, SIGNAL = 0.73; EXPRESSED IN ADULT LIVER, SIGNAL = 0.55; SWISSPROT HIT: Q14563, EVALUE 2.00e-88
IRVDDHIIRTDQGLLLRSLQQKDSGNYLCHAVEHGFIQTLLKVTLEVIDTEHLEELLHKDDDGDGSKTKEMSNSMTPSQKVWYRDFMQLINHPNLNTMDEFCEQVWKRDRKQRRQRPGHTPGNSNKWKHLQENKKGRNRRTHEFERAPRSV

SEQ ID NO: 47113 - protein, 49 aa, Homo sapiens
  MAP TO AC005384.1; EXPRESSED IN PLACENTA, SIGNAL = 0.69; EXPRESSED IN LUNG, SIGNAL = 0.77; EXPRESSED IN FETAL LIVER, SIGNAL = 0.78; EXPRESSED IN BONE MARROW, SIGNAL = 0.88; EXPRESSED IN ADULT LIVER, SIGNAL = 0.79; SWISSPROT HIT: Q04855, EVALUE 2.10e+00
LCLGGEVAVAAHGLAPWPDVEGRHTVPRPVPSIMEKVSVTPSESIAVAQ

SEQ ID NO: 47114 - protein, 40 aa, Homo sapiens
  MAP TO AC005384.1; EXPRESSED IN PLACENTA, SIGNAL = 0.69; EXPRESSED IN LUNG, SIGNAL = 0.77; EXPRESSED IN FETAL LIVER, SIGNAL = 0.78; EXPRESSED IN BONE MARROW, SIGNAL = 0.88; EXPRESSED IN ADULT LIVER, SIGNAL = 0.79
QHLAKGPSHGQQQQPHPQGRAAGKHREGEGQVVGNSQEEI

SEQ ID NO: 47115 - protein, 36 aa, Homo sapiens
  MAP TO AC005165.1; EXPRESSED IN LUNG, SIGNAL = 0.61; EXPRESSED IN FETAL LIVER, SIGNAL = 0.67; EXPRESSED IN BONE MARROW, SIGNAL = 0.62; EXPRESSED IN ADULT LIVER, SIGNAL = 0.6
MERKGEDQEARPTFPPYLSITTTTVNHYYQSFFLYT

SEQ ID NO: 47116 - protein, 78 aa, Homo sapiens
  MAP TO AC005832.1; EXPRESSED IN BONE MARROW, SIGNAL = 0.7; EXPRESSED IN ADULT LIVER, SIGNAL = 0.41; SWISSPROT HIT: Q9Y9J0, EVALUE 2.20e+00
TTLEHARPEEPSWDEDFADVYHDLIHSPASETLLNLEHNYFVSISELIGERDVELKKLRERYFKFLALSELNVTLSNR

SEQ ID NO: 47117 - protein, 20 aa, Homo sapiens
  MAP TO AC004465.1; EXPRESSED IN LUNG, SIGNAL = 0.92; EXPRESSED IN FETAL LIVER, SIGNAL = 0.77; EXPRESSED IN BONE MARROW, SIGNAL = 0.86; EXPRESSED IN PLACENTA, SIGNAL = 0.8; EXPRESSED IN ADULT LIVER, SIGNAL = 0.81
PQPRQLVERQAYSIFKKTCI

SEQ ID NO: 47118 - protein, 95 aa, Homo sapiens
  MAP TO AC004529.1; EXPRESSED IN PLACENTA, SIGNAL =  11; EXPRESSED IN BONE MARROW, SIGNAL =  48; EXPRESSED IN ADULT LIVER, SIGNAL = 4.1; EXPRESSED IN LUNG, SIGNAL = 1.7; SWISSPROT HIT: P01764, EVALUE 1.00e-42
VQSGGGLVHPGGSLRLSCAGSGFTFSSYAMHWVRQAPGKGLEWVSAIGTGGGTYYADSVKGRFTISRDNAKNSLYLQMNSLRAEDMAVYYCARDT

SEQ ID NO: 47119 - protein, 49 aa, Homo sapiens [sequence omitted]

SEQ ID NO: 47120 - protein, 27 aa, Homo sapiens
  MAP TO AC006406.1; EXPRESSED IN PLACENTA, SIGNAL = 0.7; EXPRESSED IN ADULT LIVER, SIGNAL = 0.55; EXPRESSED IN BONE MARROW, SIGNAL =   1
RRYPRPLKRVRPGLRRTEQPIGFLWPM

SEQ ID NO: 47121 - protein, 53 aa, Homo sapiens
  MAP TO AC004132.1; EXPRESSED IN BONE MARROW, SIGNAL = 0.58; EXPRESSED IN ADULT LIVER, SIGNAL = 0.43; EXPRESSED IN LUNG, SIGNAL = 0.54
VPQGKSGVWLKRNAGKGTSMCKSWLGHSPAVVWTNCLTSVSSSVKWGIMMPTS

SEQ ID NO: 47122 - protein, 58 aa, Homo sapiens
  MAP TO AC005666.1; EXPRESSED IN PLACENTA, SIGNAL = 0.74; EXPRESSED IN ADULT LIVER, SIGNAL = 0.53; EXPRESSED IN LUNG, SIGNAL = 0.75; EXPRESSED IN BONE MARROW, SIGNAL = 0.71; SWISSPROT HIT: P32325, EVALUE 6.00e+00
ACSLPQSPEYIYTIHTAQPVENSTIQESAAIQQAHVKLKEHLNHNPSPSSVVFVQEGP

SEQ ID NO: 47123 - protein, 37 aa, Homo sapiens
  MAP TO AC005666.1; EXPRESSED IN PLACENTA, SIGNAL = 0.74; EXPRESSED IN ADULT LIVER, SIGNAL = 0.53; EXPRESSED IN LUNG, SIGNAL = 0.75; EXPRESSED IN BONE MARROW, SIGNAL = 0.71
PALYHSHLSTSIPSTQLSLLKIAQYRNLQPSSKLMSN

SEQ ID NO: 47124 - protein, 42 aa, Homo sapiens
  MAP TO AC006359.3; EXPRESSED IN LUNG, SIGNAL = 0.49; EXPRESSED IN BONE MARROW, SIGNAL = 0.57; EXPRESSED IN ADULT LIVER, SIGNAL = 0.57
TMGRKNPSGSCTCRMVPVLSTKAGQIPRKYFSTTTWTMCLSV

SEQ ID NO: 47125 - protein, 40 aa, Homo sapiens
  MAP TO AC004033.3; EXPRESSED IN LUNG, SIGNAL = 0.51; EXPRESSED IN ADULT LIVER, SIGNAL = 0.45
QLPDGLLPDDLCAIMPKTLHLIVSSSAAKSNRRVLGNRLT

SEQ ID NO: 47126 - protein, 68 aa, Homo sapiens
  MAP TO AC005323.1; EXPRESSED IN PLACENTA, SIGNAL = 0.69; EXPRESSED IN LUNG, SIGNAL = 0.53; EXPRESSED IN ADULT LIVER, SIGNAL = 0.4; EXPRESSED IN BONE MARROW, SIGNAL = 0.52; SWISSPROT HIT: gi127772, EVALUE 2.00e-28
DTQLHLDDAIRGQDDLKEQLAMVERRANLMQAEVEELRASLERTERGRKMAEQELLDASERVQLLHTQ

SEQ ID NO: 47127 - protein, 28 aa, Homo sapiens
  MAP TO AC005323.1; EXPRESSED IN PLACENTA, SIGNAL = 0.69; EXPRESSED IN LUNG, SIGNAL = 0.53; EXPRESSED IN ADULT LIVER, SIGNAL = 0.4; EXPRESSED IN BONE MARROW, SIGNAL = 0.52
TLSYIWMMPSEAKMTLRNNWQWLSAELT

SEQ ID NO: 47128 - protein, 28 aa, Homo sapiens
  MAP TO AC003959.1; EXPRESSED IN LUNG, SIGNAL = 0.42; EXPRESSED IN BONE MARROW, SIGNAL = 0.58; EXPRESSED IN ADULT LIVER, SIGNAL = 0.45
IFLAKKNPTRAMPPPKAQFDNTLGKDGS

SEQ ID NO: 47129 - protein, 75 aa, Homo sapiens [sequence omitted]

SEQ ID NO: 47130 - protein, 26 aa, Homo sapiens
  MAP TO AC006525.1; EXPRESSED IN BONE MARROW, SIGNAL = 0.66; EXPRESSED IN ADULT LIVER, SIGNAL = 0.7; EXPRESSED IN PLACENTA, SIGNAL = 0.79; EXPRESSED IN LUNG, SIGNAL = 0.72
SMRIWVKTPQRYNEPKASNLISFFRF

SEQ ID NO: 47131 - protein, 24 aa, Homo sapiens
  MAP TO AC006484.2; EXPRESSED IN PLACENTA, SIGNAL = 0.77; EXPRESSED IN LUNG, SIGNAL = 0.72; EXPRESSED IN BONE MARROW, SIGNAL = 0.78; EXPRESSED IN ADULT LIVER, SIGNAL = 0.82
AHLSTRLRATPLQQSFRDHLSWKT

SEQ ID NO: 47132 - protein, 17 aa, Homo sapiens
  MAP TO AC006484.2; EXPRESSED IN PLACENTA, SIGNAL = 0.77; EXPRESSED IN LUNG, SIGNAL = 0.72; EXPRESSED IN BONE MARROW, SIGNAL = 0.78; EXPRESSED IN ADULT LIVER, SIGNAL = 0.82
CSSLNQAQSNSIATKLP

SEQ ID NO: 47133 - protein, 19 aa, Homo sapiens
  MAP TO AC005691.1; EXPRESSED IN LUNG, SIGNAL = 0.59; EXPRESSED IN BONE MARROW, SIGNAL = 0.59; EXPRESSED IN ADULT LIVER, SIGNAL = 0.55
DLSSGPCTGVRGPTILPSL

SEQ ID NO: 47134 - protein, 96 aa, Homo sapiens
  MAP TO AC005701.1; EXPRESSED IN PLACENTA, SIGNAL = 0.78; EXPRESSED IN BONE MARROW, SIGNAL = 0.68; EXPRESSED IN ADULT LIVER, SIGNAL = 0.56; EXPRESSED IN LUNG, SIGNAL = 0.62; SWISSPROT HIT: P23098, EVALUE 3.00e-43
DHYDWGLRAIKSVLVVAGSLKRGDPDRPEDQVLMRSLRDFNIPKIVTDDMPIFMGLIGDLFPALDVPRRRDPNFEALVRKAIVDLKLQAEDNFVLK

SEQ ID NO: 47135 - protein, 25 aa, Homo sapiens
  MAP TO AC005701.1; EXPRESSED IN PLACENTA, SIGNAL = 0.78; EXPRESSED IN BONE MARROW, SIGNAL = 0.68; EXPRESSED IN ADULT LIVER, SIGNAL = 0.56; EXPRESSED IN LUNG, SIGNAL = 0.62; EST_HUMAN HIT: AI795798.1, EVALUE 1.80e-01
SNTAHRITTTGAYGPSSPCWWWQDP

SEQ ID NO: 47136 - protein, 41 aa, Homo sapiens
  MAP TO AC004746.1; EXPRESSED IN ADULT LIVER, SIGNAL = 0.63; EXPRESSED IN BONE MARROW, SIGNAL = 0.52; EXPRESSED IN PLACENTA, SIGNAL = 0.64; EXPRESSED IN LUNG, SIGNAL = 0.63
IKTLDKVFRNVNIGSFLVNKASITPLFTQKKWVHRLAKSDI

SEQ ID NO: 47137 - protein, 45 aa, Homo sapiens
  MAP TO AC006206.3; EXPRESSED IN PLACENTA, SIGNAL = 0.64; EXPRESSED IN BONE MARROW, SIGNAL = 0.67; EXPRESSED IN ADULT LIVER, SIGNAL = 0.71; EXPRESSED IN LUNG, SIGNAL = 0.42; SWISSPROT HIT: P03660, EVALUE 4.80e+00
LEHTTFWCAREELVVEGLSSALLGFNLEVTLIPSAPQLVDRMSHM

SEQ ID NO: 47138 - protein, 23 aa, Homo sapiens
  MAP TO AC006206.3; EXPRESSED IN PLACENTA, SIGNAL = 0.64; EXPRESSED IN BONE MARROW, SIGNAL = 0.67; EXPRESSED IN ADULT LIVER, SIGNAL = 0.71; EXPRESSED IN LUNG, SIGNAL = 0.42; EST_HUMAN HIT: AI857666.1, EVALUE 6.20e+00
AWSTRPSGVQGKSWWWRVSHQLC

SEQ ID NO: 47139 - protein, 55 aa, Homo sapiens
  MAP TO AC005036.1; EXPRESSED IN ADULT LIVER, SIGNAL = 0.47; EXPRESSED IN LUNG, SIGNAL = 0.5; EST_HUMAN HIT: AW296990.1, EVALUE 9.00e-04; SWISSPROT HIT: P48634, EVALUE 1.20e+00
AYVPELFLIKLDSCPMDPQAHRSQENGEPKTTLTTVPCPKFLPEGPGGNHTQEPE

SEQ ID NO: 47140 - protein, 24 aa, Homo sapiens
  MAP TO AC004958.1; EXPRESSED IN PLACENTA, SIGNAL = 0.75; EXPRESSED IN BONE MARROW, SIGNAL = 0.65; EXPRESSED IN ADULT LIVER, SIGNAL = 0.65; EXPRESSED IN LUNG, SIGNAL = 0.61
VPFGSPGGTCVHSRGSGLGGGGGD

SEQ ID NO: 47141 - protein, 75 aa, Homo sapiens
  MAP TO AC002300.1; EXPRESSED IN PLACENTA, SIGNAL = 0.77; EXPRESSED IN LUNG, SIGNAL = 0.7; EXPRESSED IN BONE MARROW, SIGNAL = 0.61; EXPRESSED IN ADULT LIVER, SIGNAL = 0.67
MSFGSVTPSVGCFLGLGNHVGDHNVALVVMVMMVRMVMVMVIMEVMVRVMVVMMLMMVMIMVMVLRMMMVMMEEM

SEQ ID NO: 47142 - protein, 41 aa, Homo sapiens
  MAP TO AC004918.1; EXPRESSED IN PLACENTA, SIGNAL = 0.6; EXPRESSED IN LUNG, SIGNAL = 0.76; EXPRESSED IN BONE MARROW, SIGNAL = 0.57; EXPRESSED IN ADULT LIVER, SIGNAL = 0.55; EST_HUMAN HIT: AA386311.1, EVALUE 3.00e-05; SWISSPROT HIT: P47817, EVALUE 9.00e-08
AEQRPSAAALARNTVLRPSLGKTEELQQQLNLEKFKTATLE

SEQ ID NO: 47143 - protein, 67 aa, Homo sapiens
  MAP TO AC006285.9; EXPRESSED IN PLACENTA, SIGNAL = 0.59; EXPRESSED IN BONE MARROW, SIGNAL = 0.59; EXPRESSED IN ADULT LIVER, SIGNAL = 0.56; EXPRESSED IN LUNG, SIGNAL = 0.42; EST_HUMAN HIT: BE736285.1, EVALUE 6.00e-35; SWISSPROT HIT: P14328, EVALUE 3.40e+00
STTVPASGMSASQTYWCLASSKAVLTTASAESWTHWATSCQCWLPSGRATMSCRLMATAAATPAWEE

SEQ ID NO: 47144 - protein, 32 aa, Homo sapiens
  MAP TO AC006197.1; EXPRESSED IN PLACENTA, SIGNAL = 0.68; EXPRESSED IN LUNG, SIGNAL = 0.63; EXPRESSED IN ADULT LIVER, SIGNAL = 0.57
KELVHAVPYIWLHAEKHKTSSSTTIPLTHPGK

SEQ ID NO: 47145 - protein, 49 aa, Homo sapiens
  MAP TO AC006355.3; EXPRESSED IN PLACENTA, SIGNAL = 0.61; EXPRESSED IN LUNG, SIGNAL = 0.52; EXPRESSED IN BONE MARROW, SIGNAL = 0.57; EXPRESSED IN ADULT LIVER, SIGNAL =   2; SWISSPROT HIT: P19451, EVALUE 8.10e+00
YHEDFKAAFNICINTEDGEDIVSLAAQNLVLCMVTRSATRAGSAGFQYV

SEQ ID NO: 47146 - protein, 62 aa, Homo sapiens
  MAP TO AC004806.1; EXPRESSED IN PLACENTA, SIGNAL = 0.62; EXPRESSED IN LUNG, SIGNAL = 0.61; EXPRESSED IN ADULT LIVER, SIGNAL = 0.68; SWISSPROT HIT: P45257, EVALUE 1.20e+00; EST_HUMAN HIT: W00689.1, EVALUE 2.00e-08
VNGSFYEILQVDFGIDNSSDLAGAQQITWQVEYPIEDSMSELVVSEIFVSQTTFVGIVPLAM

SEQ ID NO: 47147 - protein, 72 aa, Homo sapiens
  MAP TO AC004806.1; EXPRESSED IN PLACENTA, SIGNAL = 0.62; EXPRESSED IN LUNG, SIGNAL = 0.61; EXPRESSED IN ADULT LIVER, SIGNAL = 0.68; SWISSPROT HIT: O60566, EVALUE 4.00e+00; EST_HUMAN HIT: W00689.1, EVALUE 4.00e-06
RKLLCDTSSETPRFLTMARGTMPTKVVWLTKISETTSSLMESSIGYSTCQVICWAPARSLLLSIPKSTCKIS

SEQ ID NO: 47148 - protein, 36 aa, Homo sapiens
  MAP TO AC004817.1; EXPRESSED IN ADULT LIVER, SIGNAL = 0.45; EXPRESSED IN LUNG, SIGNAL = 0.54; EST_HUMAN HIT: BF663593.1, EVALUE 1.90e+00; SWISSPROT HIT: P32802, EVALUE 2.20e+00
MIIIYRCFSGPRWTWPWRPICLSGPSCSCSVHIQVV

SEQ ID NO: 47149 - protein, 68 aa, Homo sapiens
  MAP TO AC004381.1; EXPRESSED IN LUNG, SIGNAL = 0.68; EXPRESSED IN BONE MARROW, SIGNAL = 0.66; EXPRESSED IN PLACENTA, SIGNAL = 0.68; EXPRESSED IN ADULT LIVER, SIGNAL = 0.44; EST_HUMAN HIT: AL040175.1, EVALUE 1.00e-32; SWISSPROT HIT: Q9ZMZ0, EVALUE 2.60e+00
VTELTLDCDTLVNELEGDSENQGSIYLSGVSETFKEQLLQEPRLFLGLEAVILPKDLKSGKQKKYCFL

SEQ ID NO: 47150 - protein, 61 aa, Homo sapiens
  MAP TO AC005799.1; EXPRESSED IN LUNG, SIGNAL = 0.42; EXPRESSED IN PLACENTA, SIGNAL = 0.73; EXPRESSED IN ADULT LIVER, SIGNAL = 1.7; EST_HUMAN HIT: AA412321.1, EVALUE 2.00e-24; SWISSPROT HIT: Q02251, EVALUE 6.00e+00
RHKMYREQMNLTSLDPPLQLRLEASWVQFHLGINRHGLYSRSSPVVSKLLQDMRHFPTISA

SEQ ID NO: 47151 - protein, 33 aa, Homo sapiens
  MAP TO AC005799.1; EXPRESSED IN LUNG, SIGNAL = 0.42; EXPRESSED IN PLACENTA, SIGNAL = 0.73; EXPRESSED IN ADULT LIVER, SIGNAL = 1.7; EST_HUMAN HIT: AA412321.1, EVALUE 1.00e-13; SWISSPROT HIT: P29400, EVALUE 1.70e+00
ATQDVQRADEPYLPGPPTAAPTRGQLGPVPPGY

SEQ ID NO: 47152 - protein, 41 aa, Homo sapiens
  MAP TO AC004636.1; EXPRESSED IN PLACENTA, SIGNAL = 0.71; EXPRESSED IN LUNG, SIGNAL = 0.64; EXPRESSED IN ADULT LIVER, SIGNAL = 0.49; SWISSPROT HIT: O35488, EVALUE 5.00e-10; EST_HUMAN HIT: T19992.1, EVALUE 2.00e-14
KFSASQFWSDCKKYDVTVFQYIGELCRYLCKQSKVGVIIIR

SEQ ID NO: 47153 - protein, 66 aa, Homo sapiens
  MAP TO AC004595.1; EXPRESSED IN BONE MARROW, SIGNAL = 0.52; EXPRESSED IN LUNG, SIGNAL = 0.53; EXPRESSED IN ADULT LIVER, SIGNAL = 0.5; EST_HUMAN HIT: AW993165.1, EVALUE 2.00e-37; SWISSPROT HIT: Q02446, EVALUE 2.00e-38
GSNEPGKKKQHICHIEGCGKVYGKTSHLRAHLRWHTGERPFICNWMFCGKRFTRSDELQRHRRTHT

SEQ ID NO: 47154 - protein, 31 aa, Homo sapiens
  MAP TO AC006375.2; EXPRESSED IN FETAL LIVER, SIGNAL = 0.68; EXPRESSED IN ADULT LIVER, SIGNAL = 0.54; EST_HUMAN HIT: BE144452.1, EVALUE 3.50e-02
TMTKMQSTKKKLDFIKIKNFCPLKDMDKRMK

SEQ ID NO: 47155 - protein, 84 aa, Homo sapiens
  MAP TO AC004219.1; EXPRESSED IN LUNG, SIGNAL = 0.62; EXPRESSED IN BONE MARROW, SIGNAL = 0.7; EXPRESSED IN PLACENTA, SIGNAL = 0.67; EXPRESSED IN FETAL LIVER, SIGNAL = 0.78; EXPRESSED IN ADULT LIVER, SIGNAL = 0.66; EST_HUMAN HIT: BE747231.1, EVALUE 1.00e-32; SWISSPROT HIT: P45895, EVALUE 3.70e+00
DSGQDSSKHIELIKGYQNKYPKAEMTLIPMKGEFSRGLGLEMASAQFDNDTLLLFCDVDLIFREDFLQRCRDNTIQGQQVYYPI

SEQ ID NO: 47156 - protein, 28 aa, Homo sapiens
  MAP TO AC004219.1; EXPRESSED IN LUNG, SIGNAL = 0.62; EXPRESSED IN BONE MARROW, SIGNAL = 0.7; EXPRESSED IN PLACENTA, SIGNAL = 0.67; EXPRESSED IN FETAL LIVER, SIGNAL = 0.78; EXPRESSED IN ADULT LIVER, SIGNAL = 0.66; EST_HUMAN HIT: BE747231.1, EVALUE 6.00e-06
KILSSFQGAKEMGGHNEKKVHILVPLIG

SEQ ID NO: 47157 - protein, 37 aa, Homo sapiens
  MAP TO AC004050.1; EXPRESSED IN PLACENTA, SIGNAL = 0.93; EXPRESSED IN LUNG, SIGNAL = 0.72; EXPRESSED IN BONE MARROW, SIGNAL = 0.95; EXPRESSED IN ADULT LIVER, SIGNAL = 0.54; EST_HUMAN HIT: BE561971.1, EVALUE 4.00e-14; SWISSPROT HIT: Q03574, EVALUE 1.30e+00
SALYAAFIFGGRHLMNKRAKFELRKPLVLWSLTLAVF

SEQ ID NO: 47158 - protein, 33 aa, Homo sapiens
  MAP TO AC004057.1; EXPRESSED IN PLACENTA, SIGNAL = 0.96; EXPRESSED IN BONE MARROW, SIGNAL = 1.1; EXPRESSED IN ADULT LIVER, SIGNAL = 0.56; EXPRESSED IN LUNG, SIGNAL = 0.65; SWISSPROT HIT: Q01484, EVALUE 1.00e-11; EST_HUMAN HIT: AW893061.1, EVALUE 4.00e-09
KGNTALHIASLAGQAEVVKVLVKEGANINAQSQ

SEQ ID NO: 47159 - protein, 32 aa, Homo sapiens
  MAP TO AC004057.1; EXPRESSED IN PLACENTA, SIGNAL = 0.96; EXPRESSED IN BONE MARROW, SIGNAL = 1.1; EXPRESSED IN ADULT LIVER, SIGNAL = 0.56; EXPRESSED IN LUNG, SIGNAL = 0.65; EST_HUMAN HIT: F00928.1, EVALUE 2.00e-07
REIPLFTLHLWLDKQKLSKFLLRKEPILMHSL

SEQ ID NO: 47160 - protein, 26 aa, Homo sapiens
  MAP TO AC004917.2; EXPRESSED IN LUNG, SIGNAL = 0.6; EXPRESSED IN PLACENTA, SIGNAL = 0.59; EXPRESSED IN BONE MARROW, SIGNAL = 0.58; EXPRESSED IN ADULT LIVER, SIGNAL = 0.56
VDGCTENVHLRGGESLECEGTPALGT

SEQ ID NO: 47161 - protein, 18 aa, Homo sapiens
  MAP TO AC004917.2; EXPRESSED IN LUNG, SIGNAL = 0.6; EXPRESSED IN PLACENTA, SIGNAL = 0.59; EXPRESSED IN BONE MARROW, SIGNAL = 0.58; EXPRESSED IN ADULT LIVER, SIGNAL = 0.56
CGWMHRECPPARRGKPGV

SEQ ID NO: 47162 - protein, 19 aa, Homo sapiens
  MAP TO AC004527.2; EXPRESSED IN ADULT LIVER, SIGNAL = 0.49; EXPRESSED IN LUNG, SIGNAL = 0.57; EXPRESSED IN BONE MARROW, SIGNAL = 0.5; EST_HUMAN HIT: BE408252.1, EVALUE 8.30e+00
RSGSRQPSARAAPCQAAGG

SEQ ID NO: 47163 - protein, 24 aa, Homo sapiens
  MAP TO AC000113.1; EXPRESSED IN ADULT LIVER, SIGNAL = 0.46
GTWVLRGLSWNFSLQGPAWHQSLL

SEQ ID NO: 47164 - protein, 25 aa, Homo sapiens
  MAP TO AC000113.1; EXPRESSED IN ADULT LIVER, SIGNAL = 0.46
WNLGLEGVVLELQSAGTCLAPESTE

SEQ ID NO: 47165 - protein, 70 aa, Homo sapiens
  MAP TO AC000121.1; EXPRESSED IN ADULT LIVER, SIGNAL = 0.62; SWISSPROT HIT: O14063, EVALUE 1.20e+00; EST_HUMAN HIT: BE938667.1, EVALUE 2.00e-22
TIIHILYLPEDAKGENVQFQWKQENLRVGEVYEACWALDNILIINSAHRQVVLEDSLDPVDTGNWLFFPG

SEQ ID NO: 47166 - protein, 65 aa, Homo sapiens
  MAP TO AC004614.1; EXPRESSED IN ADULT LIVER, SIGNAL = 0.44; EXPRESSED IN PLACENTA, SIGNAL = 1.5; EXPRESSED IN LUNG, SIGNAL = 0.85; EXPRESSED IN BONE MARROW, SIGNAL = 0.54; SWISSPROT HIT: Q9UHI8, EVALUE 4.30e+00; EST_HUMAN HIT: AV693145.1, EVALUE 3.00e-01
RRITNEPTGGSGVTGNCPHLLEAIPCEEPACYDWKAVRLGNCEPDNGKECGPGTQVQEVVCINSD

SEQ ID NO: 47167 - protein, 95 aa, Homo sapiens
  MAP TO AC003693.1; EXPRESSED IN PLACENTA, SIGNAL = 0.69; EXPRESSED IN ADULT LIVER, SIGNAL = 0.6; EXPRESSED IN LUNG, SIGNAL = 0.68; EXPRESSED IN BONE MARROW, SIGNAL = 0.57; EST_HUMAN HIT: AW816479.1, EVALUE 5.00e-11; SWISSPROT HIT: O94759, EVALUE 5.00e-12
PLRTSLRHRVEELVEAPRAQGDRGPRAVFLLTRWRKFWGAPVTVFLGNVVMYFAFLFLFTYVLLVDFRPPPQGPSGPEVTLYFWVFTLVLEEIRQ

SEQ ID NO: 47168 - protein, 30 aa, Homo sapiens
  MAP TO AC002300.1; EXPRESSED IN LUNG, SIGNAL = 0.43; EXPRESSED IN ADULT LIVER, SIGNAL = 0.42
VAEVKEVEEVEVEAGEARTLHVTFIEKKFV

SEQ ID NO: 47169 - protein, 87 aa, Homo sapiens
  MAP TO AC004540.1; EXPRESSED IN LUNG, SIGNAL = 0.44; EXPRESSED IN BONE MARROW, SIGNAL = 0.57; EXPRESSED IN ADULT LIVER, SIGNAL = 0.64; SWISSPROT HIT: P40457, EVALUE 3.20e-01; EST_HUMAN HIT: BF691009.1, EVALUE 2.50e-01
MAAKVGIRVGRSREGQGLPCQIYSESYWENSEEQIWRVKEKGEKDKSQCGLGLENQKEAKVVRSLKEAEEEWDRERYVVMCCIVTSQ

SEQ ID NO: 47170 - protein, 79 aa, Homo sapiens
  MAP TO AC004543.1; EXPRESSED IN PLACENTA, SIGNAL = 0.65; EXPRESSED IN ADULT LIVER, SIGNAL = 0.7; EXPRESSED IN LUNG, SIGNAL = 0.72; EXPRESSED IN BONE MARROW, SIGNAL = 0.55; SWISSPROT HIT: P23749, EVALUE 4.10e-01; EST_HUMAN HIT: BF530057.1, EVALUE 1.30e+00
MILFSACCICGLIGGILNFQFLRAVTKKTSSLYPLHLASMSLACIGIGGCTLSSWLTCRLASYEQRRMFSEREHSLHHS

SEQ ID NO: 47171 - protein, 25 aa, Homo sapiens
  MAP TO AC004388.1; EXPRESSED IN PLACENTA, SIGNAL = 0.71; EXPRESSED IN LUNG, SIGNAL = 0.69; EXPRESSED IN BONE MARROW, SIGNAL = 0.61; EXPRESSED IN ADULT LIVER, SIGNAL = 0.57
FLWTTIFKQVYCEEYKKSPLREFKM

SEQ ID NO: 47172 - protein, 48 aa, Homo sapiens
  MAP TO AC006121.1; EXPRESSED IN PLACENTA, SIGNAL = 0.59; EXPRESSED IN LUNG, SIGNAL = 0.54; EXPRESSED IN HELA, SIGNAL =  10; EXPRESSED IN FETAL LIVER, SIGNAL = 0.68; EXPRESSED IN ADULT LIVER, SIGNAL = 0.44; EXPRESSED IN BONE MARROW, SIGNAL = 0.52; EST_HUMAN HIT: BE694065.1, EVALUE 2.00e-22; SWISSPROT HIT: Q93008, EVALUE 1.00e-23
TSSPDSSNENSPATPPDEQGQGDAPPQLEDEEPAFPHTDLAKLDDMIN

SEQ ID NO: 47173 - protein, 46 aa, Homo sapiens
  MAP TO AC002477.1; EXPRESSED IN ADULT LIVER, SIGNAL = 0.43; EXPRESSED IN LUNG, SIGNAL = 0.42; EST_HUMAN HIT: BE791978.1, EVALUE 1.00e-20
DRPAMQLYQPGARSRNRLCPPDDSTKSGDSAAERKQESGISHRKEG

SEQ ID NO: 47174 - protein, 78 aa, Homo sapiens
  MAP TO AC005209.1; EXPRESSED IN PLACENTA, SIGNAL = 0.63; EXPRESSED IN BONE MARROW, SIGNAL = 0.55; EXPRESSED IN ADULT LIVER, SIGNAL = 0.57; EXPRESSED IN LUNG, SIGNAL = 0.62; SWISSPROT HIT: P23098, EVALUE 1.00e-31; EST_HUMAN HIT: AA382715.1, EVALUE 5.00e-27
TPIPVTPALDPLRMLMDDADVAAWQNEGLPADRMSVENATILINCERWPLMVDPQLQGIKWIKNKYGEDLRVTQIGQK

SEQ ID NO: 47175 - protein, 23 aa, Homo sapiens
  MAP TO AC005209.1; EXPRESSED IN PLACENTA, SIGNAL = 0.63; EXPRESSED IN BONE MARROW, SIGNAL = 0.55; EXPRESSED IN ADULT LIVER, SIGNAL = 0.57; EXPRESSED IN LUNG, SIGNAL = 0.62; EST_HUMAN HIT: AA382715.1, EVALUE 1.00e-03; SWISSPROT HIT: Q08469, EVALUE 8.70e+00
VLSVGWCFFFTRLPFQSPQPWIP

SEQ ID NO: 47176 - protein, 24 aa, Homo sapiens
  MAP TO AC003658.1; EXPRESSED IN ADULT LIVER, SIGNAL = 0.51; EXPRESSED IN LUNG, SIGNAL = 0.54; SWISSPROT HIT: P10978, EVALUE 8.70e+00
SHPEAHMKSKDEEALERNGTYKEQ

SEQ ID NO: 47177 - protein, 29 aa, Homo sapiens
  MAP TO AC006083.1; EXPRESSED IN LUNG, SIGNAL = 0.44; EXPRESSED IN BONE MARROW, SIGNAL = 0.51; EXPRESSED IN ADULT LIVER, SIGNAL = 0.47
SLGQKSGHGLNGSSTESHKAEKGVILAAF

SEQ ID NO: 47178 - protein, 36 aa, Homo sapiens
  MAP TO AC004739.1; EXPRESSED IN PLACENTA, SIGNAL = 0.63; EXPRESSED IN LUNG, SIGNAL = 0.51; EXPRESSED IN ADULT LIVER, SIGNAL = 0.5
SVIIFHDKGLLLRLQMLFSGPITSRSGAMQVAITIN

SEQ ID NO: 47179 - protein, 35 aa, Homo sapiens
  MAP TO AC002537.1; EXPRESSED IN ADULT LIVER, SIGNAL = 0.5; EXPRESSED IN PLACENTA, SIGNAL = 0.66; EXPRESSED IN LUNG, SIGNAL = 0.54; EXPRESSED IN BONE MARROW, SIGNAL = 0.53; EST_HUMAN HIT: BF359742.1, EVALUE 8.00e-06
AQANSTLSVHLCRELSTLVGSGWATDRQRRMLRLF

SEQ ID NO: 47180 - protein, 31 aa, Homo sapiens
  MAP TO AC006120.1; EXPRESSED IN LUNG, SIGNAL = 0.74; EXPRESSED IN FETAL LIVER, SIGNAL = 0.75; EXPRESSED IN BONE MARROW, SIGNAL = 0.59; EXPRESSED IN PLACENTA, SIGNAL = 0.88; EXPRESSED IN ADULT LIVER, SIGNAL = 0.67; EST_HUMAN HIT: AI819755.1, EVALUE 6.00e-12
SEEEKWEKLDAEFDHFVVDMKPFVLKLPHRT

SEQ ID NO: 47181 - protein, 20 aa, Homo sapiens
  MAP TO AC006120.1; EXPRESSED IN LUNG, SIGNAL = 0.74; EXPRESSED IN FETAL LIVER, SIGNAL = 0.75; EXPRESSED IN BONE MARROW, SIGNAL = 0.59; EXPRESSED IN PLACENTA, SIGNAL = 0.88; EXPRESSED IN ADULT LIVER, SIGNAL = 0.67; EST_HUMAN HIT: AI819755.1, EVALUE 1.00e-04
EVKKKNGRSWMQNLITLWLI

SEQ ID NO: 47182 - protein, 31 aa, Homo sapiens
  MAP TO AC004741.1; EXPRESSED IN LUNG, SIGNAL = 0.62; EXPRESSED IN BONE MARROW, SIGNAL = 0.51; EXPRESSED IN ADULT LIVER, SIGNAL = 0.41; EXPRESSED IN PLACENTA, SIGNAL = 0.67; EST_HUMAN HIT: BF509740.1, EVALUE 1.00e-10
ISQEICVVMDTEEDNKHVGHLLEEVLKSELN

SEQ ID NO: 47183 - protein, 41 aa, Homo sapiens
  MAP TO AC004982.1; EXPRESSED IN LUNG, SIGNAL = 0.55; EXPRESSED IN BONE MARROW, SIGNAL = 0.66; EXPRESSED IN ADULT LIVER, SIGNAL = 0.59; SWISSPROT HIT: Q80905, EVALUE 1.30e+00
GSVIEVAVTIPSYSDKPVQTWRRKFFNPGFEEVVFIAFNGP

SEQ ID NO: 47184 - protein, 26 aa, Homo sapiens
  MAP TO AC004888.1; EXPRESSED IN BONE MARROW, SIGNAL = 0.74; EXPRESSED IN LUNG, SIGNAL = 0.51; EXPRESSED IN ADULT LIVER, SIGNAL = 0.54
IRAAKSGSANAYMQSKRNGLLSNQLQ

SEQ ID NO: 47185 - protein, 22 aa, Homo sapiens
  MAP TO AC004888.1; EXPRESSED IN BONE MARROW, SIGNAL = 0.74; EXPRESSED IN LUNG, SIGNAL = 0.51; EXPRESSED IN ADULT LIVER, SIGNAL = 0.54
DPGSQKRKRKCLHAEQTEWFTQ

SEQ ID NO: 47186 - protein, 35 aa, Homo sapiens
  MAP TO AC004626.1; EXPRESSED IN PLACENTA, SIGNAL = 0.59; EXPRESSED IN LUNG, SIGNAL = 0.67; EXPRESSED IN BONE MARROW, SIGNAL = 0.56; EXPRESSED IN ADULT LIVER, SIGNAL = 0.48; SWISSPROT HIT: P47437, EVALUE 4.90e+00
PIKLEIDEEKNLLIKFDPSYRNDLNNWVAEEILAI

SEQ ID NO: 47187 - protein, 40 aa, Homo sapiens
  MAP TO AC004080.1; EXPRESSED IN LUNG, SIGNAL = 0.51; EXPRESSED IN ADULT LIVER, SIGNAL = 0.43
MLGAQSRVDQAGIQFPTQKNLAAVFFFSERFLGNQSLQGT

SEQ ID NO: 47188 - protein, 27 aa, Homo sapiens
  MAP TO AC004080.1; EXPRESSED IN LUNG, SIGNAL = 0.51; EXPRESSED IN ADULT LIVER, SIGNAL = 0.43; SWISSPROT HIT: P20126, EVALUE 2.20e+00; EST_HUMAN HIT: AI469512.1, EVALUE 1.60e+00
AGSPEPRGPGWHPVPHPEKPSCGFFLQ

SEQ ID NO: 47189 - protein, 52 aa, Homo sapiens
  MAP TO AC000113.1; EXPRESSED IN LUNG, SIGNAL = 0.64; EXPRESSED IN BONE MARROW, SIGNAL = 0.51; EXPRESSED IN ADULT LIVER, SIGNAL = 0.62; EST_HUMAN HIT: AI693054.1, EVALUE 5.00e+00
LNQSSGTRVISTCCERKFNIVFAGSETTGFRLWSQTSVGLNSSFTTCSLWTL

SEQ ID NO: 47190 - protein, 48 aa, Homo sapiens
  MAP TO AC005007.1; EXPRESSED IN BONE MARROW, SIGNAL = 0.55; EXPRESSED IN LUNG, SIGNAL = 0.57; EXPRESSED IN ADULT LIVER, SIGNAL = 0.62; EXPRESSED IN PLACENTA, SIGNAL = 0.66; EXPRESSED IN FETAL LIVER, SIGNAL = 0.72; EST_HUMAN HIT: BE254599.1, EVALUE 1.00e-22
DIADPFFAYCKQHADRLDRKWKRKNYLALQSYCKMSLQEREKQLSPEA

SEQ ID NO: 47191 - protein, 158 aa, Homo sapiens
  MAP TO AC003093.1; EXPRESSED IN BONE MARROW, SIGNAL = 0.67; EXPRESSED IN ADULT LIVER, SIGNAL = 0.54; EXPRESSED IN PLACENTA, SIGNAL = 0.65; EXPRESSED IN LUNG, SIGNAL = 0.71; EXPRESSED IN FETAL LIVER, SIGNAL = 0.67; SWISSPROT HIT: P26992, EVALUE 2.80e+00; EST_HUMAN HIT: BF311347.1, EVALUE 6.50e-01
EQDKAHEGLTDIAQGLHTPLLKNQINISCHKQNMYKEQPVCYADFSVAQLHVWISTYFGEHGLHARTRAPPTFTGGGQSLHGGVQNGDHAGAYLLHGRGKQELKQNIMLHVETPRTSPPSCSSVAPCLALSKLHHTFPPRELWRLPDLLGRLYTYCKW

SEQ ID NO: 47192 - protein, 42 aa, Homo sapiens
  MAP TO AC006352.3; EXPRESSED IN PLACENTA, SIGNAL = 1.7; EXPRESSED IN BONE MARROW, SIGNAL = 4.1; EXPRESSED IN ADULT LIVER, SIGNAL = 0.92; EST_HUMAN HIT: AW403015.1, EVALUE 2.00e-13; SWISSPROT HIT: P23083, EVALUE 2.00e-14
HFLVQLVQSGAEVKKPGASVKVSCKASGYTFTYCYLHWVRWV

SEQ ID NO: 47193 - protein, 64 aa, Homo sapiens
  MAP TO AC004129.1; EXPRESSED IN LUNG, SIGNAL = 0.44; EXPRESSED IN ADULT LIVER, SIGNAL = 0.53; SWISSPROT HIT: P53003, EVALUE 4.00e-01; EST_HUMAN HIT: T03080.1, EVALUE 2.00e-09
RPASDVTSPDTTSLSYDQRPVVTAGKSLEKKGTHAVHPNMLASMRAQVLGAGIGTGANEVRRRY

SEQ ID NO: 47194 - protein, 20 aa, Homo sapiens
  MAP TO AC002529.1; EXPRESSED IN PLACENTA, SIGNAL = 0.63; EXPRESSED IN BONE MARROW, SIGNAL = 0.52; EXPRESSED IN ADULT LIVER, SIGNAL = 0.43; EXPRESSED IN LUNG, SIGNAL = 0.5
ASQRSWSQALPSQSPFQTKA

SEQ ID NO: 47195 - protein, 46 aa, Homo sapiens
  MAP TO AC004981.1; EXPRESSED IN ADULT LIVER, SIGNAL = 0.43; EXPRESSED IN PLACENTA, SIGNAL = 0.63
LDGGREEGTNVLNKGQETEVCCENGFLFSKTIKNEVHSFNRYSKND

SEQ ID NO: 47196 - protein, 66 aa, Homo sapiens
  MAP TO AC000001.1; EXPRESSED IN LUNG, SIGNAL = 0.42; EXPRESSED IN ADULT LIVER, SIGNAL = 0.44; EST_HUMAN HIT: AI949375.1, EVALUE 4.10e+00; SWISSPROT HIT: P45015, EVALUE 6.30e+00
MSFGGHFRHYRLSVCWRYRFIRPEHKTAFTARFPVDNRLGQMVAKPFHLLNATTGNICGCFNTKRP

SEQ ID NO: 47197 - protein, 29 aa, Homo sapiens
  MAP TO AC005221.1; EXPRESSED IN PLACENTA, SIGNAL = 2.3; EXPRESSED IN ADULT LIVER, SIGNAL = 0.45; EXPRESSED IN LUNG, SIGNAL = 0.59; EXPRESSED IN BONE MARROW, SIGNAL = 0.65; EST_HUMAN HIT: AA618206.1, EVALUE 6.00e+00
LLASNWRKCKRCDSWAWMCHCGLVLDPHK

SEQ ID NO: 47198 - protein, 43 aa, Homo sapiens
  MAP TO AC004894.1; EXPRESSED IN ADULT LIVER, SIGNAL = 0.44; EXPRESSED IN PLACENTA, SIGNAL = 0.6; EXPRESSED IN LUNG, SIGNAL = 0.49
TIILMLLNDNLILKQLGNMKETKATGNQTQWTKYQKMEILFLT

SEQ ID NO: 47199 - protein, 37 aa, Homo sapiens
  MAP TO AC004869.1; EXPRESSED IN PLACENTA, SIGNAL = 0.68; EXPRESSED IN BONE MARROW, SIGNAL = 0.59; EXPRESSED IN ADULT LIVER, SIGNAL = 0.55; EXPRESSED IN LUNG, SIGNAL = 0.59
IIGILVFQIRNVMILIALLPYICNLSEKHRFFSLFPS

SEQ ID NO: 47200 - protein, 52 aa, Homo sapiens
  MAP TO AC004869.1; EXPRESSED IN PLACENTA, SIGNAL = 0.68; EXPRESSED IN BONE MARROW, SIGNAL = 0.59; EXPRESSED IN ADULT LIVER, SIGNAL = 0.55; EXPRESSED IN LUNG, SIGNAL = 0.59
WKTRMPMMSRKWKKKYKMKMSTLGNKAVRIVMGMVVYFVHIPMGARQLMSYG

SEQ ID NO: 47201 - protein, 28 aa, Homo sapiens
  MAP TO AC005772.1; EXPRESSED IN LUNG, SIGNAL = 0.46; EXPRESSED IN PLACENTA, SIGNAL = 0.67; EXPRESSED IN ADULT LIVER, SIGNAL = 0.61
TDSVAEFTRRSRGKRDGSRGGTKVNCYQ

SEQ ID NO: 47202 - protein, 92 aa, Homo sapiens
  MAP TO AB019440.1; EXPRESSED IN PLACENTA, SIGNAL = 0.67; EXPRESSED IN LUNG, SIGNAL = 0.73; EXPRESSED IN HELA, SIGNAL = 2.2; EXPRESSED IN ADULT LIVER, SIGNAL = 0.62; SWISSPROT HIT: P23083, EVALUE 2.00e-39; EST_HUMAN HIT: AW405627.1, EVALUE 8.00e-48
EVKKPGASVKVSCKASGYTFTSYDINWVRQATGQGLEWMGWMNPNSGNTGYAQKFQGRVTMTRNTSISTAYMELSSLRSEDTAVYYCARGTV

SEQ ID NO: 47203 - protein, 38 aa, Homo sapiens
  MAP TO AC003083.1; EXPRESSED IN LUNG, SIGNAL = 0.67; EXPRESSED IN PLACENTA, SIGNAL = 0.63; EXPRESSED IN ADULT LIVER, SIGNAL = 0.56; EST_HUMAN HIT: AA705533.1, EVALUE 2.20e-01
KNRQIELCLDLKLLYVEEHYEESEKTAHKISYFASNIS

SEQ ID NO: 47204 - protein, 31 aa, Homo sapiens
  MAP TO AC005681.1; EXPRESSED IN LUNG, SIGNAL = 0.58; EXPRESSED IN ADULT LIVER, SIGNAL = 0.65; EXPRESSED IN PLACENTA, SIGNAL = 0.64; EXPRESSED IN FETAL LIVER, SIGNAL = 0.68; EXPRESSED IN BONE MARROW, SIGNAL = 0.79
YFPFSFLRIRQIDRNKSNFEENVRITHWEDI

SEQ ID NO: 47205 - protein, 35 aa, Homo sapiens
  MAP TO AC005324.1; EXPRESSED IN LUNG, SIGNAL = 0.64; EXPRESSED IN ADULT LIVER, SIGNAL = 0.41; EST_HUMAN HIT: H75477.1, EVALUE 2.90e-01
MSISFQFCPLRTLPFPKRGILRRKIWLLFAGQQSP

SEQ ID NO: 47206 - protein, 30 aa, Homo sapiens
  MAP TO AC005690.7; EXPRESSED IN PLACENTA, SIGNAL = 0.78; EXPRESSED IN LUNG, SIGNAL = 0.6; EXPRESSED IN BONE MARROW, SIGNAL = 0.75; EXPRESSED IN ADULT LIVER, SIGNAL = 0.54
LLSAYEAIREVSNHKNLPSFQIVTLDPVTK

SEQ ID NO: 47207 - protein, 88 aa, Homo sapiens
  MAP TO AC004664.1; EXPRESSED IN LUNG, SIGNAL = 0.65; EXPRESSED IN BONE MARROW, SIGNAL = 0.62; EXPRESSED IN ADULT LIVER, SIGNAL = 0.68; EST_HUMAN HIT: AW996499.1, EVALUE 3.00e-51; SWISSPROT HIT: P27799, EVALUE 6.30e+00
PFGRCRKRRHREGVTCLRSHVNQSWRWDQNPGFPAPSPGLFLHLMFSGVRQGPSGHKEGLWVGRAETSAVLLSSNKCGLSCCSHGCRC

SEQ ID NO: 47208 - protein, 36 aa, Homo sapiens
  MAP TO AC003070.1; EXPRESSED IN LUNG, SIGNAL = 0.57; EXPRESSED IN ADULT LIVER, SIGNAL = 0.45; SWISSPROT HIT: Q92622, EVALUE 3.30e-01; EST_HUMAN HIT: BE222056.1, EVALUE 2.00e-14
CSLPRCAECKTVFHQSCQAVVKKGCPRCARRRKYQE

SEQ ID NO: 47209 - protein, 39 aa, Homo sapiens
  MAP TO AC002990.1; EXPRESSED IN LUNG, SIGNAL = 0.55; EXPRESSED IN BONE MARROW, SIGNAL = 0.51; EXPRESSED IN ADULT LIVER, SIGNAL =   4
VNAVVPGRLGASTYLQLILRLECPRLVILSYFIILGSTR

SEQ ID NO: 47210 - protein, 28 aa, Homo sapiens
  MAP TO AC005728.1; EXPRESSED IN LUNG, SIGNAL = 0.44; EXPRESSED IN ADULT LIVER, SIGNAL = 0.57; SWISSPROT HIT: P17752, EVALUE 3.00e-11
HALSGHAKVKPFDPKITCKQECLITTFQ

SEQ ID NO: 47211 - protein, 68 aa, Homo sapiens
  MAP TO AC005045.2; EXPRESSED IN ADULT LIVER, SIGNAL = 0.94; EXPRESSED IN LUNG, SIGNAL = 0.67; EXPRESSED IN BONE MARROW, SIGNAL = 0.51; EST_HUMAN HIT: AL040762.1, EVALUE 4.00e-16; SWISSPROT HIT: P21439, EVALUE 6.00e-34
INIDGQDIRNFNVNYLREIIGVVSQEPVLFSTTIAENICYGRGNVTMDEIKKAVKEANAYEFIMKLPQ

SEQ ID NO: 47212 - protein, 73 aa, Homo sapiens
  MAP TO AC004922.2; EXPRESSED IN LUNG, SIGNAL = 0.95; EXPRESSED IN BONE MARROW, SIGNAL =   1; EXPRESSED IN PLACENTA, SIGNAL = 1.6; EXPRESSED IN FETAL LIVER, SIGNAL = 0.75; EXPRESSED IN ADULT LIVER, SIGNAL = 0.87; EST_HUMAN HIT: BE890286.1, EVALUE 4.00e-39; SWISSPROT HIT: O15143, EVALUE 4.00e-40
IDWAPESNRIVTCGTDRNAYVWTLKGRTWKPTLVILRINRAARCVRWAPNENKFAVGSGSRVISICYFEQEND

SEQ ID NO: 47213 - protein, 17 aa, Homo sapiens
  MAP TO AC005184.1; EXPRESSED IN ADULT LIVER, SIGNAL = 0.47; EXPRESSED IN PLACENTA, SIGNAL = 0.59; EXPRESSED IN LUNG, SIGNAL = 0.56
CGLCHRLGPALEYYGIQ

SEQ ID NO: 47214 - protein, 82 aa, Homo sapiens
  MAP TO AC004893.1; EXPRESSED IN BONE MARROW, SIGNAL = 0.49; EXPRESSED IN ADULT LIVER, SIGNAL = 0.53; EXPRESSED IN LUNG, SIGNAL = 0.62; EST_HUMAN HIT: AW499551.1, EVALUE 2.00e-41; SWISSPROT HIT: P38811, EVALUE 4.00e-07
NSSQHDPSSNNAMLGVHASASAIIQYGKIARKQGLVNVALDILSRIHTIPTVPIVDCFQKIRQQVKCYLQLAGVMGKNECMQ

SEQ ID NO: 47215 - protein, 54 aa, Homo sapiens
  MAP TO AC006411.1; EXPRESSED IN PLACENTA, SIGNAL = 0.92; EXPRESSED IN LUNG, SIGNAL = 0.75; EXPRESSED IN BONE MARROW, SIGNAL = 0.85; EXPRESSED IN ADULT LIVER, SIGNAL = 0.44; EST_HUMAN HIT: AA191536.1, EVALUE 7.00e-23; SWISSPROT HIT: P46940, EVALUE 6.00e-24
LAAVALINAAIQKGVAEKTVLELMNPEAQLPQVYPFAADLYQKELATLQRQSPE

SEQ ID NO: 47216 - protein, 26 aa, Homo sapiens
  MAP TO AC004126.1; EXPRESSED IN ADULT LIVER, SIGNAL = 0.47; EXPRESSED IN LUNG, SIGNAL = 0.5; EST_HUMAN HIT: AW953543.1, EVALUE 2.00e-07
MKERQERKLAKDFARHLEEEKERRRQ

SEQ ID NO: 47217 - protein, 33 aa, Homo sapiens
  MAP TO AC004126.1; EXPRESSED IN ADULT LIVER, SIGNAL = 0.47; EXPRESSED IN LUNG, SIGNAL = 0.5; EST_HUMAN HIT: BE267351.1, EVALUE 4.50e-02
ILPDASGQAPAHIVAAEDEGTTGEEAGQGLCPS

SEQ ID NO: 47218 - protein, 62 aa, Homo sapiens
  MAP TO AC005725.1; EXPRESSED IN BONE MARROW, SIGNAL = 0.61; EXPRESSED IN ADULT LIVER, SIGNAL = 0.72; EXPRESSED IN PLACENTA, SIGNAL = 0.61; EXPRESSED IN LUNG, SIGNAL = 0.78; EST_HUMAN HIT: BE795692.1, EVALUE 3.50e+00
ITRLLTCWSSLISLSSQKDCRDCCCCLEGLATPPQFPSCQLTLLTWLTPPYPSNPCLNAASP

SEQ ID NO: 47219 - protein, 59 aa, Homo sapiens
  MAP TO AC005209.1; EXPRESSED IN BONE MARROW, SIGNAL = 0.64; EXPRESSED IN ADULT LIVER, SIGNAL = 0.46; EXPRESSED IN LUNG, SIGNAL = 0.42; EST_HUMAN HIT: AV700855.1, EVALUE 8.00e-04; SWISSPROT HIT: P23098, EVALUE 4.00e-12
IILTQHLKLGNFPASLQKSIPPLIDLALAFHQKIATTFLPTGIKFHYIFNLRDFANIFQ

SEQ ID NO: 47220 - protein, 50 aa, Homo sapiens
  MAP TO AC005040.2; EXPRESSED IN BONE MARROW, SIGNAL = 0.52; EXPRESSED IN ADULT LIVER, SIGNAL = 0.47; EXPRESSED IN PLACENTA, SIGNAL = 0.81; EXPRESSED IN LUNG, SIGNAL = 0.61
TNIDLAGTRRNSASRWPSDSTAIKKIATAAFFLVSNFPAYPEIMDLASVI

SEQ ID NO: 47221 - protein, 36 aa, Homo sapiens
  MAP TO AC000120.1; EXPRESSED IN ADULT LIVER, SIGNAL = 0.46; SWISSPROT HIT: Q16850, EVALUE 2.00e-14; EST_HUMAN HIT: BE710042.1, EVALUE 3.00e-13
RRDRAHREIKDIFYKAIQKRRQSQEKIDDILQTLLD

SEQ ID NO: 47222 - protein, 44 aa, Homo sapiens
  MAP TO AC006071.1; EXPRESSED IN ADULT LIVER, SIGNAL = 0.51; EXPRESSED IN LUNG, SIGNAL = 0.49; SWISSPROT HIT: P48804, EVALUE 4.80e+00; EST_HUMAN HIT: BE562406.1, EVALUE 1.10e+00
PDSTAMHKETSTPGTDTSGLSVWSSEGSPGPRQRRWDSWHKDSI

SEQ ID NO: 47223 - protein, 42 aa, Homo sapiens
  MAP TO AC005961.1; EXPRESSED IN BONE MARROW, SIGNAL = 0.54; EXPRESSED IN ADULT LIVER, SIGNAL = 0.52; EXPRESSED IN LUNG, SIGNAL = 0.6; EST_HUMAN HIT: N76156.1, EVALUE 1.80e+00
LLMELRHESRGPLLQLPQKTKCLLGPTFLQRQHKQQKMGLLL

SEQ ID NO: 47224 - protein, 60 aa, Homo sapiens
  MAP TO AC006079.1; EXPRESSED IN PLACENTA, SIGNAL = 0.74; EXPRESSED IN LUNG, SIGNAL = 0.64; EXPRESSED IN BONE MARROW, SIGNAL = 0.84; EXPRESSED IN ADULT LIVER, SIGNAL = 0.78; EST_HUMAN HIT: BF314875.1, EVALUE 7.90e+00
NGTLMPGNFFPNLANAIKSSSLIERILSISSISLLPLLITGATSTPLRGKWQKRWETSWC

SEQ ID NO: 47225 - protein, 48 aa, Homo sapiens
  MAP TO AC005969.4; EXPRESSED IN ADULT LIVER, SIGNAL = 0.64; EXPRESSED IN BONE MARROW, SIGNAL = 0.76; EXPRESSED IN PLACENTA, SIGNAL = 0.64; EXPRESSED IN LUNG, SIGNAL = 0.61; EST_HUMAN HIT: BE082528.1, EVALUE 6.00e-22
GSGPKGRNLCATFQNTETFEFQDEVGALLLSVCQTVSQGILCFLPSYK

SEQ ID NO: 47226 - protein, 35 aa, Homo sapiens
  MAP TO AC005969.4; EXPRESSED IN ADULT LIVER, SIGNAL = 0.64; EXPRESSED IN BONE MARROW, SIGNAL = 0.76; EXPRESSED IN PLACENTA, SIGNAL = 0.64; EXPRESSED IN LUNG, SIGNAL = 0.61; EST_HUMAN HIT: BE082523.1, EVALUE 3.00e-14; SWISSPROT HIT: P04445, EVALUE 3.80e+00
GQAPRVGISVLPSRILKHLSSKMKWEHFCYLCARL

SEQ ID NO: 47227 - protein, 66 aa, Homo sapiens
  MAP TO AC005342.1; EXPRESSED IN PLACENTA, SIGNAL = 0.62; EXPRESSED IN LUNG, SIGNAL = 0.74; EXPRESSED IN BONE MARROW, SIGNAL = 0.62; EXPRESSED IN ADULT LIVER, SIGNAL = 0.64; SWISSPROT HIT: P32742, EVALUE 2.00e+00
SRAGYAHQTVLEDANKGFSHSAIITMSGLLKGETEQSVSFQKIQEVQILSNSTAFSRLAIKVVLYP

SEQ ID NO: 47228 - protein, 71 aa, Homo sapiens
  MAP TO AC003688.1; EXPRESSED IN LUNG, SIGNAL = 0.72; EXPRESSED IN BONE MARROW, SIGNAL = 0.72; EXPRESSED IN ADULT LIVER, SIGNAL = 0.65; EXPRESSED IN PLACENTA, SIGNAL = 0.72; EXPRESSED IN FETAL LIVER, SIGNAL = 0.7; SWISSPROT HIT: P49748, EVALUE 8.00e-33; EST_HUMAN HIT: BE546239.1, EVALUE 9.00e-32
GPPEKKMGIKASNTAEVFFDGVRVPSENVLGEVGSGFKVAMHILNNGRFGMAAALAGTMRGIIAKAVSTLP

SEQ ID NO: 47229 - protein, 49 aa, Homo sapiens
  MAP TO AC004976.1; EXPRESSED IN BONE MARROW, SIGNAL = 0.55; EXPRESSED IN LUNG, SIGNAL = 0.53; EXPRESSED IN FETAL LIVER, SIGNAL = 0.72; EXPRESSED IN ADULT LIVER, SIGNAL = 0.61; SWISSPROT HIT: P41250, EVALUE 3.00e-23; EST_HUMAN HIT: AA620481.1, EVALUE 4.00e-22
HGVSHKVDDSSGSIGRRYARTDEIGVAFGVTIDFDTVNKTPHTATLRDR

SEQ ID NO: 47230 - protein, 27 aa, Homo sapiens
  MAP TO AC005325.1; EXPRESSED IN LUNG, SIGNAL = 0.51; EXPRESSED IN BONE MARROW, SIGNAL = 0.53; EXPRESSED IN ADULT LIVER, SIGNAL = 0.53
ASRPLSSSRSSSRLQCSRSCFSRGNRK

SEQ ID NO: 47231 - protein, 147 aa, Homo sapiens
  MAP TO AC005325.1; EXPRESSED IN LUNG, SIGNAL = 0.51; EXPRESSED IN BONE MARROW, SIGNAL = 0.53; EXPRESSED IN ADULT LIVER, SIGNAL = 0.53; SWISSPROT HIT: P04786, EVALUE 6.80e+00; EST_HUMAN HIT: AA399959.1, EVALUE 3.00e-25
AGSILMTVNTLQGKKMIESGLQSGDFSLSQSWPSCLPPPADLEILQQKVAGVQRELEDFKKEALKSIHYLEDAFCEMNGALVQQEEQAARVRQRLREEEDRGIVRNKVLTFLLPREKQLREHCKRLEDLLLDRGRDALRATKKSQAD

SEQ ID NO: 47232 - protein, 79 aa, Homo sapiens
  MAP TO AC004982.1; EXPRESSED IN LUNG, SIGNAL = 0.63; EXPRESSED IN BONE MARROW, SIGNAL = 0.53; EXPRESSED IN ADULT LIVER, SIGNAL = 0.66; EXPRESSED IN PLACENTA, SIGNAL = 0.6; EST_HUMAN HIT: AL046347.2, EVALUE 4.00e-40; SWISSPROT HIT: P38164, EVALUE 1.20e-01
RHNWSGLDKQSDIQNLNEERILALQLCGWIKKGTDVDVGPFLNSLVQEGEWERAAAVALFNLDIRRAIQILNEGASSEK

SEQ ID NO: 47233 - protein, 80 aa, Homo sapiens
  MAP TO AC000061.1; EXPRESSED IN ADULT LIVER, SIGNAL = 0.42; EST_HUMAN HIT: AI990099.1, EVALUE 4.00e-41; SWISSPROT HIT: P13569, EVALUE 7.00e-42
VSRVFKFIDMPTEGKPTKSTKPYKNGQLSKVMIIENSHVKKDDIWPSGGQMTVKDLTAKYTEGGNAILENISFSISPGQR

SEQ ID NO: 47234 - protein, 104 aa, Homo sapiens
  MAP TO AC005053.1; EXPRESSED IN LUNG, SIGNAL = 1.5; EXPRESSED IN FETAL LIVER, SIGNAL = 0.87; EXPRESSED IN ADULT LIVER, SIGNAL = 0.57; EXPRESSED IN BONE MARROW, SIGNAL = 0.59; SWISSPROT HIT: O67305, EVALUE 5.60e+00; EST_HUMAN HIT: BE875216.1, EVALUE 2.00e-54
ETSMLKRPVLLHLHQTAHADEFDCPSELQHTQELFPQWHLPIKIAAIIASLTFLYTLLREVIHPLATSHQQYFYKIPILVINKVLPMVSITLLALVYLPGVIAA

SEQ ID NO: 47235 - protein, 30 aa, Homo sapiens
  MAP TO AC004066.1; EXPRESSED IN LUNG, SIGNAL = 0.63; EXPRESSED IN ADULT LIVER, SIGNAL = 0.57; EXPRESSED IN PLACENTA, SIGNAL = 0.6
ASKACLCLIWSPKKPLGKKTWSPRKRIWPS

SEQ ID NO: 47236 - protein, 56 aa, Homo sapiens
  MAP TO AC003049.1; EXPRESSED IN PLACENTA, SIGNAL = 0.73; EXPRESSED IN LUNG, SIGNAL = 0.87; EXPRESSED IN FETAL LIVER, SIGNAL = 0.76; EXPRESSED IN BONE MARROW, SIGNAL = 0.66; EXPRESSED IN ADULT LIVER, SIGNAL = 0.63
GNMEEEEEEEEEEEEEEEQKEEEEKEEEEDTLTMRFLCDPRILSACERLASHCLLP

SEQ ID NO: 47237 - protein, 54 aa, Homo sapiens
  MAP TO AC005207.1; EXPRESSED IN LUNG, SIGNAL = 0.67; EXPRESSED IN BONE MARROW, SIGNAL = 0.5; EXPRESSED IN PLACENTA, SIGNAL = 0.71; EXPRESSED IN ADULT LIVER, SIGNAL = 0.45; SWISSPROT HIT: P49593, EVALUE 6.00e-09; EST_HUMAN HIT: BF309976.1, EVALUE 7.00e-08
KLHEICCSWVKDFPLRRRPQLYYETSIHAIKNMRRKMEDKHVCIPDFNMLFNLE

SEQ ID NO: 47238 - protein, 23 aa, Homo sapiens
  MAP TO AC005207.1; EXPRESSED IN LUNG, SIGNAL = 0.67; EXPRESSED IN BONE MARROW, SIGNAL = 0.5; EXPRESSED IN PLACENTA, SIGNAL = 0.71; EXPRESSED IN ADULT LIVER, SIGNAL = 0.45; SWISSPROT HIT: Q53228, EVALUE 8.70e+00
QTTRDLLQLGERLPPPQETPALL

SEQ ID NO: 47239 - protein, 125 aa, Homo sapiens
  MAP TO AC006115.1; EXPRESSED IN LUNG, SIGNAL = 0.58; EXPRESSED IN ADULT LIVER, SIGNAL = 0.49; EST_HUMAN HIT: AW873518.1, EVALUE 3.00e-19; SWISSPROT HIT: Q9UL58, EVALUE 9.00e-26
GQGVEMLDVTGVSDILRNPYIFCVCGQEKKLETETLKVSHQKFGDFQYLSVNGPHQAVSQIQELCLQWLQPEILTKEQMIEQLVLTQFLSTLPEEIQTWVRSKQPKNSKEAGTMVANFIQACEKE

SEQ ID NO: 47240 - protein, 34 aa, Homo sapiens
  MAP TO AC006083.1; EXPRESSED IN BONE MARROW, SIGNAL = 0.6; EXPRESSED IN FETAL LIVER, SIGNAL = 0.68; EXPRESSED IN ADULT LIVER, SIGNAL = 0.61; EXPRESSED IN PLACENTA, SIGNAL = 0.88; EXPRESSED IN LUNG, SIGNAL = 0.69
SGGNCCAYYRSSLGDVFITCDCFVFGWSGVLSCY

SEQ ID NO: 47241 - protein, 25 aa, Homo sapiens
  MAP TO AC005326.1; EXPRESSED IN LUNG, SIGNAL = 0.47; EXPRESSED IN ADULT LIVER, SIGNAL = 0.41; EST_HUMAN HIT: H23753.1, EVALUE 8.00e+00
PRHALNSSHHCLPAIFKNHPPHLCQ

SEQ ID NO: 47242 - protein, 35 aa, Homo sapiens
  MAP TO AC004629.1; EXPRESSED IN LUNG, SIGNAL = 0.47; EXPRESSED IN ADULT LIVER, SIGNAL = 0.41; SWISSPROT HIT: Q09908, EVALUE 7.40e-01
HDYNYLNNDSDRWNEQKSHSRGIPEAEPSEFDEDY

SEQ ID NO: 47243 - protein, 95 aa, Homo sapiens
  MAP TO AC002303.1; EXPRESSED IN BONE MARROW, SIGNAL = 0.53; EXPRESSED IN ADULT LIVER, SIGNAL = 0.46; EXPRESSED IN PLACENTA, SIGNAL = 0.62; EXPRESSED IN LUNG, SIGNAL = 0.57; EST_HUMAN HIT: BF569862.1, EVALUE 2.00e-49; SWISSPROT HIT: O34241, EVALUE 3.50e+00
IFTWRFPSTICTESFQFLDRMRAAGKLDQPDRFSFKDQDNNEPTNDMVAFSLDGPGGNCVAVLTLFSLGLISVDVRIPEQIIVVDSSMVENEVIK

SEQ ID NO: 47244 - protein, 38 aa, Homo sapiens; identical to SEQ ID NO: 38687
  MAP TO AC004033.3; EXPRESSED IN LUNG, SIGNAL = 0.64; EXPRESSED IN BONE MARROW, SIGNAL = 0.53; EXPRESSED IN ADULT LIVER, SIGNAL = 0.58; EST_HUMAN HIT: AI565644.1, EVALUE 2.00e-09

SEQ ID NO: 47245 - protein, 17 aa, Homo sapiens
  MAP TO AC004033.3; EXPRESSED IN LUNG, SIGNAL = 0.64; EXPRESSED IN BONE MARROW, SIGNAL = 0.53; EXPRESSED IN ADULT LIVER, SIGNAL = 0.58
HKIPYNCGLTVGKTGDR

SEQ ID NO: 47246 - protein, 86 aa, Homo sapiens
  MAP TO AC004033.3; EXPRESSED IN LUNG, SIGNAL = 0.64; EXPRESSED IN BONE MARROW, SIGNAL = 0.53; EXPRESSED IN ADULT LIVER, SIGNAL = 0.58; SWISSPROT HIT: Q13105, EVALUE 1.50e-01; EST_HUMAN HIT: BF529931.1, EVALUE 2.00e-37
LTPVPCFANCQATVVRDLVAVRMAEEQEFTQLCKLPAQPSHPHCVNNTYRSAQHSQALLRGLLALRDSGILFDVVLVVEGRHIEAH

SEQ ID NO: 47247 - protein, 54 aa, Homo sapiens
  MAP TO AC006368.2; EXPRESSED IN ADULT LIVER, SIGNAL = 0.53; EXPRESSED IN LUNG, SIGNAL = 0.57; EXPRESSED IN BONE MARROW, SIGNAL = 0.49; SWISSPROT HIT: Q01056, EVALUE 6.10e+00
VELDDNNINLSKEDQTDNIKSTRVLHTQSFQKFKTGFYLLGRKNIMHMFGQKRK

SEQ ID NO: 47248 - protein, 65 aa, Homo sapiens
  MAP TO AC005209.1; EXPRESSED IN PLACENTA, SIGNAL = 0.59; EXPRESSED IN LUNG, SIGNAL = 0.52; EXPRESSED IN ADULT LIVER, SIGNAL = 0.67; EXPRESSED IN BONE MARROW, SIGNAL = 0.81; SWISSPROT HIT: P39057, EVALUE 3.00e-17; EST_HUMAN HIT: D62246.1, EVALUE 5.80e+00
DIEDPVEQTQSPNLYCHFANGIGEPKYMPVQSWELLTQTLVEALENHNEVNTVMDLVLFEDAMRH

SEQ ID NO: 47249 - protein, 29 aa, Homo sapiens
  MAP TO AC005209.1; EXPRESSED IN PLACENTA, SIGNAL = 0.59; EXPRESSED IN LUNG, SIGNAL = 0.52; EXPRESSED IN ADULT LIVER, SIGNAL = 0.67; EXPRESSED IN BONE MARROW, SIGNAL = 0.81
SRPKARTCIVTLQMVLGSPNTCLYSLGNF

SEQ ID NO: 47250 - protein, 41 aa, Homo sapiens
  MAP TO AC005078.1; EXPRESSED IN LUNG, SIGNAL = 0.56; EXPRESSED IN ADULT LIVER, SIGNAL = 0.47; EXPRESSED IN BONE MARROW, SIGNAL = 0.54; SWISSPROT HIT: P39057, EVALUE 2.00e-09
SDEDVDKIISGIHNEVHALGMVDSRENCWKFFMARVRLQLK

SEQ ID NO: 47251 - protein, 50 aa, Homo sapiens
  MAP TO AC004460.1; EXPRESSED IN LUNG, SIGNAL = 0.43; EXPRESSED IN BONE MARROW, SIGNAL = 0.7; EXPRESSED IN ADULT LIVER, SIGNAL = 0.54; SWISSPROT HIT: P55453, EVALUE 2.70e+00
LQSAWVNLLHIRCISLAGIMLPGKSDILKNVVGLMAALRGMVDSSVAIFS

SEQ ID NO: 47252 - protein, 76 aa, Homo sapiens
  MAP TO AC004134.1; EXPRESSED IN LUNG, SIGNAL = 0.42; EXPRESSED IN BONE MARROW, SIGNAL = 0.54; EXPRESSED IN PLACENTA, SIGNAL = 0.59; EXPRESSED IN ADULT LIVER, SIGNAL = 0.4; SWISSPROT HIT: P21851, EVALUE 3.00e-40; EST_HUMAN HIT: AU140744.1, EVALUE 1.00e-38
DCEDPNPLIRALAVRTMGCIRVDKITEYLCEPLRKCLKDEDPYVRKTAAVCVAKLHDINAQMVEDQGFLDSLRDLI

SEQ ID NO: 47253 - protein, 45 aa, Homo sapiens
  MAP TO AC005881.2; EXPRESSED IN LUNG, SIGNAL = 0.63; EXPRESSED IN BONE MARROW, SIGNAL = 0.49; EXPRESSED IN ADULT LIVER, SIGNAL = 0.45; SWISSPROT HIT: P42286, EVALUE 4.80e+00; EST_HUMAN HIT: AI633263.1, EVALUE 5.30e+00
TEPVMLSVCGIQGCYMESMTNPSRKVHRSLEQSHTLFYYNDSYFE

SEQ ID NO: 47254 - protein, 44 aa, Homo sapiens
  MAP TO AC006084.1; EXPRESSED IN FETAL LIVER, SIGNAL = 0.67; EXPRESSED IN PLACENTA, SIGNAL = 0.64; EXPRESSED IN LUNG, SIGNAL =   1; EXPRESSED IN BONE MARROW, SIGNAL = 0.74; EXPRESSED IN ADULT LIVER, SIGNAL = 0.5; EST_HUMAN HIT: BF692923.1, EVALUE 9.00e-19; SWISSPROT HIT: P87253, EVALUE 1.60e+00
QHAGSNPGQRVTTTYNQSPASFLSSILPSQPDYNSSKIPSAMDS

SEQ ID NO: 47255 - protein, 160 aa, Homo sapiens
  MAP TO AC002310.1; EXPRESSED IN PLACENTA, SIGNAL =  13; EXPRESSED IN LUNG, SIGNAL = 0.52; EXPRESSED IN ADULT LIVER, SIGNAL = 0.53; EXPRESSED IN BONE MARROW, SIGNAL = 2.1; SWISSPROT HIT: P52742, EVALUE 1.00e-55; EST_HUMAN HIT: BF590267.1, EVALUE 4.00e-99
YVCGKSFAWRSTLVEHVYSHTGEKPFHCTDCGKGFGHASSLSKHRAIHRGERPHRCLECGRAFTQRSALTSHLRVHTGEKPYGCADCGRRFSQSSALYQHRRVHSGETPFPCPDCGRAFAYPSDLRRHVRTHTGEKPYPCPDCGRCFRQSSEMAAHRRTH

SEQ ID NO: 47256 - protein, 39 aa, Homo sapiens
  MAP TO AC006254.10; EXPRESSED IN LUNG, SIGNAL = 0.48; EXPRESSED IN FETAL LIVER, SIGNAL = 5.1; EXPRESSED IN ADULT LIVER, SIGNAL = 7.8; SWISSPROT HIT: P19827, EVALUE 5.00e-17; EST_HUMAN HIT: AI207441.1, EVALUE 6.00e-16
VANNHFAHFFAPQNLTNMNKNVVFVIDISGSMRGQKVKQ

SEQ ID NO: 47257 - protein, 32 aa, Homo sapiens
  MAP TO AC006254.10; EXPRESSED IN LUNG, SIGNAL = 0.48; EXPRESSED IN FETAL LIVER, SIGNAL = 5.1; EXPRESSED IN ADULT LIVER, SIGNAL = 7.8; EST_HUMAN HIT: AI207441.1, EVALUE 1.70e-01
GWARGAVRVASLVLLYFRWPITTLPTSLPPKT

SEQ ID NO: 47258 - protein, 54 aa, Homo sapiens
  MAP TO AC001228.1; EXPRESSED IN LUNG, SIGNAL = 0.41; EXPRESSED IN BONE MARROW, SIGNAL = 0.54; EXPRESSED IN ADULT LIVER, SIGNAL = 0.51; EST_HUMAN HIT: AW009530.1, EVALUE 1.00e-28; SWISSPROT HIT: P97458, EVALUE 1.20e+00
GTHGRRPPVPQLWRPRLRPRAGCYQYPCPPGPLEETYAPEEGQSPVTAAQTQTG

SEQ ID NO: 47259 - protein, 29 aa, Homo sapiens
  MAP TO AC004540.1; EXPRESSED IN PLACENTA, SIGNAL = 0.71; EXPRESSED IN ADULT LIVER, SIGNAL = 0.46; EXPRESSED IN LUNG, SIGNAL = 0.62; EXPRESSED IN FETAL LIVER, SIGNAL = 0.7; EXPRESSED IN BONE MARROW, SIGNAL = 0.52; EST_HUMAN HIT: AW195776.1, EVALUE 7.00e-11; SWISSPROT HIT: P20693, EVALUE 8.60e+00
SGYAQRHPGPPQRRCCCTQKTPELATTHT

SEQ ID NO: 47260 - protein, 35 aa, Homo sapiens
  MAP TO AC004920.1; EXPRESSED IN PLACENTA, SIGNAL = 0.71; EXPRESSED IN LUNG, SIGNAL = 0.71; EXPRESSED IN BONE MARROW, SIGNAL = 0.63; EXPRESSED IN ADULT LIVER, SIGNAL = 0.64; EST_HUMAN HIT: AA194515.1, EVALUE 4.40e+00
EHFSSAKHMPKYFTWIASLNPKLSPTREEPSLLHY

SEQ ID NO: 47261 - protein, 35 aa, Homo sapiens
  MAP TO AC004920.1; EXPRESSED IN PLACENTA, SIGNAL = 0.71; EXPRESSED IN LUNG, SIGNAL = 0.71; EXPRESSED IN BONE MARROW, SIGNAL = 0.63; EXPRESSED IN ADULT LIVER, SIGNAL = 0.64; SWISSPROT HIT: P45855, EVALUE 8.40e+00
STSQVPSTCLSTLPGLPHSIPSSALREKNPHFSIM

SEQ ID NO: 47262 - protein, 30 aa, Homo sapiens
  MAP TO AC004925.1; EXPRESSED IN BONE MARROW, SIGNAL = 0.55; EXPRESSED IN PLACENTA, SIGNAL = 0.65; EXPRESSED IN LUNG, SIGNAL = 0.67; EXPRESSED IN ADULT LIVER, SIGNAL = 0.6; EST_HUMAN HIT: BE884820.1, EVALUE 2.00e-10
QEVPHEGDLDIIFQDGATKTPDVKLQNTSL

SEQ ID NO: 47263 - protein, 52 aa, Homo sapiens
  MAP TO AC005023.1; EXPRESSED IN PLACENTA, SIGNAL = 0.59; EXPRESSED IN LUNG, SIGNAL = 0.54; EXPRESSED IN ADULT LIVER, SIGNAL = 0.46; EST_HUMAN HIT: AA989192.1, EVALUE 3.00e-03
AAGSGCTAYGLVLFCKKQYQFNKSCSISLPAHPPSGQNPNLAACLSYVKDKE

SEQ ID NO: 47264 - protein, 36 aa, Homo sapiens
  MAP TO AC006327.3; EXPRESSED IN LUNG, SIGNAL = 0.44; EXPRESSED IN ADULT LIVER, SIGNAL = 0.47; EST_HUMAN HIT: M79138.1, EVALUE 7.40e+00
MWYLPNKCLQSGCMREYLWIWFLDHGFMGKATEGYT

SEQ ID NO: 47265 - protein, 46 aa, Homo sapiens
  MAP TO AC006464.3; EXPRESSED IN LUNG, SIGNAL = 0.45; EXPRESSED IN ADULT LIVER, SIGNAL = 0.47; EST_HUMAN HIT: AW893062.1, EVALUE 1.00e-04
VMSLSPAPLSLLIKAAPILTEEMYGDIQPAAWELLLSMDEHMAGAA

SEQ ID NO: 47266 - protein, 34 aa, Homo sapiens
  MAP TO AC006464.3; EXPRESSED IN LUNG, SIGNAL = 0.45; EXPRESSED IN ADULT LIVER, SIGNAL = 0.47; EST_HUMAN HIT: AW893062.1, EVALUE 7.00e-03
ACSLISVNQGSTNSDRGDVRRHPASCLGAPAQHG

SEQ ID NO: 47267 - protein, 50 aa, Homo sapiens
  MAP TO AC005028.1; EXPRESSED IN PLACENTA, SIGNAL = 0.61; EXPRESSED IN FETAL LIVER, SIGNAL = 0.72; EXPRESSED IN LUNG, SIGNAL = 0.57; EXPRESSED IN ADULT LIVER, SIGNAL = 0.68; EST_HUMAN HIT: AU127370.1, EVALUE 4.00e-11; SWISSPROT HIT: P10071, EVALUE 2.00e-18
LTDGGSIGDLSAIDETPIMDSTISTATTALALQARRNPAGTKWMEHVKLE

SEQ ID NO: 47268 - protein, 28 aa, Homo sapiens
  MAP TO AC005886.1; EXPRESSED IN LUNG, SIGNAL = 0.59; EXPRESSED IN ADULT LIVER, SIGNAL = 0.42
MARIIQQLGMKMISFQPAKTLTSTLPHL

SEQ ID NO: 47269 - protein, 27 aa, Homo sapiens
  MAP TO AC005886.1; EXPRESSED IN LUNG, SIGNAL = 0.59; EXPRESSED IN ADULT LIVER, SIGNAL = 0.42
GQNHSTAWHENDQFSASENSDLYSASL

SEQ ID NO: 47270 - protein, 80 aa, Homo sapiens
  MAP TO AC004241.1; EXPRESSED IN PLACENTA, SIGNAL = 0.63; EXPRESSED IN BONE MARROW, SIGNAL = 0.58; EXPRESSED IN ADULT LIVER, SIGNAL = 0.58; EXPRESSED IN LUNG, SIGNAL = 0.66; EXPRESSED IN FETAL LIVER, SIGNAL = 0.67; EST_HUMAN HIT: BF671355.1, EVALUE 3.00e-37; SWISSPROT HIT: Q02909, EVALUE 2.90e-01
KPLKKVIIEETGNLIQTIDVPDSTTAAAPENNPINLANVIAATGTTSKKNSSQDDLFPTSDTPRAKVLKIEEVSDTSSLQ

SEQ ID NO: 47271 - protein, 18 aa, Homo sapiens
  MAP TO AC002287.1; EXPRESSED IN LUNG, SIGNAL = 0.48; EXPRESSED IN ADULT LIVER, SIGNAL = 0.41; EXPRESSED IN BONE MARROW, SIGNAL = 0.51; EST_HUMAN HIT: AI742622.1, EVALUE 1.30e-02
YSGGREKQRMNSFLHRGG

SEQ ID NO: 47272 - protein, 73 aa, Homo sapiens
  MAP TO AC004765.2; EXPRESSED IN LUNG, SIGNAL = 0.59; EXPRESSED IN BONE MARROW, SIGNAL = 0.71; EXPRESSED IN ADULT LIVER, SIGNAL = 0.48; EXPRESSED IN PLACENTA, SIGNAL = 0.6; EXPRESSED IN FETAL LIVER, SIGNAL = 0.8; EST_HUMAN HIT: N35841.1, EVALUE 2.00e-36; SWISSPROT HIT: Q01577, EVALUE 8.00e-18
YLKRFKVMKIKVLRSWCRQILKGLQFLHTRTPPIIHRDLKCDNIFITGPTGSVKIGDLGLATLKRASFAKSVI

SEQ ID NO: 47273 - protein, 44 aa, Homo sapiens
  MAP TO AC004765.2; EXPRESSED IN LUNG, SIGNAL = 0.59; EXPRESSED IN BONE MARROW, SIGNAL = 0.71; EXPRESSED IN ADULT LIVER, SIGNAL = 0.48; EXPRESSED IN PLACENTA, SIGNAL = 0.6; EXPRESSED IN FETAL LIVER, SIGNAL = 0.8; EST_HUMAN HIT: N35841.1, EVALUE 3.00e-17
RSLKVFSFFILELHLSFTAILNVTTSLSPALLAQSRLETSVWQP

SEQ ID NO: 47274 - protein, 45 aa, Homo sapiens
  MAP TO AC006312.8; EXPRESSED IN ADULT LIVER, SIGNAL = 0.43; EST_HUMAN HIT: BF375591.1, EVALUE 1.00e-19; SWISSPROT HIT: P10030, EVALUE 6.30e+00
YSNLDLKTQEAYEMAVRGLIRPMNKSPMLITGIRCLYFAPPEFLL

SEQ ID NO: 47275 - protein, 115 aa, Homo sapiens
  MAP TO AC006313.1; EXPRESSED IN ADULT LIVER, SIGNAL = 0.47; EST_HUMAN HIT: AI827216.1, EVALUE 1.00e-33; SWISSPROT HIT: P47890, EVALUE 2.00e-30
TSVSHFVLLGISTHPEEQIPLFLVFSLMYAINISGNLAIITLILSAPRLHIPMYIFLSNLALTDICFTSTTVPKMLQIIFSPTKVISYTGCLAQTYFFICFAVMENFILAVMAYD

SEQ ID NO: 47276 - protein, 68 aa, Homo sapiens [sequence omitted]

SEQ ID NO: 47277 - protein, 60 aa, Homo sapiens
  MAP TO AC005034.1; EXPRESSED IN ADULT LIVER, SIGNAL = 0.42; EST_HUMAN HIT: AA521243.1, EVALUE 2.00e-28; SWISSPROT HIT: P49406, EVALUE 2.00e-29
VEICFELYNPRVQEIQVVKLEKRLDDSLLYLRDALPEYSTFDVNMKPVVQEPNQKVPVNE

SEQ ID NO: 47278 - protein, 26 aa, Homo sapiens
  MAP TO AC006484.2; EXPRESSED IN PLACENTA, SIGNAL = 0.61; EXPRESSED IN ADULT LIVER, SIGNAL = 0.48; EXPRESSED IN LUNG, SIGNAL = 0.46
GLGGEQERRDTVHACPELTLQRGRPA

SEQ ID NO: 47279 - protein, 129 aa, Homo sapiens
  MAP TO AB019441.1; EXPRESSED IN ADULT LIVER, SIGNAL = 0.63; EXPRESSED IN LUNG, SIGNAL = 0.49; EST_HUMAN HIT: AW402042.1, EVALUE 4.00e-38; SWISSPROT HIT: P06331, EVALUE 9.00e-26
GLVKPSQTLSLTCAISGDSVSSNSAAWNWIRQSPSRGLEWLGRTYYRSKWYNDYAVSVKSRITINPDTSKNQFSLQLNSVTPEDTAVYYCARDTVRGSQCEPRHKPPCRDAQDPRRHPALPAQGPDQEQ

SEQ ID NO: 47280 - protein, 69 aa, Homo sapiens
  MAP TO AC006518.17; EXPRESSED IN PLACENTA, SIGNAL = 0.84; EXPRESSED IN ADULT LIVER, SIGNAL = 0.55; EXPRESSED IN LUNG, SIGNAL = 0.57; EXPRESSED IN BONE MARROW, SIGNAL = 0.57; SWISSPROT HIT: Q32091, EVALUE 3.40e+00
GFSLAGECRKTTGDACKYHSAQTLTLTFSSVSNERKRLMYQEIINISYDLTTHNHNRGDGGAETDTVSE

SEQ ID NO: 47281 - protein, 64 aa, Homo sapiens
  MAP TO AC006530.4; EXPRESSED IN PLACENTA, SIGNAL = 0.61; EXPRESSED IN LUNG, SIGNAL = 0.52; EXPRESSED IN BONE MARROW, SIGNAL = 0.52; EXPRESSED IN ADULT LIVER, SIGNAL = 0.52; EST_HUMAN HIT: BE062952.1, EVALUE 8.00e-23; SWISSPROT HIT: Q92786, EVALUE 5.00e-21
MDLLFVQFNRCITSQMIKWFSNFREFYYIQMEKSARQAISDGVTNPKMLVVLRNSELFQALNMH

SEQ ID NO: 47282 - protein, 44 aa, Homo sapiens
  MAP TO AC005216.1; EXPRESSED IN ADULT LIVER, SIGNAL = 0.56; EXPRESSED IN LUNG, SIGNAL = 0.51; EST_HUMAN HIT: BE736034.1, EVALUE 4.00e-17
SQAFLPYLSHTAGRNVCFLHGLGDHRGVAGADEHWGADLYHMAP

SEQ ID NO: 47283 - protein, 25 aa, Homo sapiens
  MAP TO AC006305.1; EXPRESSED IN LUNG, SIGNAL = 0.6; EXPRESSED IN BONE MARROW, SIGNAL = 0.54; EXPRESSED IN ADULT LIVER, SIGNAL = 0.52
LQMMAGNVAIEKMNSPFPISKSMYN

SEQ ID NO: 47284 - protein, 48 aa, Homo sapiens
  MAP TO AC006411.1; EXPRESSED IN LUNG, SIGNAL = 0.71; EXPRESSED IN BONE MARROW, SIGNAL = 0.64; EXPRESSED IN ADULT LIVER, SIGNAL = 0.52; EXPRESSED IN FETAL LIVER, SIGNAL = 0.68; EST_HUMAN HIT: BF673726.1, EVALUE 5.00e-22; SWISSPROT HIT: P46940, EVALUE 4.00e-23
WMEACLGEDLPPTTELEEGLRNGVYLAKLGNFFSPKVVSLKKIYDREQ

SEQ ID NO: 47285 - protein, 104 aa, Homo sapiens
  MAP TO AB019440.1; EXPRESSED IN ADULT LIVER, SIGNAL = 0.42; EXPRESSED IN FETAL LIVER, SIGNAL = 0.8; SWISSPROT HIT: P23083, EVALUE 2.00e-39; EST_HUMAN HIT: AW403728.1, EVALUE 4.00e-45
AHSQVQLVQSGAEVKKPGASVKVSCKASGYTFTSYGISWVRQAPGQGLEWMGWISAYNGNTNYAQKLQGRVTMTTDTSTSTAYMELRSLRSDDTAVYYCARDTV

SEQ ID NO: 47286 - protein, 35 aa, Homo sapiens
  MAP TO AC004502.1; EXPRESSED IN LUNG, SIGNAL = 0.56; EXPRESSED IN BONE MARROW, SIGNAL = 0.49; EXPRESSED IN ADULT LIVER, SIGNAL = 0.57; SWISSPROT HIT: Q9R001, EVALUE 4.00e-03; EST_HUMAN HIT: AW630434.1, EVALUE 3.80e-01
PQSVNSVMVPSKLPGMTYTADEQCQILFGPLASFC

SEQ ID NO: 47287 - protein, 20 aa, Homo sapiens
  MAP TO AC004502.1; EXPRESSED IN LUNG, SIGNAL = 0.56; EXPRESSED IN BONE MARROW, SIGNAL = 0.49; EXPRESSED IN ADULT LIVER, SIGNAL = 0.57
SAECQFCDGSLQAARDDIHC

SEQ ID NO: 47288 - protein, 61 aa, Homo sapiens
  MAP TO AC006464.3; EXPRESSED IN BONE MARROW, SIGNAL = 0.57; EXPRESSED IN LUNG, SIGNAL = 0.68; EXPRESSED IN ADULT LIVER, SIGNAL = 0.5
VGLIMYFVRTPCEWGMDAISATLTFLWEVVGYVEGLFFKDLKQTMKKEQCEVKLLVTASMP

SEQ ID NO: 47289 - protein, 44 aa, Homo sapiens
  MAP TO AC006464.3; EXPRESSED IN BONE MARROW, SIGNAL = 0.57; EXPRESSED IN LUNG, SIGNAL = 0.68; EXPRESSED IN ADULT LIVER, SIGNAL = 0.5
LCADPLRVGDGCHFSHPDIPVGGGGLRGGPLLQGSQADDEEGAV

SEQ ID NO: 47290 - protein, 152 aa, Homo sapiens
  MAP TO AC005702.1; EXPRESSED IN LUNG, SIGNAL = 0.44; EXPRESSED IN BONE MARROW, SIGNAL = 0.54; EXPRESSED IN ADULT LIVER, SIGNAL = 0.53; EST_HUMAN HIT: AW956307.1, EVALUE 4.00e-83; SWISSPROT HIT: P23253, EVALUE 2.40e+00
RQRPEAKTSGSEKKYLRAMQANRSQLHSPPGTGSSEDASTPQCVHTRLTGEGSCPHSGDVHIQINSIPKECAENASSRNIRSGVHSCAHGCVHSRLRGHSHSEARLTDDTAAESGDHGSSSFSEFRYLFKWLQKSLPYILILSVKLVMQHIT

SEQ ID NO: 47291 - protein, 64 aa, Homo sapiens
  MAP TO AC002476.1; EXPRESSED IN LUNG, SIGNAL = 0.55; EXPRESSED IN FETAL LIVER, SIGNAL = 0.72; EXPRESSED IN ADULT LIVER, SIGNAL = 0.48; EST_HUMAN HIT: BE003303.1, EVALUE 6.00e-31; SWISSPROT HIT: Q13619, EVALUE 1.00e-26
AFGSTIVINPEKDKTMVQELLDFKDKVDHIIDICFLKNEKFINAMKEAFETFINKRPNKPAELI

SEQ ID NO: 47292 - protein, 33 aa, Homo sapiens
  MAP TO AC004142.1; EXPRESSED IN ADULT LIVER, SIGNAL = 0.42; EXPRESSED IN LUNG, SIGNAL = 0.41; EST_HUMAN HIT: BE167729.1, EVALUE 2.00e-04
EFWIDQTSPNILLSQILIHSKALTLFNSVKPER

SEQ ID NO: 47293 - protein, 124 aa, Homo sapiens
  MAP TO AC005020.1; EXPRESSED IN LUNG, SIGNAL = 0.8; EXPRESSED IN ADULT LIVER, SIGNAL = 0.47; SWISSPROT HIT: Q62245, EVALUE 2.70e+00; EST_HUMAN HIT: AW936960.1, EVALUE 5.30e+00
STKFHLSFKAQIKYHVLHEASSALGQERVFFPLQSSPECKFCDSPFHALLGISQVHPKCYPKQDCLFLSCIKDPVYPNNPIHRRIYHSTWCKTMTQYKCAAIANDGDGDNDDKDDDSKHWRKNT

SEQ ID NO: 47294 - protein, 28 aa, Homo sapiens
  MAP TO AC002549.1; EXPRESSED IN LUNG, SIGNAL = 0.55; EXPRESSED IN PLACENTA, SIGNAL = 1.3; EXPRESSED IN BONE MARROW, SIGNAL = 3.8; EXPRESSED IN ADULT LIVER, SIGNAL = 0.88
SRCEREAPVHKSLNDTLEKSQSKGRFVY

SEQ ID NO: 47295 - protein, 44 aa, Homo sapiens
  MAP TO AC000120.1; EXPRESSED IN LUNG, SIGNAL = 0.47; EXPRESSED IN ADULT LIVER, SIGNAL = 0.41; SWISSPROT HIT: Q13625, EVALUE 9.50e-01; EST_HUMAN HIT: M62210.1, EVALUE 2.00e-12
ERQWVDDFPLHRSACEGDSELLSRLLSERFSVNQLDSDHWAPIH

SEQ ID NO: 47296 - protein, 47 aa, Homo sapiens
  MAP TO AC004537.1; EXPRESSED IN ADULT LIVER, SIGNAL = 0.45; EXPRESSED IN LUNG, SIGNAL = 0.48; EST_HUMAN HIT: R73942.1, EVALUE 8.90e+00
STASSNNAYNVNSSQPLGSYNIGSLSSGTGAGAITMAAAQAVQATAQ

SEQ ID NO: 47297 - protein, 44 aa, Homo sapiens
  MAP TO AC002460.1; EXPRESSED IN BONE MARROW, SIGNAL = 0.65; EXPRESSED IN LUNG, SIGNAL = 0.56; EXPRESSED IN ADULT LIVER, SIGNAL = 0.63; EST_HUMAN HIT: BE552332.1, EVALUE 1.40e+00; SWISSPROT HIT: P09029, EVALUE 3.70e+00
RGSLKDQAVSTDKKARSSIKGGLLYNQQASHIHNGPQWTQSSPF

SEQ ID NO: 47298 - protein, 24 aa, Homo sapiens
  MAP TO AC002465.1; EXPRESSED IN ADULT LIVER, SIGNAL = 0.59; EXPRESSED IN LUNG, SIGNAL = 0.64; EXPRESSED IN BONE MARROW, SIGNAL = 0.63; EST_HUMAN HIT: AV728645.1, EVALUE 1.00e-03
KDFNEAIINMFKELKETMVKEVKK

SEQ ID NO: 47299 - protein, 29 aa, Homo sapiens
  MAP TO AC004674.1; EXPRESSED IN BONE MARROW, SIGNAL = 0.51; EXPRESSED IN ADULT LIVER, SIGNAL = 0.51; EXPRESSED IN LUNG, SIGNAL = 0.54
NDLEIFIDAQTINDGACTNVLTFRFCQYP

SEQ ID NO: 47300 - protein, 49 aa, Homo sapiens
  MAP TO AC002488.1; EXPRESSED IN LUNG, SIGNAL = 0.55; EXPRESSED IN BONE MARROW, SIGNAL = 0.67; EXPRESSED IN ADULT LIVER, SIGNAL = 0.67; EST_HUMAN HIT: AA661603.1, EVALUE 8.00e-03
QTVMALVGVSYANEQCGQLGIAFIIIVCQFLHSGWTRFHFHQESYDQKT

SEQ ID NO: 47301 - protein, 41 aa, Homo sapiens
  MAP TO AC002546.1; EXPRESSED IN LUNG, SIGNAL = 0.54; EXPRESSED IN ADULT LIVER, SIGNAL = 0.56; EXPRESSED IN PLACENTA, SIGNAL = 0.67; EXPRESSED IN BONE MARROW, SIGNAL = 0.81; EST_HUMAN HIT: BE963965.2, EVALUE 6.00e-18; SWISSPROT HIT: P52564, EVALUE 5.00e-19
LRFPYDSWGTPFQQLKQVVEEPSPQLPADKFSAEFVDFTSQ

SEQ ID NO: 47302 - protein, 51 aa, Homo sapiens
  MAP TO AC006120.1; EXPRESSED IN LUNG, SIGNAL = 0.52; EXPRESSED IN ADULT LIVER, SIGNAL = 0.43; EST_HUMAN HIT: BE149117.1, EVALUE 2.00e-15; SWISSPROT HIT: P37651, EVALUE 7.10e-01
PNPARAKGSSPEGLPAWVLGELETSEHKLNESWKLSSGEDNTLVQSPTDVY

SEQ ID NO: 47303 - protein, 28 aa, Homo sapiens
  MAP TO AC006120.1; EXPRESSED IN LUNG, SIGNAL = 0.52; EXPRESSED IN ADULT LIVER, SIGNAL = 0.43; EST_HUMAN HIT: BE149117.1, EVALUE 1.00e-10
QIQHEQKVQAQRDYQPGYWVSWRQVNTN

SEQ ID NO: 47304 - protein, 76 aa, Homo sapiens
  MAP TO AC002064.1; EXPRESSED IN ADULT LIVER, SIGNAL = 0.57; EXPRESSED IN PLACENTA, SIGNAL = 0.68; EXPRESSED IN LUNG, SIGNAL = 0.65; EXPRESSED IN BONE MARROW, SIGNAL = 0.69; EST_HUMAN HIT: BE463857.1, EVALUE 3.00e-14; SWISSPROT HIT: P44837, EVALUE 3.80e-01
IGEIWNEIYEEIKLEKLRPVTTDKKALEAITTASENIGKMVASLQSDIIESQACQDMQNEQKVYAKVSYIGSEEGE

SEQ ID NO: 47305 - protein, 34 aa, Homo sapiens
  MAP TO AC003036.1; EXPRESSED IN LUNG, SIGNAL = 0.6; EXPRESSED IN BONE MARROW, SIGNAL = 0.52; EXPRESSED IN ADULT LIVER, SIGNAL = 0.64; EXPRESSED IN PLACENTA, SIGNAL = 0.69; EST_HUMAN HIT: AW500219.1, EVALUE 1.00e-13; SWISSPROT HIT: P14197, EVALUE 3.80e+00
SGNLVHSYRGTGGIFEVCWNARGDKVGASASDGS

SEQ ID NO: 47306 - protein, 31 aa, Homo sapiens
  MAP TO AC003036.1; EXPRESSED IN LUNG, SIGNAL = 0.6; EXPRESSED IN BONE MARROW, SIGNAL = 0.52; EXPRESSED IN ADULT LIVER, SIGNAL = 0.64; EXPRESSED IN PLACENTA, SIGNAL = 0.69
RFPLCKAKQLSLTTQGAPATDAGVECALLRP

SEQ ID NO: 47307 - protein, 63 aa, Homo sapiens
  MAP TO AC001231.1; EXPRESSED IN LUNG, SIGNAL = 0.45; EXPRESSED IN ADULT LIVER, SIGNAL = 0.41; EST_HUMAN HIT: BE731261.1, EVALUE 1.50e+00; SWISSPROT HIT: P15171, EVALUE 4.80e-01
FPSDHHPPQYPSSPKSFFLEVIMFYRVADRNTTPCNKKSVWSFRERWPALVGAMGEHHGFCKV

SEQ ID NO: 47308 - protein, 27 aa, Homo sapiens
  MAP TO AC001231.1; EXPRESSED IN LUNG, SIGNAL = 0.45; EXPRESSED IN ADULT LIVER, SIGNAL = 0.41
DFLLIIILRSTLPHPNPSFWKLLCSTG

SEQ ID NO: 47309 - protein, 171 aa, Homo sapiens
  MAP TO AC003958.1; EXPRESSED IN PLACENTA, SIGNAL = 0.63; EXPRESSED IN LUNG, SIGNAL = 0.47; EXPRESSED IN BONE MARROW, SIGNAL = 0.52; EXPRESSED IN ADULT LIVER, SIGNAL = 0.43; EST_HUMAN HIT: BF569905.1, EVALUE 1.00e-22; SWISSPROT HIT: O76015, EVALUE 4.00e-46
MTSDHCSSLLSGQVSEANAASLCLLANVAHANRVRVGSTPLGRLSLCLPPTCHTTCPLPGTCHIPGNIGICGAYRENTLNGHEKETMQFLNDRLANYLEKVRQLEWDNAELETKLHERSKCHESSVCRNYQSYFCTIQELQQKVRFAVHQIRGQESAYCLSAKSGPPPAFA

SEQ ID NO: 47310 - protein, 26 aa, Homo sapiens
  MAP TO AC002429.1; EXPRESSED IN ADULT LIVER, SIGNAL = 0.51; EXPRESSED IN LUNG, SIGNAL = 0.53; EXPRESSED IN BONE MARROW, SIGNAL = 0.56
TQTVDSAVKRNKWLYHYHHHHHHHHH

SEQ ID NO: 47311 - protein, 45 aa, Homo sapiens
  MAP TO AC006313.1; EXPRESSED IN ADULT LIVER, SIGNAL = 0.48; EXPRESSED IN LUNG, SIGNAL = 0.53
IVKVAVNVTVASVRDFFKPLSRGAAYIEDQACLYVELLSLPFLVV

SEQ ID NO: 47312 - protein, 86 aa, Homo sapiens
  MAP TO AC005803.1; EXPRESSED IN PLACENTA, SIGNAL = 0.58; EXPRESSED IN ADULT LIVER, SIGNAL = 0.75; EXPRESSED IN LUNG, SIGNAL = 0.44; EXPRESSED IN BONE MARROW, SIGNAL = 0.49; SWISSPROT HIT: Q09499, EVALUE 6.00e-05; EST_HUMAN HIT: AA527544.1, EVALUE 1.20e-01
MSHFVSNGDGLVVTVDSESGDVLWIQNYASPVVAFYVWQREGLRKVMHINVAVETLRYLTFMSGEVGRITKWKYPFPKETEAKSKL

SEQ ID NO: 47313 - protein, 153 aa, Homo sapiens
  MAP TO AC005755.1; EXPRESSED IN ADULT LIVER, SIGNAL = 0.53; EXPRESSED IN PLACENTA, SIGNAL = 0.59; EXPRESSED IN LUNG, SIGNAL = 0.6; EXPRESSED IN BONE MARROW, SIGNAL = 0.69; EST_HUMAN HIT: AU117333.1, EVALUE 8.00e-82; SWISSPROT HIT: P49069, EVALUE 9.00e-83
EESQTKSKQQDSDKLNSLSVPSVSKRVVLGDSVSTGTTDQQGGVAEVKGTQLGDKLDSFIKPPECSSDVNLELRQRNRGDLTADSVQRGSRHGLEQYLSRFEEAMKLRKQLISEKPSQEDGNTTEEFDSFRIFRLVGCALLALGVRAFVCKYL

SEQ ID NO: 47314 - protein, 35 aa, Homo sapiens
  MAP TO AC005940.3; EXPRESSED IN PLACENTA, SIGNAL = 1.3; EXPRESSED IN ADULT LIVER, SIGNAL = 0.81; EXPRESSED IN LUNG, SIGNAL = 0.59; EXPRESSED IN FETAL LIVER, SIGNAL = 0.68; EXPRESSED IN BONE MARROW, SIGNAL = 0.76; SWISSPROT HIT: Q04786, EVALUE 2.90e+00; EST_HUMAN HIT: BE972818.1, EVALUE 1.00e-04
ETIYICGVDEMSTQDVFSYFKEYPPAHIEWLDDTS

SEQ ID NO: 47315 - protein, 44 aa, Homo sapiens
  MAP TO AC004033.3; EXPRESSED IN PLACENTA, SIGNAL = 0.89; EXPRESSED IN LUNG, SIGNAL = 0.74; EXPRESSED IN FETAL LIVER, SIGNAL = 0.85; EXPRESSED IN ADULT LIVER, SIGNAL = 0.73; EXPRESSED IN BONE MARROW, SIGNAL = 0.85; SWISSPROT HIT: P51869, EVALUE 1.20e+00; EST_HUMAN HIT: BE063172.1, EVALUE 3.00e-10
SGHRLNLHFLGSYLTLPWLLLAFFMASLFCIRPLTCALLFTLGY

SEQ ID NO: 47316 - protein, 29 aa, Homo sapiens
  MAP TO AC005999.1; EXPRESSED IN PLACENTA, SIGNAL = 0.63; EXPRESSED IN BONE MARROW, SIGNAL = 0.66; EXPRESSED IN ADULT LIVER, SIGNAL = 0.52; EXPRESSED IN LUNG, SIGNAL = 0.54
SHFERSRSQATTAASGWISVGSSDAEDVM

SEQ ID NO: 47317 - protein, 79 aa, Homo sapiens
  MAP TO AC002554.1; EXPRESSED IN ADULT LIVER, SIGNAL = 0.48; EXPRESSED IN LUNG, SIGNAL = 0.48; EXPRESSED IN BONE MARROW, SIGNAL = 0.51; SWISSPROT HIT: P12447, EVALUE 4.20e+00; EST_HUMAN HIT: AA224259.1, EVALUE 5.00e-35
PTCMQDLGSSHGEDLEGECSRKLDQKLPELRGVGDPAMISSDTSYLSSRGRMIKWFWDSAEEGYRTYHMDEYDEDKNPS

SEQ ID NO: 47318 - protein, 37 aa, Homo sapiens
  MAP TO AC002554.1; EXPRESSED IN ADULT LIVER, SIGNAL = 0.48; EXPRESSED IN LUNG, SIGNAL = 0.48; EXPRESSED IN BONE MARROW, SIGNAL = 0.51; SWISSPROT HIT: Q62893, EVALUE 2.20e+00; EST_HUMAN HIT: BE393764.1, EVALUE 2.00e-17
PPACRTWAVAMGKIWKENAPENWTRSCQSSVEWVILP

SEQ ID NO: 47319 - protein, 56 aa, Homo sapiens
  MAP TO AC005737.1; EXPRESSED IN LUNG, SIGNAL = 0.64; EXPRESSED IN FETAL LIVER, SIGNAL =  24; EXPRESSED IN BONE MARROW, SIGNAL = 0.5; EXPRESSED IN ADULT LIVER, SIGNAL = 0.49; EST_HUMAN HIT: AA077080.1, EVALUE 3.70e+00
KSNPSQSFHKLLTSTYYKSNTVKVADIVVNKTDTVTILLPQSSQSRDMQEIYLIYN

SEQ ID NO: 47320 - protein, 56 aa, Homo sapiens
  MAP TO AC002112.1; EXPRESSED IN PLACENTA, SIGNAL = 0.64; EXPRESSED IN BONE MARROW, SIGNAL = 0.54; EXPRESSED IN ADULT LIVER, SIGNAL = 0.48; EXPRESSED IN LUNG, SIGNAL = 0.68
TALAAAATAALLVRPLPDHVQRQPPPGAGSPRAPQSGPAPPPAPAAGDEEPRQALP

SEQ ID NO: 47321 - protein, 40 aa, Homo sapiens
  MAP TO AC004049.1; EXPRESSED IN LUNG, SIGNAL = 0.48; EXPRESSED IN BONE MARROW, SIGNAL = 0.68; EXPRESSED IN ADULT LIVER, SIGNAL = 0.42; EST_HUMAN HIT: AA307490.1, EVALUE 7.00e-15; SWISSPROT HIT: P11533, EVALUE 2.20e+00
MNNQKVVAVLLQECKQVLDQLLLEAPDVSEEDKSEDQRCR

SEQ ID NO: 47322 - protein, 77 aa, Homo sapiens
  MAP TO AC003026.1; EXPRESSED IN ADULT LIVER, SIGNAL = 0.42; SWISSPROT HIT: P33527, EVALUE 3.00e-06; EST_HUMAN HIT: AA306629.1, EVALUE 2.00e-17
MVQTHNSSPSREPSDPAQGICTVDTLVLCFSRQLSSSSSYSGDISRHHNSTAELQKAEAKKEETWKLMEADKAQTGQ

SEQ ID NO: 47323 - protein, 27 aa, Homo sapiens
  MAP TO AC004831.1; EXPRESSED IN ADULT LIVER, SIGNAL = 0.44; EXPRESSED IN LUNG, SIGNAL = 0.46
VLCFQENKKTWKNSKNRKMPKNDFKDG

SEQ ID NO: 47324 - protein, 30 aa, Homo sapiens
  MAP TO AC000097.1; EXPRESSED IN FETAL LIVER, SIGNAL = 1.5; EXPRESSED IN ADULT LIVER, SIGNAL = 5.2; EST_HUMAN HIT: BF316639.1, EVALUE 2.60e+00
GKPNTMTAPRRPQSARPQERDPWSPMSQQA

SEQ ID NO: 47325 - protein, 52 aa, Homo sapiens
  MAP TO AC003074.1; EXPRESSED IN ADULT LIVER, SIGNAL = 0.42; EST_HUMAN HIT: BE883100.1, EVALUE 6.50e+00
KTTIPCPNAIQLPDLFHFLRGQLALPVSFSWRKTSFLELLHRTWPSEFLKLP

SEQ ID NO: 47326 - protein, 41 aa, Homo sapiens
  MAP TO AC004535.1; EXPRESSED IN LUNG, SIGNAL = 0.64; EXPRESSED IN ADULT LIVER, SIGNAL = 0.48; EXPRESSED IN PLACENTA, SIGNAL = 0.74; EXPRESSED IN BONE MARROW, SIGNAL = 0.6; EST_HUMAN HIT: AW377444.1, EVALUE 4.20e+00
RSVPQREEENAPLFDGYDVPYFVTWTFIYIFYLICTAILKD

SEQ ID NO: 47327 - protein, 45 aa, Homo sapiens
  MAP TO AC005016.1; EXPRESSED IN LUNG, SIGNAL = 0.47; EXPRESSED IN ADULT LIVER, SIGNAL = 0.4
VCILSLKRVRIIQMTLSAKQLNGVKIRHNPWNFIIQVITQMRPGS

SEQ ID NO: 47328 - protein, 66 aa, Homo sapiens
  MAP TO AC005969.4; EXPRESSED IN LUNG, SIGNAL = 0.6; EXPRESSED IN BONE MARROW, SIGNAL = 0.49; EXPRESSED IN ADULT LIVER, SIGNAL = 0.47; SWISSPROT HIT: P26659, EVALUE 3.00e-03; EST_HUMAN HIT: BE270523.1, EVALUE 3.30e+00
MDLNLKEQVVILDEAHNIEDCARESASYSVTEVQLRFARDELDSMVNNNIRKKDHEPLRAVCCSLI

SEQ ID NO: 47329 - protein, 18 aa, Homo sapiens
  MAP TO AC006350.2; EXPRESSED IN LUNG, SIGNAL = 0.61; EXPRESSED IN ADULT LIVER, SIGNAL = 1.4; EST_HUMAN HIT: X99272.1, EVALUE 1.60e+00
SLHMAFYGKSCQCNRREP

SEQ ID NO: 47330 - protein, 62 aa, Homo sapiens
  MAP TO AC005026.1; EXPRESSED IN LUNG, SIGNAL = 0.42; EXPRESSED IN ADULT LIVER, SIGNAL = 0.46; SWISSPROT HIT: P10071, EVALUE 1.00e-24; EST_HUMAN HIT: AI906355.1, EVALUE 5.00e-20
SPTYPDLPFIRISPHRNPTAASESPFSPPHPYINPYMDYIRSLHSSPSLSMISATRGLSPTD

SEQ ID NO: 47331 - protein, 120 aa, Homo sapiens [sequence omitted]

SEQ ID NO: 47332 - protein, 100 aa, Homo sapiens
  MAP TO AC002094.1; EXPRESSED IN LUNG, SIGNAL = 0.53; EXPRESSED IN BONE MARROW, SIGNAL = 0.75; EXPRESSED IN ADULT LIVER, SIGNAL = 0.46; EST_HUMAN HIT: AV655950.1, EVALUE 1.00e-57; SWISSPROT HIT: P02457, EVALUE 1.40e+00
SSLAGTGTVCQGKWTQPWLAASTSQAWHPAPPWPRNKGLGIATAKATVHNEATAVAATRTPAGHPAPRGCPCSPVRRATWEPTTMMTTGWTGLCLPPVNP

SEQ ID NO: 47333 - protein, 28 aa, Homo sapiens
  MAP TO AC002067.1; EXPRESSED IN LUNG, SIGNAL = 0.54; EXPRESSED IN BONE MARROW, SIGNAL = 0.6; EXPRESSED IN ADULT LIVER, SIGNAL = 0.47; SWISSPROT HIT: O43913, EVALUE 2.00e-10; EST_HUMAN HIT: AI953727.1, EVALUE 1.00e-08
LTLVGHDDQLDGPKYKCTVSLDFIRAIA

SEQ ID NO: 47334 - protein, 60 aa, Homo sapiens
  MAP TO AC000061.1; EXPRESSED IN BONE MARROW, SIGNAL = 0.57; EXPRESSED IN ADULT LIVER, SIGNAL = 0.48; SWISSPROT HIT: P13569, EVALUE 2.00e-28; EST_HUMAN HIT: AW852058.1, EVALUE 2.00e-27
VIEENKVRQYDSIQKLLNERSLFRQAISPSDRVKLFPHRNSSKCKSKPQIAALKEETEEE

SEQ ID NO: 47335 - protein, 68 aa, Homo sapiens
  MAP TO AC006186.1; EXPRESSED IN ADULT LIVER, SIGNAL = 0.53; EST_HUMAN HIT: BE787716.1, EVALUE 9.00e-07
MPSLWDRFSSSSTSSSPSSLPRTPTPDRPPRSAWGSATREEGFDRSTSLESSDCESLDSSNSGFGPEK

SEQ ID NO: 47336 - protein, 73 aa, Homo sapiens
  MAP TO AC006186.1; EXPRESSED IN ADULT LIVER, SIGNAL = 0.53; EST_HUMAN HIT: BE733368.1, EVALUE 2.00e-07
WRLSSPCLAFGTASRRRPPPLRPRPCPELPPQIGRRAQPGGRRPGRRGLTAPRAWRARTASPWTAATVASGRR

SEQ ID NO: 47337 - protein, 37 aa, Homo sapiens
  MAP TO AC005031.1; EXPRESSED IN PLACENTA, SIGNAL = 0.59; EXPRESSED IN ADULT LIVER, SIGNAL = 0.45; EXPRESSED IN LUNG, SIGNAL = 0.53; EXPRESSED IN BONE MARROW, SIGNAL = 0.55; SWISSPROT HIT: Q13075, EVALUE 5.00e-06; EST_HUMAN HIT: AA358493.1, EVALUE 1.00e-13
SKKSSEEITQYIQSYKGFVDITVMYNSNFFLKFLDYL

SEQ ID NO: 47338 - protein, 43 aa, Homo sapiens
  MAP TO AC003034.1; EXPRESSED IN LUNG, SIGNAL = 0.6; EXPRESSED IN PLACENTA, SIGNAL = 0.62; EXPRESSED IN BONE MARROW, SIGNAL = 1.6; EXPRESSED IN ADULT LIVER, SIGNAL = 0.55; SWISSPROT HIT: P38940, EVALUE 2.10e+00; EST_HUMAN HIT: R92627.1, EVALUE 1.00e-15
VVKAFVVLALQFLSHDPEQLTKELQQHVKSVTAPYKYPRKVRP

SEQ ID NO: 47339 - protein, 52 aa, Homo sapiens
  MAP TO AC004027.1; EXPRESSED IN LUNG, SIGNAL = 0.44; EXPRESSED IN ADULT LIVER, SIGNAL = 0.46; SWISSPROT HIT: P11260, EVALUE 6.00e-04; EST_HUMAN HIT: AA325697.1, EVALUE 2.00e-08
AKSLKNLFEVIIEENFPGLARDLDIQIQEVQRTPARVIAKKLINKEYSYQAI

SEQ ID NO: 47340 - protein, 120 aa, Homo sapiens
  MAP TO AC006095.1; EXPRESSED IN ADULT LIVER, SIGNAL = 0.46; SWISSPROT HIT: P97785, EVALUE 2.00e-60; EST_HUMAN HIT: BE090733.1, EVALUE 3.00e-53
MPVFLCICSGAHSQRNNCLDAAKACNLDDICKKYRSAYITPCTTSVSNDVCNRRKCHKALRQFFDKVPAKHSYGMLFCSCRDIACTERRRQTIVPVCSYEEREKPNCLNLQDSCKTNYIC

SEQ ID NO: 47341 - protein, 17 aa, Homo sapiens
  MAP TO AC002485.1; EXPRESSED IN LUNG, SIGNAL = 0.62; EXPRESSED IN BONE MARROW, SIGNAL = 0.59; EXPRESSED IN ADULT LIVER, SIGNAL = 0.61
RHRHGYQLHAQLWLGQK

SEQ ID NO: 47342 - protein, 55 aa, Homo sapiens; identical to SEQ ID NO: 43890
  MAP TO AC002543.1; EXPRESSED IN LUNG, SIGNAL = 0.63; EXPRESSED IN BONE MARROW, SIGNAL = 0.77; EXPRESSED IN ADULT LIVER, SIGNAL = 0.47; EST_HUMAN HIT: AL079360.1, EVALUE 1.00e-07; SWISSPROT HIT: P32462, EVALUE 5.30e-01

SEQ ID NO: 47343 - protein, 91 aa, Homo sapiens
  MAP TO AC005013.1; EXPRESSED IN BONE MARROW, SIGNAL = 0.66; EXPRESSED IN ADULT LIVER, SIGNAL = 0.49; EST_HUMAN HIT: AU117379.1, EVALUE 1.70e-01
MNTMGHMMEMMGSRQDQTPHHHMHSHPHQHQTLPPHHPYPHQHQHPAHHPHPQPHHQQNHPHHHSHSHLHAHPAHHQTSPHPPLHTGNQAQ

SEQ ID NO: 47344 - protein, 72 aa, Homo sapiens
  MAP TO AC004141.1; EXPRESSED IN LUNG, SIGNAL = 0.45; EXPRESSED IN ADULT LIVER, SIGNAL = 0.46; EST_HUMAN HIT: BE962520.2, EVALUE 4.70e-01; SWISSPROT HIT: P24658, EVALUE 7.20e+00
VEFAVQIAVLCKKYEAVMSILAQCTTGKLVPGASALRTPQYRPSTQLRLGMGRPPALSACRQEKSSVCESMW

SEQ ID NO: 47345 - protein, 134 aa, Homo sapiens
  MAP TO AC003695.1; EXPRESSED IN BONE MARROW, SIGNAL = 0.52; EXPRESSED IN LUNG, SIGNAL = 0.68; EXPRESSED IN ADULT LIVER, SIGNAL = 0.56; EST_HUMAN HIT: AI138416.1, EVALUE 6.30e-01; SWISSPROT HIT: P06969, EVALUE 3.30e-01
LRPRSQLRLSADLEVLDLQGLRPDRELARVSVLSTDSGIERDLPTGADELPAPGSPEMERAGLQRKGGIKKRAWPLDFLMPGSWDGPPGLHRRTGRPSGDGEMLPGVSRLHTARVLVLGDDRMLGRLAQAYHRL

SEQ ID NO: 47346 - protein, 79 aa, Homo sapiens
  MAP TO AC003695.1; EXPRESSED IN BONE MARROW, SIGNAL = 0.52; EXPRESSED IN LUNG, SIGNAL = 0.68; EXPRESSED IN ADULT LIVER, SIGNAL = 0.56; EST_HUMAN HIT: AA583145.1, EVALUE 1.00e-01; SWISSPROT HIT: P12900, EVALUE 3.00e+00
SSAQDPSCASVLTWRSWICRASGRTGSWPGFLCCPLTAALSGTFPRGLMSCLHPAALRWSEPGCSAKGASRSVHGPWTS

SEQ ID NO: 47347 - protein, 59 aa, Homo sapiens
  MAP TO AC003082.1; EXPRESSED IN BONE MARROW, SIGNAL = 0.59; EXPRESSED IN LUNG, SIGNAL = 0.66; EXPRESSED IN ADULT LIVER, SIGNAL = 0.56; EST_HUMAN HIT: AW069411.1, EVALUE 3.60e-02; SWISSPROT HIT: P46068, EVALUE 7.90e+00
QQSSMRQLLPKLSQELLAVTSSRRVAMIKVYCTHSLHHCWLLLLVESEPGPKSEPLASA

SEQ ID NO: 47348 - protein, 70 aa, Homo sapiens [sequence omitted]

SEQ ID NO: 47349 - protein, 60 aa, Homo sapiens
  MAP TO AC004057.1; EXPRESSED IN ADULT LIVER, SIGNAL = 0.42; EXPRESSED IN LUNG, SIGNAL = 0.45; EXPRESSED IN FETAL LIVER, SIGNAL = 0.74; EST_HUMAN HIT: BF362978.1, EVALUE 2.00e-09; SWISSPROT HIT: Q01484, EVALUE 4.00e-31
NGLSPLHMAAQGDHVECVKHLLQHKAPVDDVTLDYLTALHVAAHCGHYRVTKLLLDKRAN

SEQ ID NO: 47350 - protein, 17 aa, Homo sapiens
  MAP TO AC004057.1; EXPRESSED IN ADULT LIVER, SIGNAL = 0.42; EXPRESSED IN LUNG, SIGNAL = 0.45; EXPRESSED IN FETAL LIVER, SIGNAL = 0.74
MGCLHYTWLPRETTWNV

SEQ ID NO: 47351 - protein, 48 aa, Homo sapiens
  MAP TO AC005571.1; EXPRESSED IN LUNG, SIGNAL = 0.58; EXPRESSED IN ADULT LIVER, SIGNAL = 0.46
CGVEQRDDAEGFSVRILPRPPSHFSQPPLLAPALLPSLKILTSPGLNP

SEQ ID NO: 47352 - protein, 154 aa, Homo sapiens
  MAP TO AC000111.1; EXPRESSED IN ADULT LIVER, SIGNAL = 0.44; EXPRESSED IN PLACENTA, SIGNAL = 0.73; EXPRESSED IN LUNG, SIGNAL = 0.5; EST_HUMAN HIT: W52051.1, EVALUE 1.00e-06; SWISSPROT HIT: P13569, EVALUE 2.00e-82
VSWTETKKQSFKQTGEFGEKRKNSILNPINSIRKFSIVQKTPLQMNGIEEDSDEPLERRLSLVPDSEQGEAILPRISVISTGPTLQARRRQSVLNLMTHSVNQGQNIHRKTTASTRKVSLAPQANLTELDIYSRRLSQETGLEISEEINEEDLK

SEQ ID NO: 47353 - protein, 45 aa, Homo sapiens
  MAP TO AC000111.1; EXPRESSED IN ADULT LIVER, SIGNAL = 0.44; EXPRESSED IN PLACENTA, SIGNAL = 0.73; EXPRESSED IN LUNG, SIGNAL = 0.5
LSPGQKQKNNLLNRLESLGKKGRILFSIQSTLYENFPLCKRLPYK

SEQ ID NO: 47354 - protein, 32 aa, Homo sapiens
  MAP TO AC006451.1; EXPRESSED IN ADULT LIVER, SIGNAL = 0.4; EST_HUMAN HIT: AU132040.1, EVALUE 6.00e-13; SWISSPROT HIT: Q05209, EVALUE 6.00e-14
GVYGPKAYVATQGPLANTVIDFWRMIWEYNVV

SEQ ID NO: 47355 - protein, 103 aa, Homo sapiens
  MAP TO AB019439.1; EXPRESSED IN LUNG, SIGNAL = 0.42; EXPRESSED IN ADULT LIVER, SIGNAL = 0.51; EST_HUMAN HIT: AW408304.1, EVALUE 7.00e-45; SWISSPROT HIT: P01764, EVALUE 3.00e-43
VQCEVQLVESGGGLVKPGGSLRLSCAASGFTFSSYSMNWVRQAPGKGLEWVSSISSSSSYIYYADSVKGRFTISRDNAKNSLYLQMNSLRAEDTAVYYCARDT

SEQ ID NO: 47356 - protein, 33 aa, Homo sapiens
  MAP TO AC004130.1; EXPRESSED IN BONE MARROW, SIGNAL = 0.54; EXPRESSED IN ADULT LIVER, SIGNAL = 0.5; EXPRESSED IN LUNG, SIGNAL = 0.57; SWISSPROT HIT: P27206, EVALUE 6.50e+00; EST_HUMAN HIT: AA971363.1, EVALUE 1.50e+00
MAHLQLGAGYCQVACVLCHMDLSIEFLNILKTW

SEQ ID NO: 47357 - protein, 32 aa, Homo sapiens
  MAP TO AC004130.1; EXPRESSED IN BONE MARROW, SIGNAL = 0.54; EXPRESSED IN ADULT LIVER, SIGNAL = 0.5; EXPRESSED IN LUNG, SIGNAL = 0.57; EST_HUMAN HIT: AW665056.1, EVALUE 1.50e+00
GSLAAGCWLLSGGLCALSHGSLYRVFEHPQNM

SEQ ID NO: 47358 - protein, 35 aa, Homo sapiens
  MAP TO AC005191.1; EXPRESSED IN ADULT LIVER, SIGNAL = 0.55
HGMVLLLLATLKRSQWTCISWQHHRPLIIIRIKIP

SEQ ID NO: 47359 - protein, 67 aa, Homo sapiens
  MAP TO AC005045.2; EXPRESSED IN LUNG, SIGNAL = 0.48; EXPRESSED IN ADULT LIVER, SIGNAL =   1; SWISSPROT HIT: P21439, EVALUE 2.00e-27
ATGTRLALIAQNIANLGTGIIISFIYGWQLTLLLLAVVPIIAVSGIVEMKLLAGNAKRDKKELEAAG

SEQ ID NO: 47360 - protein, 32 aa, Homo sapiens
  MAP TO AC004944.1; EXPRESSED IN ADULT LIVER, SIGNAL = 0.61; EXPRESSED IN LUNG, SIGNAL = 0.48
IIMLVMVPQHKEGPRPWAHTLLGIFLSIQPIG

SEQ ID NO: 47361 - protein, 20 aa, Homo sapiens
  MAP TO AC005873.2; EXPRESSED IN LUNG, SIGNAL = 0.54; EXPRESSED IN ADULT LIVER, SIGNAL = 0.41
NPSKSAKRPGRLSEEVISAV

SEQ ID NO: 47362 - protein, 64 aa, Homo sapiens
  MAP TO AC004216.1; EXPRESSED IN LUNG, SIGNAL = 0.41; EXPRESSED IN ADULT LIVER, SIGNAL = 0.43; SWISSPROT HIT: P35235, EVALUE 1.00e-33; EST_HUMAN HIT: AA579707.1, EVALUE 2.00e-30
WFHGHLSGKEAEKLLTEKGKHGSFLVRESQSHPGDFVLSVRTGDDKGESNDGKSKVTHVMIRCQ

SEQ ID NO: 47363 - protein, 51 aa, Homo sapiens
  MAP TO AC000382.1; EXPRESSED IN LUNG, SIGNAL = 0.52; EXPRESSED IN ADULT LIVER, SIGNAL = 0.46; EST_HUMAN HIT: AI240430.1, EVALUE 1.70e-02
LLFCTGIMAQVAVSTLPMEDEESIEDEESVEDDSVESRMVVTLLISAIEST

SEQ ID NO: 47364 - protein, 87 aa, Homo sapiens
  MAP TO AC006252.4; EXPRESSED IN ADULT LIVER, SIGNAL = 2.8; EST_HUMAN HIT: AV707162.1, EVALUE 1.00e-43; SWISSPROT HIT: P13196, EVALUE 1.00e-44
KAFGCVGGYIASTSSLIDTVRSYAAGFIFTTSLPPMLLAGALESVRILKSAEGRVLRRQHQRNVKLMRQMLMDAGLPVVHCPSHIIP

SEQ ID NO: 47365 - protein, 17 aa, Homo sapiens
  MAP TO AC006252.4; EXPRESSED IN ADULT LIVER, SIGNAL = 2.8; EST_HUMAN HIT: AI350063.1, EVALUE 3.00e-04
QSLWLCWRVHRQHEFSD

SEQ ID NO: 47366 - protein, 31 aa, Homo sapiens
  MAP TO AC000113.1; EXPRESSED IN ADULT LIVER, SIGNAL = 0.48; EXPRESSED IN LUNG, SIGNAL = 0.51; EST_HUMAN HIT: BF223025.1, EVALUE 2.60e+00; SWISSPROT HIT: P24004, EVALUE 2.20e+00
FYELCDFDQVSNLSVPFLICKMGKVTIHEVV

SEQ ID NO: 47367 - protein, 107 aa, Homo sapiens
  MAP TO AB019439.1; EXPRESSED IN ADULT LIVER, SIGNAL = 0.44; EST_HUMAN HIT: AW404242.1, EVALUE 1.00e-32; SWISSPROT HIT: P06331, EVALUE 9.00e-27
VLPQVQLQESGPGLVKPSQTLSLTCTVSGGSISSGGYYWSWIRQHPGKGLEWIGYIYYSGSTYYNPSLKSRVTISVDTSKNQFSLKLSSVTAADTAVYYCARDTMRG

SEQ ID NO: 47368 - protein, 41 aa, Homo sapiens
  MAP TO AC005034.1; EXPRESSED IN ADULT LIVER, SIGNAL = 0.41; EST_HUMAN HIT: BE621623.1, EVALUE 9.30e+00; SWISSPROT HIT: Q08678, EVALUE 6.30e+00
RDMGCEGSSVTEFLLGLPRFGSAPYQGGPTWRVKISPDSPH

SEQ ID NO: 47369 - protein, 59 aa, Homo sapiens
  MAP TO AL137225.7; EXPRESSED IN ADULT LIVER, SIGNAL = 0.57; EXPRESSED IN PLACENTA, SIGNAL = 0.59; EXPRESSED IN FETAL LIVER, SIGNAL = 0.54; EXPRESSED IN BONE MARROW, SIGNAL = 0.45
PVVQQQKGKTIKLADAGEALTFPEGYAKGSSQLLLPATFLSAELALLQKSFHVNIQDTM

SEQ ID NO: 47370 - protein, 52 aa, Homo sapiens
  MAP TO AL137225.7; EXPRESSED IN ADULT LIVER, SIGNAL = 0.57; EXPRESSED IN PLACENTA, SIGNAL = 0.59; EXPRESSED IN FETAL LIVER, SIGNAL = 0.54; EXPRESSED IN BONE MARROW, SIGNAL = 0.45
LWCSSKRAKPSSLLMPGRPSRSLRVMPKARRSCCSQPPSSLQSLPFCRSPFM

SEQ ID NO: 47371 - protein, 56 aa, Homo sapiens
  MAP TO AC016057.3; EXPRESSED IN BONE MARROW, SIGNAL = 0.44; EXPRESSED IN ADULT LIVER, SIGNAL = 0.55; EXPRESSED IN PLACENTA, SIGNAL = 0.69; EXPRESSED IN FETAL LIVER, SIGNAL = 0.46; SWISSPROT HIT: P57078, EVALUE 8.00e-04; EST_HUMAN HIT: AA972567.1, EVALUE 1.00e-27
MQQIKELVMDEDNDGCTPLHYACRQGGPGSVNNLLGFNVSIHSKSKDKKSPLHFAA

SEQ ID NO: 47372 - protein, 40 aa, Homo sapiens
  MAP TO AL161646.3; EXPRESSED IN PLACENTA, SIGNAL = 0.5; EXPRESSED IN ADULT LIVER, SIGNAL = 0.63; EXPRESSED IN FETAL LIVER, SIGNAL = 0.48
FIQQTLLNADDLETGEMRHLPLLHSLQVGQSVHHLALPRG

SEQ ID NO: 47373 - protein, 33 aa, Homo sapiens
  MAP TO AC021239.3; EXPRESSED IN PLACENTA, SIGNAL = 0.57; EXPRESSED IN ADULT LIVER, SIGNAL = 0.53; EXPRESSED IN BONE MARROW, SIGNAL = 0.42; EXPRESSED IN FETAL LIVER, SIGNAL = 0.51
ISIPALLQENLIYQIDNGTRKNSVFLTGSQMIP

SEQ ID NO: 47374 - protein, 87 aa, Homo sapiens
  MAP TO AL133414.3; EXPRESSED IN FETAL LIVER, SIGNAL = 0.52; EXPRESSED IN PLACENTA, SIGNAL = 0.59; EXPRESSED IN ADULT LIVER, SIGNAL = 0.53; EXPRESSED IN BONE MARROW, SIGNAL = 0.49; SWISSPROT HIT: P43626, EVALUE 3.00e-45; EST_HUMAN HIT: AW951147.1, EVALUE 4.00e-33
RLVKSEETVILQCWSDVMFEHFLLHREGMFNDTLRLIGEHHDGVSKANFSISRMKQDLAGTYRCYGSVTHSPYQLSAPSDPLDIVII

SEQ ID NO: 47375 - protein, 46 aa, Homo sapiens
  MAP TO AL157377.1; EXPRESSED IN ADULT LIVER, SIGNAL = 0.56; EXPRESSED IN FETAL LIVER, SIGNAL = 0.49; EXPRESSED IN PLACENTA, SIGNAL = 0.52; EST_HUMAN HIT: AU138961.1, EVALUE 5.00e-11; SWISSPROT HIT: P06802, EVALUE 7.00e-10
CRKPDQHFKPYLTPDLPKRLHYAKNVRIDKVHLFVDQQWLAVRFVY

SEQ ID NO: 47376 - protein, 127 aa, Homo sapiens
  MAP TO AC022268.3; EXPRESSED IN PLACENTA, SIGNAL = 0.5; EXPRESSED IN ADULT LIVER, SIGNAL = 0.56; EXPRESSED IN BONE MARROW, SIGNAL = 0.51; EST_HUMAN HIT: BE896439.1, EVALUE 3.10e+00
DGERRPTVRISNWFGNAAKASQREANYAERRSLSKFLSRSVQSLYHTSSSAWNLLPAGGSQSDSEDLEELSARRGLEGESDEDSRSEDENVSSKPSSISRSWAEEEGESCLREGTAHLDEEVILTML

SEQ ID NO: 47377 - protein, 66 aa, Homo sapiens
  MAP TO AC022268.3; EXPRESSED IN PLACENTA, SIGNAL = 0.5; EXPRESSED IN ADULT LIVER, SIGNAL = 0.56; EXPRESSED IN BONE MARROW, SIGNAL = 0.51; SWISSPROT HIT: P53566, EVALUE 4.50e-01; EST_HUMAN HIT: AU129668.1, EVALUE 9.00e-03
MGRGDPRCAFPTGLEMLPRPAREKPTMQSGAHCPSFSRGLCSPCITPAAQPGTSCLLGAASQTVKT

SEQ ID NO: 47378 - protein, 29 aa, Homo sapiens
  MAP TO AC019058.3; EXPRESSED IN PLACENTA, SIGNAL = 0.56; EXPRESSED IN ADULT LIVER, SIGNAL = 0.58
KTSEYHPNNNFKDILQQCDYSNSKTDKIK

SEQ ID NO: 47379 - protein, 27 aa, Homo sapiens
  MAP TO AC019058.3; EXPRESSED IN PLACENTA, SIGNAL = 0.56; EXPRESSED IN ADULT LIVER, SIGNAL = 0.58
KPVSTIQIIILKTFFNNVIILTPKQIK

SEQ ID NO: 47380 - protein, 26 aa, Homo sapiens
  MAP TO AL161722.2; EXPRESSED IN ADULT LIVER, SIGNAL = 0.57; EXPRESSED IN FETAL LIVER, SIGNAL = 0.59; EXPRESSED IN PLACENTA, SIGNAL = 0.56; EXPRESSED IN BONE MARROW, SIGNAL = 0.43
VDGNKHFFWMVIVLVEEYTAENIFKE

SEQ ID NO: 47381 - protein, 78 aa, Homo sapiens
  MAP TO AC019214.2; EXPRESSED IN ADULT LIVER, SIGNAL = 0.55; EXPRESSED IN PLACENTA, SIGNAL = 0.51; EXPRESSED IN BONE MARROW, SIGNAL = 0.47; EST_HUMAN HIT: AA155882.1, EVALUE 2.00e-26; SWISSPROT HIT: Q09811, EVALUE 1.00e-09
HDYSSKGHSASPPSHAACPFGSYRFVAHWNIAKSMAGYYQESGRAGRDGKPSWCRLYYSRNDRDQVSFLIRKEVAKLQ

SEQ ID NO: 47382 - protein, 54 aa, Homo sapiens
  MAP TO AC019083.5; EXPRESSED IN PLACENTA, SIGNAL = 0.5; EXPRESSED IN ADULT LIVER, SIGNAL = 0.54; EXPRESSED IN BONE MARROW, SIGNAL = 0.48
IKKYIAYLKQVQVAMETDSLVKRKEILEIKDIKDKIKIKKIKQNLEHNVEMREL

SEQ ID NO: 47383 - protein, 29 aa, Homo sapiens
  MAP TO AC007989.2; EXPRESSED IN PLACENTA, SIGNAL = 0.64; EXPRESSED IN ADULT LIVER, SIGNAL = 0.67; EXPRESSED IN BONE MARROW, SIGNAL = 0.7; EST_HUMAN HIT: AA442271.1, EVALUE 2.00e-11
WCGKHHENTVFDGDNYSESTRLIKPQQIS

SEQ ID NO: 47384 - protein, 21 aa, Homo sapiens
  MAP TO AC007989.2; EXPRESSED IN PLACENTA, SIGNAL = 0.64; EXPRESSED IN ADULT LIVER, SIGNAL = 0.67; EXPRESSED IN BONE MARROW, SIGNAL = 0.7; EST_HUMAN HIT: AA442271.1, EVALUE 4.00e-04
GVGSIMRTRSLMGIITLNLPG

SEQ ID NO: 47385 - protein, 35 aa, Homo sapiens
  MAP TO AC021973.2; EXPRESSED IN PLACENTA, SIGNAL = 1.5; EXPRESSED IN FETAL LIVER, SIGNAL = 0.71; EXPRESSED IN LUNG, SIGNAL = 1.3; EXPRESSED IN ADULT LIVER, SIGNAL = 0.66; SWISSPROT HIT: P32958, EVALUE 4.90e+00; EST_HUMAN HIT: BF530568.1, EVALUE 3.30e+00
GFQLLCSGILPAGLSHLSLIAPNPALCLLPQQEAA

SEQ ID NO: 47386 - protein, 30 aa, Homo sapiens
  MAP TO AC021973.2; EXPRESSED IN PLACENTA, SIGNAL = 1.5; EXPRESSED IN FETAL LIVER, SIGNAL = 0.71; EXPRESSED IN LUNG, SIGNAL = 1.3; EXPRESSED IN ADULT LIVER, SIGNAL = 0.66; EST_HUMAN HIT: C17917.1, EVALUE 5.90e+00
CCLLLWQQTQGWVGSNQRQMGKTCWKNPGT

SEQ ID NO: 47387 - protein, 43 aa, Homo sapiens
  MAP TO AC025516.2; EXPRESSED IN ADULT LIVER, SIGNAL = 0.72; EXPRESSED IN PLACENTA, SIGNAL = 0.74; EXPRESSED IN BONE MARROW, SIGNAL = 0.58; SWISSPROT HIT: Q9WUQ1, EVALUE 3.70e-02; EST_HUMAN HIT: BE709216.1, EVALUE 2.00e-04
CSVTCGIGIMKRQVKCITKHGLSSDLCLNHLKPGAQKKCYAND

SEQ ID NO: 47388 - protein, 100 aa, Homo sapiens
  MAP TO AC015493.4; EXPRESSED IN PLACENTA, SIGNAL = 0.46; EXPRESSED IN ADULT LIVER, SIGNAL = 0.53; EXPRESSED IN FETAL LIVER, SIGNAL = 0.49; SWISSPROT HIT: P80394, EVALUE 1.30e-02; EST_HUMAN HIT: AL048863.1, EVALUE 3.00e-03
WQRCCPQLCSCLCCKFIFTSERNCTCFPCPYKDERNCQFCHCTCSESPNCHWCCCSWANDPNCKCCCTASSNLNCYYYESRCCRNTIITFHKGRLRSIHT

SEQ ID NO: 47389 - protein, 80 aa, Homo sapiens
  MAP TO AC015493.4; EXPRESSED IN PLACENTA, SIGNAL = 0.46; EXPRESSED IN ADULT LIVER, SIGNAL = 0.53; EXPRESSED IN FETAL LIVER, SIGNAL = 0.49; SWISSPROT HIT: O02607, EVALUE 6.50e-01; EST_HUMAN HIT: BF130334.1, EVALUE 5.70e-01
SGTAPASPALTKMSGTASSATAPVLRAPTAIGVAALGPMIPTVSAAAQPAAISTATTMRAAAAAIPSSLSTRAASGASIP

SEQ ID NO: 47390 - protein, 23 aa, Homo sapiens
  MAP TO AC025011.2; EXPRESSED IN ADULT LIVER, SIGNAL = 0.52
LKNCHMQLTSLFLIKGKKNSRGI

SEQ ID NO: 47391 - protein, 75 aa, Homo sapiens
  MAP TO AL034344.24; EXPRESSED IN PLACENTA, SIGNAL = 0.53; EXPRESSED IN ADULT LIVER, SIGNAL = 0.6; EXPRESSED IN BONE MARROW, SIGNAL = 0.43; EXPRESSED IN FETAL LIVER, SIGNAL = 0.55; SWISSPROT HIT: O84796, EVALUE 3.40e+00; EST_HUMAN HIT: BF690776.1, EVALUE 9.40e-01
GEPGWNNRVFIGNSEAVPTLQGASARPVLRVGTEDAENGSIGCTRGPALWALSSSHGPLPGRQSYLCCCIHERPF

SEQ ID NO: 47392 - protein, 51 aa, Homo sapiens
  MAP TO AL034344.24; EXPRESSED IN PLACENTA, SIGNAL = 0.53; EXPRESSED IN ADULT LIVER, SIGNAL = 0.6; EXPRESSED IN BONE MARROW, SIGNAL = 0.43; EXPRESSED IN FETAL LIVER, SIGNAL = 0.55; EST_HUMAN HIT: R78219.1, EVALUE 1.50e-01; SWISSPROT HIT: Q01098, EVALUE 5.40e-01
ENLAGTTGCSSGIQRLCRPSREPVPDLSSGWGLRMQRMAQSAAREALPCGR

SEQ ID NO: 47393 - protein, 43 aa, Homo sapiens
  MAP TO AC015493.4; EXPRESSED IN ADULT LIVER, SIGNAL = 0.55; EXPRESSED IN PLACENTA, SIGNAL = 0.5; SWISSPROT HIT: P53935, EVALUE 1.20e+00
LSDFSLTLPQPHPTLPISTTHLPTPGDNNNMFGPNSERSVIQE

SEQ ID NO: 47394 - protein, 38 aa, Homo sapiens
  MAP TO AC025129.2; EXPRESSED IN PLACENTA, SIGNAL = 0.48; EXPRESSED IN ADULT LIVER, SIGNAL = 0.54
LIAMTGTHTSLPGGLGASSMCLRFGCCCRRAAPCRMCL

SEQ ID NO: 47395 - protein, 36 aa, Homo sapiens
  MAP TO AC013618.3; EXPRESSED IN PLACENTA, SIGNAL = 0.59; EXPRESSED IN BONE MARROW, SIGNAL = 0.48; EXPRESSED IN ADULT LIVER, SIGNAL = 0.66; EXPRESSED IN FETAL LIVER, SIGNAL = 0.54; EST_HUMAN HIT: AA323406.1, EVALUE 3.00e-05
MTFISFSCMIAVVETSTTMLNRNGDIRHTFIVSDLR

SEQ ID NO: 47396 - protein, 47 aa, Homo sapiens
  MAP TO AC011255.3; EXPRESSED IN PLACENTA, SIGNAL = 0.55; EXPRESSED IN ADULT LIVER, SIGNAL = 0.55; EST_HUMAN HIT: AA346639.1, EVALUE 7.80e-01
GHPQPQNTNTLSLSLMIALPVPNCCWEKCLGAGSTVIPTVSIRLMKK

SEQ ID NO: 47397 - protein, 64 aa, Homo sapiens
  MAP TO AC019083.5; EXPRESSED IN ADULT LIVER, SIGNAL = 0.56; EXPRESSED IN FETAL LIVER, SIGNAL = 0.54; EXPRESSED IN BONE MARROW, SIGNAL = 0.53; SWISSPROT HIT: P29775, EVALUE 2.00e-13; EST_HUMAN HIT: AI991109.1, EVALUE 2.00e-32
PRGTHLWEFIRDILLNPDKNPGLIKWEDRSEGVFRFLKSEAVAQLWGKKKNNSSMTYEKLSRAM

SEQ ID NO: 47398 - protein, 18 aa, Homo sapiens
  MAP TO AC015873.2; EXPRESSED IN BONE MARROW, SIGNAL = 0.46; EXPRESSED IN ADULT LIVER, SIGNAL = 0.58; EXPRESSED IN PLACENTA, SIGNAL = 0.53; EST_HUMAN HIT: AW665550.1, EVALUE 4.00e-03
PQMLQVHRQAGPDPLHPL

SEQ ID NO: 47399 - protein, 17 aa, Homo sapiens
  MAP TO AC015873.2; EXPRESSED IN BONE MARROW, SIGNAL = 0.46; EXPRESSED IN ADULT LIVER, SIGNAL = 0.58; EXPRESSED IN PLACENTA, SIGNAL = 0.53
LPTGSLGMGSRPSISSG

SEQ ID NO: 47400 - protein, 61 aa, Homo sapiens
  MAP TO AC021308.3; EXPRESSED IN ADULT LIVER, SIGNAL = 0.55; EXPRESSED IN BONE MARROW, SIGNAL = 0.43; SWISSPROT HIT: Q10473, EVALUE 2.00e-12; EST_HUMAN HIT: BF359679.1, EVALUE 3.00e-22
HLKDKLEEYMARFSKVRIVRTKKREGLIRTRLLGASMARGEVLTFLDSHCEVNVNWLPPLL

SEQ ID NO: 47401 - protein, 34 aa, Homo sapiens
  MAP TO AC018525.4; EXPRESSED IN PLACENTA, SIGNAL = 0.73; EXPRESSED IN ADULT LIVER, SIGNAL = 0.62; EXPRESSED IN FETAL LIVER, SIGNAL = 0.48; EXPRESSED IN BONE MARROW, SIGNAL = 0.66
PCQKAPRMMQVCISLIREKRIQNGFGETPWEWSV

SEQ ID NO: 47402 - protein, 45 aa, Homo sapiens
  MAP TO AC022609.2; EXPRESSED IN PLACENTA, SIGNAL = 0.54; EXPRESSED IN ADULT LIVER, SIGNAL = 0.51; EXPRESSED IN BONE MARROW, SIGNAL = 0.47; EST_HUMAN HIT: AA449911.1, EVALUE 9.00e+00
ETFLAIKSKRLCSFYYFSDSTFLRNTSPCEMTINIFTAMSKDLKR

SEQ ID NO: 47403 - protein, 23 aa, Homo sapiens
  MAP TO AC022609.2; EXPRESSED IN PLACENTA, SIGNAL = 0.54; EXPRESSED IN ADULT LIVER, SIGNAL = 0.51; EXPRESSED IN BONE MARROW, SIGNAL = 0.47
MKPSWLSNPNASAVSITSVILPS

SEQ ID NO: 47404 - protein, 19 aa, Homo sapiens
  MAP TO AC018377.4; EXPRESSED IN PLACENTA, SIGNAL = 0.51; EXPRESSED IN FETAL LIVER, SIGNAL = 0.49; EXPRESSED IN BONE MARROW, SIGNAL = 0.48; EXPRESSED IN ADULT LIVER, SIGNAL = 0.53
IYRRSWRRRRKWGGRGELG

SEQ ID NO: 47405 - protein, 60 aa, Homo sapiens [sequence omitted]

SEQ ID NO: 47406 - protein, 26 aa, Homo sapiens
  MAP TO AC016786.4; EXPRESSED IN ADULT LIVER, SIGNAL = 0.62; EXPRESSED IN PLACENTA, SIGNAL = 0.73
VTSLGVRGRRPWKNVNIMSMKRRSTN

SEQ ID NO: 47407 - protein, 34 aa, Homo sapiens
  MAP TO AL161634.1; EXPRESSED IN FETAL LIVER, SIGNAL = 0.57; EXPRESSED IN PLACENTA, SIGNAL = 0.52; EXPRESSED IN ADULT LIVER, SIGNAL = 0.57; EXPRESSED IN BONE MARROW, SIGNAL = 0.51
ARKMSMKPEHLEVKSIAVRCTAFSSSSPSDSATA

SEQ ID NO: 47408 - protein, 20 aa, Homo sapiens
  MAP TO AL161634.1; EXPRESSED IN FETAL LIVER, SIGNAL = 0.57; EXPRESSED IN PLACENTA, SIGNAL = 0.52; EXPRESSED IN ADULT LIVER, SIGNAL = 0.57; EXPRESSED IN BONE MARROW, SIGNAL = 0.51
QWLNLMGMRRKTLCNAPLYS

SEQ ID NO: 47409 - protein, 33 aa, Homo sapiens
  MAP TO AP001421.1; EXPRESSED IN PLACENTA, SIGNAL = 0.48; EXPRESSED IN FETAL LIVER, SIGNAL =   1; EXPRESSED IN BONE MARROW, SIGNAL = 0.47; EXPRESSED IN ADULT LIVER, SIGNAL = 0.6
LSRSHTKTFSWMVPVAAVTTRSRVRGETNLISI

SEQ ID NO: 47410 - protein, 31 aa, Homo sapiens
  MAP TO AC019281.4; EXPRESSED IN ADULT LIVER, SIGNAL = 0.57
PLRVCGDYIIEDISIDAVMFSFSIWEECVCV

SEQ ID NO: 47411 - protein, 18 aa, Homo sapiens
  MAP TO AC019281.4; EXPRESSED IN ADULT LIVER, SIGNAL = 0.57
ILLEFVGTTSLKIFPLMQ

SEQ ID NO: 47412 - protein, 44 aa, Homo sapiens
  MAP TO AC022939.2; EXPRESSED IN BONE MARROW, SIGNAL = 0.5; EXPRESSED IN ADULT LIVER, SIGNAL = 0.54; EXPRESSED IN FETAL LIVER, SIGNAL = 0.5; EST_HUMAN HIT: BF333194.1, EVALUE 2.00e-19; SWISSPROT HIT: Q10212, EVALUE 3.70e+00
DALNKMKDVYEKNPQMGDPGSLQPKLAETMNNIDRLRMEIHKNE

SEQ ID NO: 47413 - protein, 33 aa, Homo sapiens
  MAP TO AC025498.2; EXPRESSED IN PLACENTA, SIGNAL = 0.48; EXPRESSED IN ADULT LIVER, SIGNAL = 0.57; EXPRESSED IN BONE MARROW, SIGNAL = 0.53
GHDDSISCQHCSRLSSDNAWGILFLPSWVIKSH

SEQ ID NO: 47414 - protein, 46 aa, Homo sapiens
  MAP TO AC025498.2; EXPRESSED IN PLACENTA, SIGNAL = 0.48; EXPRESSED IN ADULT LIVER, SIGNAL = 0.57; EXPRESSED IN BONE MARROW, SIGNAL = 0.53; EST_HUMAN HIT: BF223779.1, EVALUE 9.00e+00
LGRKRMPQALSLLSLEQCWQLMLSSWPAVKNQANKQNPTSGLLLLN

SEQ ID NO: 47415 - protein, 26 aa, Homo sapiens
  MAP TO AL031661.28; EXPRESSED IN PLACENTA, SIGNAL = 0.51; EXPRESSED IN ADULT LIVER, SIGNAL = 0.56; EXPRESSED IN BONE MARROW, SIGNAL = 0.44
KAVSSKTRFQILVFLVPKFMLLTMRQ

SEQ ID NO: 47416 - protein, 58 aa, Homo sapiens
  MAP TO AL161756.1; EXPRESSED IN ADULT LIVER, SIGNAL = 0.65; EXPRESSED IN BONE MARROW, SIGNAL = 0.47; EST_HUMAN HIT: W26468.1, EVALUE 1.00e-26; SWISSPROT HIT: Q08142, EVALUE 1.60e+00
RQIHERLTQLELINKQYRRLARENRTDTASRLKQMVHEGNQRWDNLQRRVTAVLRRLR

SEQ ID NO: 47417 - protein, 31 aa, Homo sapiens
  MAP TO AL161756.1; EXPRESSED IN ADULT LIVER, SIGNAL = 0.65; EXPRESSED IN BONE MARROW, SIGNAL = 0.47; EST_HUMAN HIT: AL046592.1, EVALUE 1.20e+00
GRFMSGSLSWSSSTSSTGGWPGRTAQTRPAG

SEQ ID NO: 47418 - protein, 47 aa, Homo sapiens
  MAP TO AL139824.7; EXPRESSED IN ADULT LIVER, SIGNAL = 0.52
TRQEGLLSSPLFNILLEILVILMLMTILTTKTNKMCMEEVKICLLAN

SEQ ID NO: 47419 - protein, 33 aa, Homo sapiens
  MAP TO AL121881.25; EXPRESSED IN ADULT LIVER, SIGNAL = 0.59; EXPRESSED IN PLACENTA, SIGNAL = 0.48; EST_HUMAN HIT: AI908256.1, EVALUE 8.00e-08; SWISSPROT HIT: Q60037, EVALUE 8.50e+00
DHGHFTDNYPKTSTDGIAPTVNPKNSPSPRQQE

SEQ ID NO: 47420 - protein, 32 aa, Homo sapiens
  MAP TO AL121881.25; EXPRESSED IN ADULT LIVER, SIGNAL = 0.59; EXPRESSED IN PLACENTA, SIGNAL = 0.48; EST_HUMAN HIT: AI908256.1, EVALUE 1.00e-03
ITAISQTTTQKHLQTALLLLSTQKTLRPLVSR

SEQ ID NO: 47421 - protein, 35 aa, Homo sapiens
  MAP TO AC020693.3; EXPRESSED IN ADULT LIVER, SIGNAL = 0.65; EXPRESSED IN PLACENTA, SIGNAL = 0.51; EXPRESSED IN FETAL LIVER, SIGNAL = 0.48; SWISSPROT HIT: Q04605, EVALUE 6.40e+00
ENQEKKYKNLTHFSTPQTKAGKVVLQAVLTISNDQ

SEQ ID NO: 47422 - protein, 22 aa, Homo sapiens
  MAP TO AC020693.3; EXPRESSED IN ADULT LIVER, SIGNAL = 0.65; EXPRESSED IN PLACENTA, SIGNAL = 0.51; EXPRESSED IN FETAL LIVER, SIGNAL = 0.48
KIRKKSIKILLIFPHHRLRLAK

SEQ ID NO: 47423 - protein, 54 aa, Homo sapiens
  MAP TO AC008269.3; EXPRESSED IN BONE MARROW, SIGNAL = 0.47; EXPRESSED IN ADULT LIVER, SIGNAL = 0.51; EST_HUMAN HIT: BE278424.1, EVALUE 4.00e-24; SWISSPROT HIT: Q08662, EVALUE 1.20e+00
QFVEVMASALTGYLHTISSENLLDAVYSFCLMNYFPLAPFNQLLQKDIISELLT

SEQ ID NO: 47424 - protein, 59 aa, Homo sapiens
  MAP TO AL157836.3; EXPRESSED IN PLACENTA, SIGNAL = 0.51; EXPRESSED IN ADULT LIVER, SIGNAL = 0.53; EXPRESSED IN FETAL LIVER, SIGNAL = 0.52; EST_HUMAN HIT: BE561004.1, EVALUE 9.20e-01; SWISSPROT HIT: P14837, EVALUE 3.50e+00
ITFMGHKVATDDVLGIAALPQCHHQLLVSSIWLSTPFDFPPVSHFVLPSLYHSQHHHTL

SEQ ID NO: 47425 - protein, 41 aa, Homo sapiens
  MAP TO AL157836.3; EXPRESSED IN PLACENTA, SIGNAL = 0.51; EXPRESSED IN ADULT LIVER, SIGNAL = 0.53; EXPRESSED IN FETAL LIVER, SIGNAL = 0.52; SWISSPROT HIT: Q62668, EVALUE 8.30e+00
SPLWATRLLQMMCLALLRYHSATTSFWSAAFGFPPLLTSLL

SEQ ID NO: 47426 - protein, 32 aa, Homo sapiens
  MAP TO AC012629.4; EXPRESSED IN PLACENTA, SIGNAL = 0.55; EXPRESSED IN FETAL LIVER, SIGNAL = 0.52; EXPRESSED IN ADULT LIVER, SIGNAL = 0.54; EXPRESSED IN BONE MARROW, SIGNAL = 0.48
RGSSAPRSSRPSSPWTQLGFCWQVIGGRAVGQ

SEQ ID NO: 47427 - protein, 96 aa, Homo sapiens
  MAP TO AL121579.2; EXPRESSED IN ADULT LIVER, SIGNAL = 0.65; EXPRESSED IN PLACENTA, SIGNAL = 0.45; SWISSPROT HIT: P32019, EVALUE 3.00e-01; EST_HUMAN HIT: R17806.1, EVALUE 1.00e-25
PMMMSAVPSATSLNKAFSINKETQPGQAGLMQTERPGVSTPTESGVPSAEEVFGSSQPERISPESGLAKAMLTIAITATPSLTVDEKEELLTSTNF

SEQ ID NO: 47428 - protein, 38 aa, Homo sapiens
  MAP TO AC022174.2; EXPRESSED IN ADULT LIVER, SIGNAL = 0.58
DVFKNDNISGNIISDSSSDDVCGSHSCRSTQHINCFYH

SEQ ID NO: 47429 - protein, 19 aa, Homo sapiens
  MAP TO AC022174.2; EXPRESSED IN ADULT LIVER, SIGNAL = 0.58
MSLKMIILVAISLVIAVVM

SEQ ID NO: 47430 - protein, 70 aa, Homo sapiens
  MAP TO AC010829.5; EXPRESSED IN PLACENTA, SIGNAL = 0.64; EXPRESSED IN ADULT LIVER, SIGNAL = 0.61; EXPRESSED IN FETAL LIVER, SIGNAL = 0.55; EXPRESSED IN BONE MARROW, SIGNAL = 0.51; EST_HUMAN HIT: BF541808.1, EVALUE 7.20e+00; SWISSPROT HIT: P42713, EVALUE 9.50e+00
NKAFSKSADGMAARSLAIGMINPNPFKNLLLQRQITVSSMIGTQVIGWPPLDMVPRWMLVDINASFLNPQ

SEQ ID NO: 47431 - protein, 35 aa, Homo sapiens
  MAP TO AC019342.4; EXPRESSED IN PLACENTA, SIGNAL = 0.51; EXPRESSED IN ADULT LIVER, SIGNAL = 0.53; EXPRESSED IN BONE MARROW, SIGNAL = 0.44
DVLEYRRPLTPRKLHRYGRPLKLGRFTSHHLAIMH

SEQ ID NO: 47432 - protein, 20 aa, Homo sapiens
  MAP TO AC019342.4; EXPRESSED IN PLACENTA, SIGNAL = 0.51; EXPRESSED IN ADULT LIVER, SIGNAL = 0.53; EXPRESSED IN BONE MARROW, SIGNAL = 0.44
CMIARWWEVNLPSFRGLPYR

SEQ ID NO: 47433 - protein, 20 aa, Homo sapiens
  MAP TO AC011957.2; EXPRESSED IN ADULT LIVER, SIGNAL = 0.54; SWISSPROT HIT: Q64127, EVALUE 3.00e+00
WTPVSCASISHCSPSFWSQN

SEQ ID NO: 47434 - protein, 35 aa, Homo sapiens
  MAP TO AL139825.9; EXPRESSED IN PLACENTA, SIGNAL = 0.48; EXPRESSED IN FETAL LIVER, SIGNAL = 0.47; EXPRESSED IN BONE MARROW, SIGNAL = 0.44; EXPRESSED IN ADULT LIVER, SIGNAL = 0.52
VYSIMMLAWFIIQALGNKDKVQLILHWRLILTNVF

SEQ ID NO: 47435 - protein, 33 aa, Homo sapiens
  MAP TO AL158012.2; EXPRESSED IN PLACENTA, SIGNAL = 0.83; EXPRESSED IN ADULT LIVER, SIGNAL = 0.62; EST_HUMAN HIT: BE062167.1, EVALUE 7.00e-09
MALTKMLRVVWIIKSRLRWSQMEMRNLLGTGTK

SEQ ID NO: 47436 - protein, 31 aa, Homo sapiens
  MAP TO AL138702.3; EXPRESSED IN ADULT LIVER, SIGNAL = 0.57; EXPRESSED IN FETAL LIVER, SIGNAL = 0.49; EXPRESSED IN BONE MARROW, SIGNAL = 0.45; EST_HUMAN HIT: BF695782.1, EVALUE 2.60e+00; SWISSPROT HIT: P24413, EVALUE 5.00e+00
CAKRCCCSSDHIRCDSCCHESYSRAGGNFKQ

SEQ ID NO: 47437 - protein, 43 aa, Homo sapiens
  MAP TO AL157377.1; EXPRESSED IN PLACENTA, SIGNAL = 0.45; EXPRESSED IN FETAL LIVER, SIGNAL = 0.49; EXPRESSED IN ADULT LIVER, SIGNAL = 0.53; EST_HUMAN HIT: AV752481.1, EVALUE 2.40e+00; SWISSPROT HIT: P06802, EVALUE 3.70e-02
MDQTYCNKMEYMTDYFPRINFFYMYEGPAPRIRAHNIPHDFFS

SEQ ID NO: 47438 - protein, 24 aa, Homo sapiens
  MAP TO AC018516.3; EXPRESSED IN BONE MARROW, SIGNAL = 0.49; EXPRESSED IN ADULT LIVER, SIGNAL = 0.74; EXPRESSED IN FETAL LIVER, SIGNAL = 0.48
KKEEEEEEEEEEEEEDPEKRKDSQ

SEQ ID NO: 47439 - protein, 25 aa, Homo sapiens
  MAP TO AC018516.3; EXPRESSED IN BONE MARROW, SIGNAL = 0.49; EXPRESSED IN ADULT LIVER, SIGNAL = 0.74; EXPRESSED IN FETAL LIVER, SIGNAL = 0.48
TKKKKKKKKKKKKKKKIQRREKIAN

SEQ ID NO: 47440 - protein, 37 aa, Homo sapiens
  MAP TO AL132857.3; EXPRESSED IN PLACENTA, SIGNAL = 0.51; EXPRESSED IN ADULT LIVER, SIGNAL = 0.52; EXPRESSED IN BONE MARROW, SIGNAL = 0.44; SWISSPROT HIT: P77891, EVALUE 4.90e+00
KCYNEDRFRKIPEIQNHKTGRVLRNYQIYSPTIFCIR

SEQ ID NO: 47441 - protein, 20 aa, Homo sapiens
  MAP TO AC018425.3; EXPRESSED IN PLACENTA, SIGNAL = 0.61; EXPRESSED IN ADULT LIVER, SIGNAL = 1.1
LDMHKCGVSKEQEVDMEDEV

SEQ ID NO: 47442 - protein, 18 aa, Homo sapiens
  MAP TO AC018425.3; EXPRESSED IN PLACENTA, SIGNAL = 0.61; EXPRESSED IN ADULT LIVER, SIGNAL = 1.1
CQRPTFYTCTCTHLCLST

SEQ ID NO: 47443 - protein, 60 aa, Homo sapiens
  MAP TO AC012241.4; EXPRESSED IN ADULT LIVER, SIGNAL = 0.71; EXPRESSED IN PLACENTA, SIGNAL = 0.5; EXPRESSED IN FETAL LIVER, SIGNAL = 0.5; EST_HUMAN HIT: BF334662.1, EVALUE 6.00e-09
LVAVFDEQDPHHGGDGTSASSTGTQSPEIFGSELGTNNVSAFQPYQATSEIEVTPSVLRA

SEQ ID NO: 47444 - protein, 96 aa, Homo sapiens [sequence omitted]

SEQ ID NO: 47445 - protein, 32 aa, Homo sapiens
  MAP TO AC008739.5; EXPRESSED IN PLACENTA, SIGNAL = 4.4; EXPRESSED IN FETAL LIVER, SIGNAL = 5.2; EXPRESSED IN BONE MARROW, SIGNAL = 0.56; EXPRESSED IN LUNG, SIGNAL = 1.9; EXPRESSED IN ADULT LIVER, SIGNAL = 1.4; EXPRESSED IN HELA, SIGNAL = 4.5; EST_HUMAN HIT: BE741375.1, EVALUE 2.00e-04
WSRSTGSCCTWSQSWYRPWQRGSTRPRSTRPR

SEQ ID NO: 47446 - protein, 58 aa, Homo sapiens
  MAP TO AC018516.3; EXPRESSED IN ADULT LIVER, SIGNAL = 0.78; EXPRESSED IN BONE MARROW, SIGNAL = 0.54; EXPRESSED IN PLACENTA, SIGNAL = 0.57; EXPRESSED IN FETAL LIVER, SIGNAL = 0.46; EST_HUMAN HIT: BE895845.1, EVALUE 8.00e-15
IDHWNNEKERILLVTDKTLLICKYDFIMLSCVQLQRIPLSAVYRICLGKFTFPGMSLD

SEQ ID NO: 47447 - protein, 77 aa, Homo sapiens
  MAP TO AL118505.13; EXPRESSED IN PLACENTA, SIGNAL = 0.52; EXPRESSED IN ADULT LIVER, SIGNAL = 0.6; EXPRESSED IN BONE MARROW, SIGNAL = 0.48; EST_HUMAN HIT: AW205438.1, EVALUE 6.00e-34
ISQDWSDFALWWEQKHCWLLKTHWTLDKYGVQADAKLLFTPQHKMLRLRLPNLKMVRLRVSFSAVVFKAVSDICKIL

SEQ ID NO: 47448 - protein, 20 aa, Homo sapiens
  MAP TO AL118505.13; EXPRESSED IN PLACENTA, SIGNAL = 0.52; EXPRESSED IN ADULT LIVER, SIGNAL = 0.6; EXPRESSED IN BONE MARROW, SIGNAL = 0.48; EST_HUMAN HIT: AI799778.1, EVALUE 2.00e-04
IYPKTGQTLLFGGNRSIAGF

SEQ ID NO: 47449 - protein, 87 aa, Homo sapiens
  MAP TO AL133414.3; EXPRESSED IN BONE MARROW, SIGNAL = 0.44; EXPRESSED IN PLACENTA, SIGNAL = 0.52; EXPRESSED IN ADULT LIVER, SIGNAL = 0.61; EXPRESSED IN FETAL LIVER, SIGNAL = 1.2; EST_HUMAN HIT: AW951147.1, EVALUE 2.00e-35; SWISSPROT HIT: P43631, EVALUE 4.00e-48
PLVKSEETVILQCWSDVRFEHFLLHREGKYKDTLHLIGEHHDGVSKANFSIGPMMQDLAGTYRCYGSVTHSPYQLSAPSDPLDIVIT

SEQ ID NO: 47450 - protein, 45 aa, Homo sapiens
  MAP TO AL138811.1; EXPRESSED IN ADULT LIVER, SIGNAL = 0.59; SWISSPROT HIT: O75330, EVALUE 1.60e-02
AEELNGEINKIKNELSSLKETHIKLQEHYNKLCNQKTFEEDKKFQ

SEQ ID NO: 47451 - protein, 44 aa, Homo sapiens
  MAP TO AL138811.1; EXPRESSED IN ADULT LIVER, SIGNAL = 0.59; SWISSPROT HIT: P57546, EVALUE 6.30e+00
LKNLMEKLIRLKMNYHPLKKLILSYKNIITNYAIKKHLRKTKSF

SEQ ID NO: 47452 - protein, 18 aa, Homo sapiens
  MAP TO AL121881.25; EXPRESSED IN ADULT LIVER, SIGNAL = 0.51
WQSLVKKRKTLYATVVLQ

SEQ ID NO: 47453 - protein, 25 aa, Homo sapiens
  MAP TO AL139186.3; EXPRESSED IN ADULT LIVER, SIGNAL = 0.53
MAFINLKNIAFNAKMAKNKINVQPN

SEQ ID NO: 47454 - protein, 51 aa, Homo sapiens
  MAP TO AL133173.13; EXPRESSED IN ADULT LIVER, SIGNAL = 0.52; EST_HUMAN HIT: AI654903.1, EVALUE 5.00e-21
PLALETARVSAPHLEPYAKDVMSVAFLAISITAPNGALLMGILGPKMLTRH

SEQ ID NO: 47455 - protein, 49 aa, Homo sapiens
  MAP TO AC007989.2; EXPRESSED IN ADULT LIVER, SIGNAL = 0.59; SWISSPROT HIT: P35017, EVALUE 7.10e-01; EST_HUMAN HIT: AI689841.1, EVALUE 8.70e+00
NVFLGQINTGLQLHFLTTIPYSYVSILPATFMKIISFHHLLDIIIPILK

SEQ ID NO: 47456 - protein, 56 aa, Homo sapiens
  MAP TO AC012571.3; EXPRESSED IN ADULT LIVER, SIGNAL = 0.55; EXPRESSED IN FETAL LIVER, SIGNAL = 0.46; EXPRESSED IN BONE MARROW, SIGNAL = 0.48; SWISSPROT HIT: P55387, EVALUE 3.50e+00
IICILQINKLRLQYVMPGHITCECRGILSETVQAFSTIHATSIRRVGEAAVTKLLK

SEQ ID NO: 47457 - protein, 54 aa, Homo sapiens
  MAP TO AC015999.3; EXPRESSED IN ADULT LIVER, SIGNAL = 0.57; EXPRESSED IN BONE MARROW, SIGNAL = 0.45; EXPRESSED IN PLACENTA, SIGNAL = 0.53; SWISSPROT HIT: O42574, EVALUE 4.60e+00; EST_HUMAN HIT: AW273820.1, EVALUE 3.00e-20
VKTINEKLTIGKISKYWSGFVNDVFTNADNFGIHVPADLDVTVKAAMIGACFLF

SEQ ID NO: 47458 - protein, 28 aa, Homo sapiens
  MAP TO AC013396.4; EXPRESSED IN ADULT LIVER, SIGNAL = 0.94; EXPRESSED IN PLACENTA, SIGNAL = 0.55; EXPRESSED IN FETAL LIVER, SIGNAL = 0.6; EXPRESSED IN BONE MARROW, SIGNAL = 0.48; EST_HUMAN HIT: AW630080.1, EVALUE 8.00e-08; SWISSPROT HIT: P46952, EVALUE 7.00e-10
VPHSPQRFANTVGLVVERRRLETELDGL

SEQ ID NO: 47459 - protein, 24 aa, Homo sapiens
  MAP TO AC013396.4; EXPRESSED IN ADULT LIVER, SIGNAL = 0.94; EXPRESSED IN PLACENTA, SIGNAL = 0.55; EXPRESSED IN FETAL LIVER, SIGNAL = 0.6; EXPRESSED IN BONE MARROW, SIGNAL = 0.48; SWISSPROT HIT: P51760, EVALUE 5.10e+00; EST_HUMAN HIT: AW630080.1, EVALUE 2.00e-10
CPTHHRGLPTPWGWWLSEGGWRPS

SEQ ID NO: 47460 - protein, 26 aa, Homo sapiens
  MAP TO AC009467.3; EXPRESSED IN BONE MARROW, SIGNAL = 0.44; EXPRESSED IN ADULT LIVER, SIGNAL = 0.51; EST_HUMAN HIT: AV730743.1, EVALUE 1.00e-07
FLRDLEIPFLSWLTTNTSVSLICQSL

SEQ ID NO: 47461 - protein, 73 aa, Homo sapiens
  MAP TO AC019342.4; EXPRESSED IN ADULT LIVER, SIGNAL = 0.52; EXPRESSED IN BONE MARROW, SIGNAL = 0.7; SWISSPROT HIT: P34611, EVALUE 1.10e+00; EST_HUMAN HIT: BE544525.1, EVALUE 1.80e-01
HLLRLSTFSCCFAFRLFIFIPLVSSGITLSHSATRSVSLCPGLSCSGCTPASTVTSFGCSCRSILSRFLSWRC

SEQ ID NO: 47462 - protein, 33 aa, Homo sapiens
  MAP TO AL161743.2; EXPRESSED IN ADULT LIVER, SIGNAL = 0.54
RQCSYSSSSSSSSSPSPLPAPPSSPLLIIFGQV

SEQ ID NO: 47463 - protein, 52 aa, Homo sapiens
  MAP TO AL138828.4; EXPRESSED IN PLACENTA, SIGNAL = 1.5; EXPRESSED IN ADULT LIVER, SIGNAL = 1.5
MEMESLSCSMEMESLSCSMEMESLSCSMEMESLSCSMEMESLSCSMEMELVI

SEQ ID NO: 47464 - protein, 93 aa, Homo sapiens
  MAP TO AL160008.1; EXPRESSED IN ADULT LIVER, SIGNAL = 1.5; EXPRESSED IN LUNG, SIGNAL = 9.1; EXPRESSED IN PLACENTA, SIGNAL = 1.5; EST_HUMAN HIT: AI683358.1, EVALUE 4.00e-45; SWISSPROT HIT: P32456, EVALUE 6.00e-41
LESLVLTYINAISRGDLPCMENAVLALAQIENSAAVQKAIAHYDQQMGQKVQLPAETLQELLDLHRVSEREATEVYMKNSFKDVDHLFQKKLA

SEQ ID NO: 47465 - protein, 28 aa, Homo sapiens
  MAP TO AC023084.2; EXPRESSED IN ADULT LIVER, SIGNAL = 1.6; EXPRESSED IN FETAL LIVER, SIGNAL = 1.8; EXPRESSED IN PLACENTA, SIGNAL = 1.5; EXPRESSED IN HELA, SIGNAL = 1.9; EXPRESSED IN LUNG, SIGNAL = 2.3; SWISSPROT HIT: P46028, EVALUE 8.60e+00
PYTTSKAAEPPSSPCRSAMWCEYRRRVE

SEQ ID NO: 47466 - protein, 54 aa, Homo sapiens
  MAP TO AC022311.3; EXPRESSED IN ADULT LIVER, SIGNAL = 1.6; EST_HUMAN HIT: AA897511.1, EVALUE 2.00e-25
KLEHLKLAKRECHQQCIDLSCIQVYQLNGRGTRNYISRRKFTELKIFRLQKKRL

SEQ ID NO: 47467 - protein, 105 aa, Homo sapiens
  MAP TO AC002060.3; EXPRESSED IN ADULT LIVER, SIGNAL = 3.8; EXPRESSED IN BONE MARROW, SIGNAL = 1e+02; EXPRESSED IN FETAL LIVER, SIGNAL =   2; EXPRESSED IN LUNG, SIGNAL =  78; EST_HUMAN HIT: AI813613.1, EVALUE 8.00e-57; SWISSPROT HIT: P01842, EVALUE 6.00e-55
QPKANPTVTLFPPSSEELQANKATLVCLISDFYPGAVTVAWKADGSPVKAGVETTKPSKQSNNKYAASSYLSLTPEQWKSHRSYSCQVTHEGSTVEKTVAPTECS

SEQ ID NO: 47468 - protein, 56 aa, Homo sapiens
  MAP TO AC018553.2; EXPRESSED IN ADULT LIVER, SIGNAL = 1.6; EST_HUMAN HIT: BF362439.1, EVALUE 6.30e+00; SWISSPROT HIT: Q03055, EVALUE 6.00e+00
EHPAGPMNGPWAKMMFKKGTDHLDDKWASGRCQNFQAAGTINGHMEAAASVMAERV

SEQ ID NO: 47469 - protein, 80 aa, Homo sapiens; identical to SEQ ID NO: 46010
  MAP TO AC018505.3; EXPRESSED IN FETAL LIVER, SIGNAL = 1.6; EXPRESSED IN ADULT LIVER, SIGNAL = 2.5; EST_HUMAN HIT: AA485732.1, EVALUE 2.10e-01; SWISSPROT HIT: P90838, EVALUE 3.10e+00

SEQ ID NO: 47470 - protein, 101 aa, Homo sapiens
  MAP TO AC010322.4; EXPRESSED IN ADULT LIVER, SIGNAL =   4; EST_HUMAN HIT: BF116115.1, EVALUE 3.00e-20; SWISSPROT HIT: Q95156, EVALUE 1.00e-21
LLGNTVLLFLIRVDSRLHTPMYFLLSQLSLFDIGCPMVTIPKMASDFLRGEGATSYGGGAAQIFFLTLMGVAEGVLLVLMSYDRYVAVCQPLQYPVLMRRQ

SEQ ID NO: 47471 - protein, 30 aa, Homo sapiens
  MAP TO AL109925.11; EXPRESSED IN ADULT LIVER, SIGNAL = 1.7; SWISSPROT HIT: P36871, EVALUE 2.00e-10; EST_HUMAN HIT: BF125332.1, EVALUE 3.00e-09
GLRLIFTDGSRIVFRLSGTGSAGATIRLYI

SEQ ID NO: 47472 - protein, 55 aa, Homo sapiens
  MAP TO AL135787.3; EXPRESSED IN ADULT LIVER, SIGNAL = 4.8; EXPRESSED IN FETAL LIVER, SIGNAL = 3.4; EST_HUMAN HIT: AL036235.2, EVALUE 9.00e-25; SWISSPROT HIT: Q14914, EVALUE 1.00e-26
VVESKNVALPKGTIVLASPGWTTHSISDGKDLEKLLTEWPDTIPLSLALGTVGMP

SEQ ID NO: 47473 - protein, 34 aa, Homo sapiens
  MAP TO AL133454.2; EXPRESSED IN PLACENTA, SIGNAL = 1.4; EXPRESSED IN ADULT LIVER, SIGNAL = 1.5; EXPRESSED IN LUNG, SIGNAL = 1.6; EST_HUMAN HIT: AV647681.1, EVALUE 2.00e-05; SWISSPROT HIT: Q9Z1M4, EVALUE 1.00e-06
AVDWWSLGVLMYELLTGASPFTVDGEKNSQAEIS

SEQ ID NO: 47474 - protein, 46 aa, Homo sapiens
  MAP TO AC022325.3; EXPRESSED IN LUNG, SIGNAL = 8.1; EXPRESSED IN ADULT LIVER, SIGNAL = 1.4; EST_HUMAN HIT: AV681548.1, EVALUE 5.20e+00; SWISSPROT HIT: O76039, EVALUE 8.20e+00
MKNEKEIKQARKVTVRDVKMLKTKQTAFRNEKEINEPQKGGGRLWG

SEQ ID NO: 47475 - protein, 76 aa, Homo sapiens
  MAP TO AL132800.2; EXPRESSED IN PLACENTA, SIGNAL =   2; EXPRESSED IN LUNG, SIGNAL = 2.5; EXPRESSED IN ADULT LIVER, SIGNAL = 4.4; EST_HUMAN HIT: BE378178.1, EVALUE 3.00e-29
AQHPSRGFAEHGKQQQGREEEKGSGGIRKTRETERLRRQLLEVFWGQDHKVDFILQREPYCRDINQLSEALLSLNF

SEQ ID NO: 47476 - protein, 74 aa, Homo sapiens
  MAP TO AL121652.2; EXPRESSED IN PLACENTA, SIGNAL = 1.4; EXPRESSED IN BONE MARROW, SIGNAL = 2.8; EXPRESSED IN ADULT LIVER, SIGNAL =   2; EXPRESSED IN FETAL LIVER, SIGNAL =   2; EXPRESSED IN HELA, SIGNAL = 2.2; EXPRESSED IN LUNG, SIGNAL = 3.6; EST_HUMAN HIT: AU128506.1, EVALUE 4.00e-32; SWISSPROT HIT: P54819, EVALUE 2.00e-32
DMAPSVPAAEPEYPKGIQAVLLGPPGDGKGTQAPILAENFCVCHSATGDRLRAMVASGSELEKKLNATMDAGKL

SEQ ID NO: 47477 - protein, 19 aa, Homo sapiens
  MAP TO AL121652.2; EXPRESSED IN PLACENTA, SIGNAL = 1.4; EXPRESSED IN BONE MARROW, SIGNAL = 2.8; EXPRESSED IN ADULT LIVER, SIGNAL =   2; EXPRESSED IN FETAL LIVER, SIGNAL =   2; EXPRESSED IN HELA, SIGNAL = 2.2; EXPRESSED IN LUNG, SIGNAL = 3.6; EST_HUMAN HIT: BF241381.1, EVALUE 4.90e-02
YKDFSGHGSQRASGRTRVS

SEQ ID NO: 47478 - protein, 134 aa, Homo sapiens
  MAP TO AP001243.1; EXPRESSED IN ADULT LIVER, SIGNAL = 1.7; EXPRESSED IN BONE MARROW, SIGNAL =  75; EXPRESSED IN LUNG, SIGNAL =  37; SWISSPROT HIT: P04207, EVALUE 1.00e-51; EST_HUMAN HIT: AW407282.1, EVALUE 3.00e-52
TTGEIVMTQSPATLSVSPGERATLSCRASQSVSSNLAWYQQKPGQAPRLLIYGASTRATGIPARFSGSGSGTEFTLTISSLQSEDFAVYYCQQYNNWPPTVIQHETKTSRRPSVFTRLYQLLPLQTASVVATQF

SEQ ID NO: 47479 - protein, 62 aa, Homo sapiens
  MAP TO AC016950.8; EXPRESSED IN ADULT LIVER, SIGNAL = 4.3; SWISSPROT HIT: P28685, EVALUE 6.00e-13; EST_HUMAN HIT: AA382531.1, EVALUE 4.00e-04
PVPEELQNGEGFGYVVAFRPLGVTTWIQTVVTSPDTPRYVFRNESIVPYSPYEVKVGVYNNK

SEQ ID NO: 47480 - protein, 48 aa, Homo sapiens
  MAP TO AL157791.1; EXPRESSED IN FETAL LIVER, SIGNAL = 2.9; EXPRESSED IN LUNG, SIGNAL = 3.4; EXPRESSED IN ADULT LIVER, SIGNAL = 1.6; EST_HUMAN HIT: AW360934.1, EVALUE 6.00e-18; SWISSPROT HIT: P02954, EVALUE 4.70e+00
WSRWWTWEIPWWKIISRSSKHGSWRRWGERRSSSQEWASCIHWKQWTS

SEQ ID NO: 47481 - protein, 81 aa, Homo sapiens
  MAP TO AC007345.2; EXPRESSED IN ADULT LIVER, SIGNAL = 1.5; EXPRESSED IN BONE MARROW, SIGNAL = 2.3; SWISSPROT HIT: Q22516, EVALUE 4.00e-18; EST_HUMAN HIT: AU121677.1, EVALUE 2.00e-41
RNCILADEMGLGKTIQSITFLYEILLTGIRGPFLIIAPLSTIANWEREFRTWTDINVVVYHGSLISRQMIQQYEMYFRDSQ

SEQ ID NO: 47482 - protein, 37 aa, Homo sapiens
  MAP TO AL135792.3; EXPRESSED IN HELA, SIGNAL = 1.7; EXPRESSED IN ADULT LIVER, SIGNAL = 1.4; EXPRESSED IN FETAL LIVER, SIGNAL = 1.8; EXPRESSED IN PLACENTA, SIGNAL = 1.4; SWISSPROT HIT: P29716, EVALUE 1.30e+00
MVGGSNEETVISNWYKSVVGGMKYSIKTGFEERVNFE

SEQ ID NO: 47483 - protein, 47 aa, Homo sapiens
  MAP TO AC012568.3; EXPRESSED IN ADULT LIVER, SIGNAL = 1.5; EXPRESSED IN LUNG, SIGNAL = 3.1; SWISSPROT HIT: P42003, EVALUE 2.00e-19; EST_HUMAN HIT: AW967790.1, EVALUE 3.00e-21
CNLKIFNNQEFAALLAQSVNQGFEAVYQLTRMCTIRMSFVKGWGAEY

SEQ ID NO: 47484 - protein, 74 aa, Homo sapiens
  MAP TO AC007869.2; EXPRESSED IN FETAL LIVER, SIGNAL = 1.6; EXPRESSED IN PLACENTA, SIGNAL = 5.7; EXPRESSED IN ADULT LIVER, SIGNAL = 1.6; EXPRESSED IN HELA, SIGNAL = 1.7; EXPRESSED IN LUNG, SIGNAL = 2.5; EST_HUMAN HIT: AW836290.1, EVALUE 3.00e-23
VLVDGQPCDREAVAACQVGDPVRLEVRLTNRSPRSVGPFALTVVPFQDHQNGVHNYDLHDTVSFVGSSTFYLDA

SEQ ID NO: 47485 - protein, 98 aa, Homo sapiens
  MAP TO AC007869.2; EXPRESSED IN FETAL LIVER, SIGNAL = 1.6; EXPRESSED IN PLACENTA, SIGNAL = 5.7; EXPRESSED IN ADULT LIVER, SIGNAL = 1.6; EXPRESSED IN HELA, SIGNAL = 1.7; EXPRESSED IN LUNG, SIGNAL = 2.5; EST_HUMAN HIT: AI908636.1, EVALUE 4.00e-12
GGLPGGRPRAPGGAADQPEPAQRRALRPHCGPLPGPPERRAQLRPARHRLLRGLQHLLPRRGAWWCARRSGSLWPCGHHPPFPGWWALGSAYVQQTIA

SEQ ID NO: 47486 - protein, 26 aa, Homo sapiens
  MAP TO AL158845.1; EXPRESSED IN PLACENTA, SIGNAL = 2.1; EXPRESSED IN ADULT LIVER, SIGNAL = 3.3; EST_HUMAN HIT: W89148.1, EVALUE 2.70e+00
IHIRKLHRQNISALINLIPMLWSRER

SEQ ID NO: 47487 - protein, 26 aa, Homo sapiens
  MAP TO AC023820.2; EXPRESSED IN PLACENTA, SIGNAL = 1.8; EXPRESSED IN ADULT LIVER, SIGNAL = 1.6
SQCLQDRTLANLLITVSPVMTTVPAL

SEQ ID NO: 47488 - protein, 20 aa, Homo sapiens
  MAP TO AC023820.2; EXPRESSED IN PLACENTA, SIGNAL = 1.8; EXPRESSED IN ADULT LIVER, SIGNAL = 1.6
VLSAFRTGPWPTYLLRYLQL

SEQ ID NO: 47489 - protein, 111 aa, Homo sapiens
  MAP TO AC008962.4; EXPRESSED IN ADULT LIVER, SIGNAL =  14; EST_HUMAN HIT: AW602053.1, EVALUE 7.00e-25; SWISSPROT HIT: Q16696, EVALUE 3.00e-27
LYEMFSSVMKHLPGPQQQAFKELQGLEDFIAKKVEHNQCTLDPNSPRDFIDSFLIRMQGVHPSSQWEELQSQAEGNQAGSGEGRQHRPIQISPCHNNPHNPNYINHRCSIY

SEQ ID NO: 47490 - protein, 47 aa, Homo sapiens
  MAP TO AC010745.2; EXPRESSED IN ADULT LIVER, SIGNAL = 1.6; SWISSPROT HIT: Q9T1V8, EVALUE 3.60e+00
MKYASICRLVLGIQRMGFGPQTHSATYQLVGLDSHIPSGLVLIGHGS

SEQ ID NO: 47491 - protein, 54 aa, Homo sapiens
  MAP TO AC021881.2; EXPRESSED IN LUNG, SIGNAL = 1.8; EXPRESSED IN ADULT LIVER, SIGNAL = 1.4; EST_HUMAN HIT: BF573029.1, EVALUE 1.00e-03; SWISSPROT HIT: Q13206, EVALUE 4.00e-25
VQYLYRVFCRLRPGVSILALHGRQQQMRRMEVYNEFVRKRAAVLFATDIAARGL

SEQ ID NO: 47492 - protein, 26 aa, Homo sapiens
  MAP TO AC021881.2; EXPRESSED IN LUNG, SIGNAL = 1.8; EXPRESSED IN ADULT LIVER, SIGNAL = 1.4
SSICTECFAGYVLVFLSLHSMVDSSK

SEQ ID NO: 47493 - protein, 59 aa, Homo sapiens
  MAP TO AL158823.1; EXPRESSED IN ADULT LIVER, SIGNAL = 1.6; EXPRESSED IN LUNG, SIGNAL = 2.3; EST_HUMAN HIT: BE090864.1, EVALUE 4.70e+00; SWISSPROT HIT: P75437, EVALUE 2.70e+00
AKADKESHVLSGANSGRLFSLDIIGQLLLSFPTASLEGKHSWLLWASLKPSAAACMLSN

SEQ ID NO: 47494 - protein, 37 aa, Homo sapiens
  MAP TO AC015620.3; EXPRESSED IN PLACENTA, SIGNAL = 1.8; EXPRESSED IN ADULT LIVER, SIGNAL = 1.6; EXPRESSED IN BONE MARROW, SIGNAL = 1.7; EXPRESSED IN FETAL LIVER, SIGNAL = 1.8; EXPRESSED IN HELA, SIGNAL = 1.8; EST_HUMAN HIT: T04868.1, EVALUE 2.00e-15; SWISSPROT HIT: P50542, EVALUE 6.50e-02
TEFWDKMQAEWEEMARRNWISENQEAQNQVTISASEK

SEQ ID NO: 47495 - protein, 30 aa, Homo sapiens
  MAP TO AC015620.3; EXPRESSED IN PLACENTA, SIGNAL = 1.8; EXPRESSED IN ADULT LIVER, SIGNAL = 1.6; EXPRESSED IN BONE MARROW, SIGNAL = 1.7; EXPRESSED IN FETAL LIVER, SIGNAL = 1.8; EXPRESSED IN HELA, SIGNAL = 1.8; EST_HUMAN HIT: T04868.1, EVALUE 1.00e-11
IQSFGIRCKQNGKKWLGGTGYLRTKKPRTK

SEQ ID NO: 47496 - protein, 68 aa, Homo sapiens
  MAP TO AL158841.1; EXPRESSED IN BONE MARROW, SIGNAL = 1.6; EXPRESSED IN LUNG, SIGNAL = 1.6; EXPRESSED IN ADULT LIVER, SIGNAL = 1.4; SWISSPROT HIT: P21421, EVALUE 1.20e+00; EST_HUMAN HIT: AW118982.1, EVALUE 3.30e+00
FFLYKMEILVNENEIIYIKHIKNLLQYTTQFMNGDYMNFLKLGNMFSFFLLVFLAQCPVPRGYTIVIK

SEQ ID NO: 47497 - protein, 53 aa, Homo sapiens
  MAP TO AL136170.2; EXPRESSED IN ADULT LIVER, SIGNAL =  30; EXPRESSED IN FETAL LIVER, SIGNAL =  12; EST_HUMAN HIT: AV658277.1, EVALUE 4.00e-25; SWISSPROT HIT: P01008, EVALUE 3.00e-26
GLWKSKFSPENTRKELFYKADGESCSASMMYQEGKFRYRRVAEGTQVLELPFK

SEQ ID NO: 47498 - protein, 28 aa, Homo sapiens
  MAP TO AL136170.2; EXPRESSED IN ADULT LIVER, SIGNAL =  30; EXPRESSED IN FETAL LIVER, SIGNAL =  12; EST_HUMAN HIT: AV661154.1, EVALUE 7.00e-09
ACGSQSSALRTQGRNCSTRLMESRVQHL

SEQ ID NO: 47499 - protein, 25 aa, Homo sapiens
  MAP TO AC022267.2; EXPRESSED IN ADULT LIVER, SIGNAL = 1.6; EXPRESSED IN FETAL LIVER, SIGNAL = 1.7
ISEKCERHPGTLHPLLGERVSVISD

SEQ ID NO: 47500 - protein, 21 aa, Homo sapiens
  MAP TO AC022267.2; EXPRESSED IN ADULT LIVER, SIGNAL = 1.6; EXPRESSED IN FETAL LIVER, SIGNAL = 1.7; EST_HUMAN HIT: AW275103.1, EVALUE 5.60e-01
YQRSVNATQGLCILFWGNGLV

SEQ ID NO: 47501 - protein, 62 aa, Homo sapiens
  MAP TO AC008962.4; EXPRESSED IN ADULT LIVER, SIGNAL = 9.9; SWISSPROT HIT: Q16696, EVALUE 6.00e-32; EST_HUMAN HIT: AW577399.1, EVALUE 5.00e-25
KVHEEIDRVIGKNRQPKFEDRAKMPYTEAVIHEIQRFGDMLPMGLAHRVNKDTKFRDFFLPK

SEQ ID NO: 47502 - protein, 96 aa, Homo sapiens
  MAP TO AL121985.13; EXPRESSED IN BONE MARROW, SIGNAL = 2.4; EXPRESSED IN LUNG, SIGNAL = 2.8; EXPRESSED IN ADULT LIVER, SIGNAL = 1.6; SWISSPROT HIT: P09326, EVALUE 3.00e-51; EST_HUMAN HIT: AA488894.1, EVALUE 3.00e-50
MTVVSGSNVTLNISESLPENYKQLTWFYTFDQKIVEWDSRKSKYFESKFKGRVRLDPQSGALYISKVQKEDNSTYIMRVLKKTGNEQEWKIKLQVL

SEQ ID NO: 47503 - protein, 58 aa, Homo sapiens
  MAP TO AC009575.4; EXPRESSED IN ADULT LIVER, SIGNAL = 3.2; SWISSPROT HIT: P53068, EVALUE 9.00e-05; EST_HUMAN HIT: AI829179.1, EVALUE 3.00e-28
QLELVEPSGWIHVPLTDNHKKPTRTFMIQIAVLANHQNGRDTHMRQIKIYTPVEESSI

SEQ ID NO: 47504 - protein, 72 aa, Homo sapiens
  MAP TO AC024581.1; EXPRESSED IN ADULT LIVER, SIGNAL = 1.4
LRDRVSRIGTCWLSSNRGEEGEGENSEKMDPAKKCLGFSCKMLIKADEECSGRTDERINIGSSEHNPKDRDD

SEQ ID NO: 47505 - protein, 74 aa, Homo sapiens
  MAP TO AL136418.1; EXPRESSED IN ADULT LIVER, SIGNAL =   5; SWISSPROT HIT: P29065, EVALUE 3.10e+00; EST_HUMAN HIT: BE084180.1, EVALUE 4.00e-37
TAYEWVNPAAYGLVVVTSSEGRNLPYGRLEDILSRDNSALNCHSNDDKNAWFAIDLGLWVIPSAYTLRHARGYG

SEQ ID NO: 47506 - protein, 18 aa, Homo sapiens
  MAP TO AL157789.1; EXPRESSED IN ADULT LIVER, SIGNAL = 2.2
QREHDEEQHEHQDDAQCQ

SEQ ID NO: 47507 - protein, 26 aa, Homo sapiens
  MAP TO AL157789.1; EXPRESSED IN ADULT LIVER, SIGNAL = 2.2; EST_HUMAN HIT: T67771.1, EVALUE 1.00e-10
WRPTTRLPHSTSPCHPTLASAPQTWH

SEQ ID NO: 47508 - protein, 59 aa, Homo sapiens
  MAP TO AL138734.2; EXPRESSED IN FETAL LIVER, SIGNAL = 1.5; EXPRESSED IN ADULT LIVER, SIGNAL = 1.8; SWISSPROT HIT: P44596, EVALUE 1.20e+00; EST_HUMAN HIT: AI286316.1, EVALUE 1.00e-09
VWVDYTHVPHNNVSVNDGPHKIIIPYFYSTFSMFKNTNIYKYLPYVTIAYSIQYSNMQY

SEQ ID NO: 47509 - protein, 26 aa, Homo sapiens [sequence omitted]

SEQ ID NO: 47510 - protein, 25 aa, Homo sapiens [sequence omitted]

SEQ ID NO: 47511 - protein, 65 aa, Homo sapiens
  MAP TO AL117355.2; EXPRESSED IN ADULT LIVER, SIGNAL = 6.3; SWISSPROT HIT: Q21973, EVALUE 2.60e+00; EST_HUMAN HIT: BE891806.1, EVALUE 3.00e-32
LYINKANIWNSALDAFRNRNFNPSYAIEVAYVIENDNFGSEHPGSKQEFLSLLMQHLENSSLFEG

SEQ ID NO: 47512 - protein, 42 aa, Homo sapiens
  MAP TO AL133475.14; EXPRESSED IN ADULT LIVER, SIGNAL = 1.8; EST_HUMAN HIT: AA976510.1, EVALUE 6.00e-06
LDRDFNFIDVFKEAAFGYIDFLCCFPVFSFTDFCSDFYYFFS

SEQ ID NO: 47513 - protein, 41 aa, Homo sapiens
  MAP TO AL133475.14; EXPRESSED IN ADULT LIVER, SIGNAL = 1.8; EST_HUMAN HIT: AA565909.1, EVALUE 7.00e-06; SWISSPROT HIT: P08547, EVALUE 8.00e-07
RKEIIKIRAEISETENWKTTEKVNITKSCFFENINKIEISI

SEQ ID NO: 47514 - protein, 74 aa, Homo sapiens
  MAP TO AC025488.1; EXPRESSED IN ADULT LIVER, SIGNAL = 5.9; EXPRESSED IN FETAL LIVER, SIGNAL = 3.8; EST_HUMAN HIT: AA987868.1, EVALUE 8.00e-36; SWISSPROT HIT: P16662, EVALUE 8.00e-37
YKESVMKLSRIQHDQPVKPLDRAVFWIEFVMRHKGAKHLRVAARDLTWFQYHSLDVIGFLLACVATVTFIITKC

SEQ ID NO: 47515 - protein, 54 aa, Homo sapiens
  MAP TO AL157791.1; EXPRESSED IN ADULT LIVER, SIGNAL = 5.8; EXPRESSED IN FETAL LIVER, SIGNAL = 7.1; EST_HUMAN HIT: AL040793.1, EVALUE 8.00e-24; SWISSPROT HIT: Q39565, EVALUE 2.70e+00
IQQLFEEILSNSRQLKWLSCGFMLEIVTPTSLSSLSNAVANTMEHLSLLDNNIP

SEQ ID NO: 47516 - protein, 36 aa, Homo sapiens
  MAP TO AL133485.1; EXPRESSED IN PLACENTA, SIGNAL = 1.7; EXPRESSED IN ADULT LIVER, SIGNAL =   3
QLRFWNPDDLNASQSGSSPPQDWIEEKLQEVCEDLG

SEQ ID NO: 47517 - protein, 67 aa, Homo sapiens
  MAP TO AC025488.1; EXPRESSED IN ADULT LIVER, SIGNAL =  10; EXPRESSED IN FETAL LIVER, SIGNAL =   4; EST_HUMAN HIT: BF689099.1, EVALUE 3.00e-30; SWISSPROT HIT: P36537, EVALUE 1.00e-32
HPKTRAFITHGGASGIYEAIYHGIPMVGIPLFWDQPDNIAHMKAKGAAVRLDFHTMSSTDLLNALKT

SEQ ID NO: 47518 - protein, 77 aa, Homo sapiens
  MAP TO AL136338.1; EXPRESSED IN HELA, SIGNAL = 4.3; EXPRESSED IN ADULT LIVER, SIGNAL = 8.3; SWISSPROT HIT: O00330, EVALUE 2.20e-01; EST_HUMAN HIT: BF361964.1, EVALUE 1.00e-35
VSLCTPSENTPTESLARLVAMVFQWFHSTAYMMDDEVGSLVEKLKPQFVTKWLKTVCDVRFDVMVMCLLPKPMEFAR

SEQ ID NO: 47519 - protein, 47 aa, Homo sapiens
  MAP TO AC020714.2; EXPRESSED IN ADULT LIVER, SIGNAL = 1.9; EXPRESSED IN BONE MARROW, SIGNAL = 1.7; EST_HUMAN HIT: BE258724.1, EVALUE 2.00e-21
LVFEKHFPATIDSFQDAVKCLSEFACNAAFPDTSMEAIRLIRHCAKY

SEQ ID NO: 47520 - protein, 18 aa, Homo sapiens
  MAP TO AC020714.2; EXPRESSED IN ADULT LIVER, SIGNAL = 1.9; EXPRESSED IN BONE MARROW, SIGNAL = 1.7; EST_HUMAN HIT: BF374854.1, EVALUE 7.00e-03
PLYLKNTFQRPLILSRMQ

SEQ ID NO: 47521 - protein, 84 aa, Homo sapiens
  MAP TO AL158153.2; EXPRESSED IN ADULT LIVER, SIGNAL = 1.6; EXPRESSED IN LUNG, SIGNAL = 6.7; EST_HUMAN HIT: BF573955.1, EVALUE 1.60e-02; SWISSPROT HIT: Q91641, EVALUE 3.00e-25
MYIEASHMVYGQKARLLSRPLRGVSGKHCLTFFYHMYGGGTGLLSVYLKKEEDSEESLLWRRRGEQSISWLRALIEYSCERQHQ

SEQ ID NO: 47522 - protein, 29 aa, Homo sapiens
  MAP TO AL158153.2; EXPRESSED IN ADULT LIVER, SIGNAL = 1.6; EXPRESSED IN LUNG, SIGNAL = 6.7; EST_HUMAN HIT: BF573955.1, EVALUE 2.70e-02
CTLRPPIWCMDKKHASCPGLCEESLENTA

SEQ ID NO: 47523 - protein, 49 aa, Homo sapiens
  MAP TO AL133445.2; EXPRESSED IN ADULT LIVER, SIGNAL = 1.5; SWISSPROT HIT: P19757, EVALUE 4.70e+00
FFEECIRNAELEAKMPVIMKNSVYIHKAATRRIKSCRFHRRRSSTSWND

SEQ ID NO: 47524 - protein, 29 aa, Homo sapiens
  MAP TO AC010322.4; EXPRESSED IN ADULT LIVER, SIGNAL =   2; EXPRESSED IN BONE MARROW, SIGNAL = 3.3; EXPRESSED IN LUNG, SIGNAL = 1.8; EST_HUMAN HIT: BF509556.1, EVALUE 1.00e-09; SWISSPROT HIT: P34092, EVALUE 3.00e-10
KNGFEQFCINFVNEKLQQIFIELTLKAEQ

SEQ ID NO: 47525 - protein, 24 aa, Homo sapiens
  MAP TO AC010322.4; EXPRESSED IN ADULT LIVER, SIGNAL =   2; EXPRESSED IN BONE MARROW, SIGNAL = 3.3; EXPRESSED IN LUNG, SIGNAL = 1.8
KMASSSFASTSSMRSCSKSLSNLP

SEQ ID NO: 47526 - protein, 26 aa, Homo sapiens
  MAP TO AC017089.2; EXPRESSED IN FETAL LIVER, SIGNAL = 1.8; EXPRESSED IN ADULT LIVER, SIGNAL = 3.6; EST_HUMAN HIT: AA931117.1, EVALUE 1.40e-01
TFSLTHRTTWSISRASAQAHMKTPEL

SEQ ID NO: 47527 - protein, 65 aa, Homo sapiens
  MAP TO AC018686.3; EXPRESSED IN ADULT LIVER, SIGNAL = 1.4; EST_HUMAN HIT: BE675009.1, EVALUE 5.10e-01
METVRMIRDREYQQMFLSLTVADLTSHLTAGTALLGPMVSELRGRSWRSSLFNFLKPNGGDKGQT

SEQ ID NO: 47528 - protein, 51 aa, Homo sapiens
  MAP TO AC022205.2; EXPRESSED IN ADULT LIVER, SIGNAL = 1.7; EST_HUMAN HIT: AI377428.1, EVALUE 3.00e-05
KEREQKINKEMEEKAAKELEKEYLQEKAKEKYQEWLKKKNAEECERKKKEK

SEQ ID NO: 47529 - protein, 35 aa, Homo sapiens
  MAP TO AC022205.2; EXPRESSED IN ADULT LIVER, SIGNAL = 1.7
KKENKKLIKKWRKKQQRNWRKNTCKKKQKKNIKNG

SEQ ID NO: 47530 - protein, 47 aa, Homo sapiens
  MAP TO AC008044.4; EXPRESSED IN ADULT LIVER, SIGNAL = 1.8; SWISSPROT HIT: O43613, EVALUE 2.10e+00
SLQGSGASGDFCGTLSIVLPRASAVRRRLVLQGRGNVSALSSALFSH

SEQ ID NO: 47531 - protein, 59 aa, Homo sapiens
  MAP TO AL138849.5; EXPRESSED IN ADULT LIVER, SIGNAL = 1.7; SWISSPROT HIT: P08468, EVALUE 2.00e+00; EST_HUMAN HIT: AA448593.1, EVALUE 1.00e-26
KKRLPSLGKNTESLGELWLGLLRFYTEEFDFKEYVISIRQKKLLTTFEKQWTSKCIAIE

SEQ ID NO: 47532 - protein, 75 aa, Homo sapiens [sequence omitted]

SEQ ID NO: 47533 - protein, 45 aa, Homo sapiens
  MAP TO AL109914.16; EXPRESSED IN ADULT LIVER, SIGNAL = 1.5; EST_HUMAN HIT: AI936781.1, EVALUE 5.30e+00
VNEKGVKAAGWSLCLFKKEPDDITSASCSRRLRSCETAQPPSPVV

SEQ ID NO: 47534 - protein, 30 aa, Homo sapiens
  MAP TO AC011366.3; EXPRESSED IN ADULT LIVER, SIGNAL = 2.5
NTSHEKKQIITGSNMKELSIMHKIRDLNFE

SEQ ID NO: 47535 - protein, 73 aa, Homo sapiens
  MAP TO AC010436.4; EXPRESSED IN ADULT LIVER, SIGNAL =  46; EST_HUMAN HIT: BF327361.1, EVALUE 2.20e+00
LVRNNNSSSSNNNNNNNNNNNNNNNTVHFNTGKFHRCWKSWKCKRENGGGLEVIKEEGTIPRGQKLHALPHWS

SEQ ID NO: 47536 - protein, 54 aa, Homo sapiens
  MAP TO AC020741.2; EXPRESSED IN ADULT LIVER, SIGNAL = 1.8; EST_HUMAN HIT: AI431686.1, EVALUE 6.40e+00
NPTMSLTEFEMYTNIAMTLTYILHSVIHHGSISWKENTYPPEHTRLILCTKYPS

SEQ ID NO: 47537 - protein, 56 aa, Homo sapiens
  MAP TO AC010322.4; EXPRESSED IN ADULT LIVER, SIGNAL = 1.4; EST_HUMAN HIT: AW503851.1, EVALUE 9.00e-14; SWISSPROT HIT: P34092, EVALUE 8.00e-11
SPPGIMSVLDDVCATMHATGGGADQTLLQKLQAAVGTHEHFNSWSAGFVIHHYAGK

SEQ ID NO: 47538 - protein, 42 aa, Homo sapiens
  MAP TO AC008543.4; EXPRESSED IN ADULT LIVER, SIGNAL = 1.7; EST_HUMAN HIT: BF685894.1, EVALUE 6.00e-16; SWISSPROT HIT: P16415, EVALUE 5.00e-17
DSVAFEDVAINFTCEEWALLGPSQKSLYRDVMQETIRNLDCI

SEQ ID NO: 47539 - protein, 81 aa, Homo sapiens
  MAP TO AC007193.1; EXPRESSED IN FETAL LIVER, SIGNAL = 2.3; EST_HUMAN HIT: AI904463.1, EVALUE 3.00e-34; SWISSPROT HIT: P53041, EVALUE 8.00e-30
NGRSISKRGVSCQFGPDVTKAFLEENNLDYIIRSHEVKAEGYEVAHGGRCVTVFSAPNYWYVFAFPAQGLYQATGFCLGFC

SEQ ID NO: 47540 - protein, 96 aa, Homo sapiens
  MAP TO AC008266.1; EXPRESSED IN PLACENTA, SIGNAL = 0.73; EXPRESSED IN FETAL LIVER, SIGNAL = 1.4; EXPRESSED IN BT474, SIGNAL = 5.1; EXPRESSED IN BONE MARROW, SIGNAL = 0.99; EXPRESSED IN HBL100, SIGNAL = 3.4; EXPRESSED IN HELA, SIGNAL = 1.8; SWISSPROT HIT: P45386, EVALUE 1.00e+00
KSCTKPSPSKKRCSDNTEVEVSNLENKQPVESTSAKSCSPSPVSPQVQPQAADTISDSVAVPASLLGMRRGLNSRLEATAASSVKTRMQKLAEQRR

SEQ ID NO: 47541 - protein, 49 aa, Homo sapiens
  MAP TO AL031729.16; EXPRESSED IN LUNG, SIGNAL = 1.2; EXPRESSED IN PLACENTA, SIGNAL =   5; EXPRESSED IN BONE MARROW, SIGNAL = 4.8; EXPRESSED IN FETAL LIVER, SIGNAL = 0.91; EST_HUMAN HIT: AV690852.1, EVALUE 2.00e-22; SWISSPROT HIT: P09769, EVALUE 1.00e-23
EGMAYMERMNYIHRDLRAANILVGERLACKIADFGLARLIKDDEYNPCQ

SEQ ID NO: 47542 - protein, 31 aa, Homo sapiens
  MAP TO AL031729.16; EXPRESSED IN LUNG, SIGNAL = 1.2; EXPRESSED IN PLACENTA, SIGNAL =   5; EXPRESSED IN BONE MARROW, SIGNAL = 4.8; EXPRESSED IN FETAL LIVER, SIGNAL = 0.91; EST_HUMAN HIT: AV690852.1, EVALUE 7.00e-13; SWISSPROT HIT: P13285, EVALUE 6.30e+00
SPRPEGSQHPGWGAAGVQDRRLWLGASHQGR

SEQ ID NO: 47543 - protein, 66 aa, Homo sapiens
  MAP TO AF124731.2; EXPRESSED IN FETAL LIVER, SIGNAL = 0.72; EXPRESSED IN PLACENTA, SIGNAL = 1.6; EXPRESSED IN BT474, SIGNAL = 0.61; EXPRESSED IN BONE MARROW, SIGNAL = 0.98; SWISSPROT HIT: O14867, EVALUE 1.00e-32; EST_HUMAN HIT: BF512320.1, EVALUE 2.00e-31
SSVHSTNVLLSLNDQRKKDVLCDVTIFVEGQRFRAHRSVLAACSSYFHSRIVGQADGELNITLPEE

SEQ ID NO: 47544 - protein, 113 aa, Homo sapiens
  MAP TO AC006028.2; EXPRESSED IN HELA, SIGNAL = 1.1; EXPRESSED IN PLACENTA, SIGNAL = 0.69; EXPRESSED IN BT474, SIGNAL =  10; EXPRESSED IN HBL100, SIGNAL = 4.3; EXPRESSED IN LUNG, SIGNAL = 0.64; EXPRESSED IN BONE MARROW, SIGNAL = 0.73; EXPRESSED IN FETAL LIVER, SIGNAL = 0.83; EST_HUMAN HIT: AI718295.1, EVALUE 4.00e-44; SWISSPROT HIT: P53900, EVALUE 2.00e-06
PEMVATMKKTAAEDVNVTFEEQQKINKFAWNTSRITELKEEIEVKQKQLQNVEDARDGTMLADADCLMMPYQIGDVFISHSQEETQEMLEAANKNLQEATDALESKVEAIQWV

SEQ ID NO: 47545 - protein, 110 aa, Homo sapiens; identical to SEQ ID NO: 46494
  MAP TO AB023054.1; EXPRESSED IN PLACENTA, SIGNAL = 1.7; EXPRESSED IN HELA, SIGNAL = 0.63; EXPRESSED IN FETAL LIVER, SIGNAL = 0.97; EST_HUMAN HIT: AI248753.1, EVALUE 1.00e-12; SWISSPROT HIT: Q02084, EVALUE 2.00e-12

SEQ ID NO: 47546 - protein, 140 aa, Homo sapiens
  MAP TO AL033528.6; EXPRESSED IN PLACENTA, SIGNAL =   1; EXPRESSED IN HBL100, SIGNAL = 1.6; EXPRESSED IN HELA, SIGNAL = 1.8; EXPRESSED IN FETAL LIVER, SIGNAL = 0.96; SWISSPROT HIT: P36793, EVALUE 2.00e+00; EST_HUMAN HIT: BE257955.1, EVALUE 4.00e-53
SHTESQINKESKKNATQLDHLIPGLAHDCMASPLATSTTADIQEAGLSPQSLQTSGHHRMKTPFSTELSLLQPDTPDCAGDSHTPLAFSFTEDLESSCLLDRKEEKGDSARKWEWLHESKKNYQSMEKHTKLLGTNAVSP

SEQ ID NO: 47547 - protein, 18 aa, Homo sapiens
  MAP TO AL033528.6; EXPRESSED IN PLACENTA, SIGNAL =   1; EXPRESSED IN HBL100, SIGNAL = 1.6; EXPRESSED IN HELA, SIGNAL = 1.8; EXPRESSED IN FETAL LIVER, SIGNAL = 0.96; EST_HUMAN HIT: AU135416.1, EVALUE 1.00e-02
HLIQKVRSTKSPRKMRPS

SEQ ID NO: 47548 - protein, 56 aa, Homo sapiens
  MAP TO AL096771.8; EXPRESSED IN FETAL LIVER, SIGNAL = 1.2; EXPRESSED IN BT474, SIGNAL = 1.1; EXPRESSED IN HBL100, SIGNAL =   4; EXPRESSED IN HELA, SIGNAL = 2.4; EST_HUMAN HIT: AI750956.1, EVALUE 3.00e-04; SWISSPROT HIT: Q60847, EVALUE 8.00e-06
PQGESRTGPPGSTGSRGPPGPPGRPGNSGIRGPPGPPGYCDSSQCASIPYNGQGYP

SEQ ID NO: 47549 - protein, 56 aa, Homo sapiens
  MAP TO AL096771.8; EXPRESSED IN FETAL LIVER, SIGNAL = 1.2; EXPRESSED IN BT474, SIGNAL = 1.1; EXPRESSED IN HBL100, SIGNAL =   4; EXPRESSED IN HELA, SIGNAL = 2.4; SWISSPROT HIT: O88502, EVALUE 5.90e+00; EST_HUMAN HIT: BF109901.1, EVALUE 6.00e-13
QVQEVPLAPLAVLETQVSEDPQVLLDTVILLSVPASHTTGKAIQVRCCHCRNPNSP

SEQ ID NO: 47550 - protein, 104 aa, Homo sapiens
  MAP TO AC009437.1; EXPRESSED IN FETAL LIVER, SIGNAL = 1.3; EXPRESSED IN HELA, SIGNAL = 1.3; EST_HUMAN HIT: AW086083.1, EVALUE 6.10e+00
  unsure 58
  unsure 62
  unsure 80
TEPRAFPNTECGLAFVFGRAKRFCHITDRSETSGAGRIKSLQTAHRCHFSQSGLDQSXKDSXLQDQFCDLSCHMILYLLXVFVIYCWSLLRSLLLSTEAMCPKL

SEQ ID NO: 47551 - protein, 18 aa, Homo sapiens
  MAP TO AC011331.1; EXPRESSED IN LUNG, SIGNAL = 1.1; EXPRESSED IN BT474, SIGNAL = 1.8; EXPRESSED IN FETAL LIVER, SIGNAL = 2.6; EXPRESSED IN HBL100, SIGNAL = 1.2
ACRACCDDLLLTAEEPTS

SEQ ID NO: 47552 - protein, 61 aa, Homo sapiens
  MAP TO AL109799.4; EXPRESSED IN FETAL LIVER, SIGNAL = 1.7; SWISSPROT HIT: P36498, EVALUE 2.60e+00; EST_HUMAN HIT: AA412270.1, EVALUE 3.00e-19
PAPKKMKTSESSTILVVRYRRNVKRTSPEELLNDHARENRINPLQMEEEEFMEIMVEIPAK

SEQ ID NO: 47553 - protein, 57 aa, Homo sapiens
  MAP TO AC006023.2; EXPRESSED IN PLACENTA, SIGNAL =   1; EXPRESSED IN LUNG, SIGNAL = 0.99; EXPRESSED IN BT474, SIGNAL =   1; EXPRESSED IN FETAL LIVER, SIGNAL = 0.9; EST_HUMAN HIT: BE693298.1, EVALUE 7.00e-27; SWISSPROT HIT: Q14004, EVALUE 5.00e-29
FEYMDHDLMGLLESGLVHFNENHIKSFMRQLMEGLDYCHKKNFLHRDIKCSNILLNN

SEQ ID NO: 47554 - protein, 49 aa, Homo sapiens
  MAP TO AC010732.1; EXPRESSED IN BONE MARROW, SIGNAL = 0.92; EXPRESSED IN LUNG, SIGNAL =   1; EXPRESSED IN BT474, SIGNAL =   2; EXPRESSED IN FETAL LIVER, SIGNAL =   1; EST_HUMAN HIT: BE869579.1, EVALUE 3.00e-15; SWISSPROT HIT: P98194, EVALUE 7.00e-14
LGVEPVDKDAFRQPPRSVRDTILSRALILKILMSAAIIISGTLFIFWKE

SEQ ID NO: 47555 - protein, 50 aa, Homo sapiens
  MAP TO AC009953.2; EXPRESSED IN FETAL LIVER, SIGNAL = 2.3; EXPRESSED IN PLACENTA, SIGNAL = 0.94; SWISSPROT HIT: P07150, EVALUE 2.00e+00; EST_HUMAN HIT: AI364938.1, EVALUE 1.70e+00
TNQKANECIIIIVKKATSLPPLNQRRIYRWRRKRVTGLKLILRLLCPRSY

SEQ ID NO: 47556 - protein, 36 aa, Homo sapiens
  MAP TO AL035250.17; EXPRESSED IN PLACENTA, SIGNAL = 1.5; EXPRESSED IN HBL100, SIGNAL = 0.93; EXPRESSED IN FETAL LIVER, SIGNAL =   1
MVATMITTQPPALQKPFLGQNQSSCHIQSCDWRMLA

SEQ ID NO: 47557 - protein, 63 aa, Homo sapiens
  MAP TO AL121789.1; EXPRESSED IN HELA, SIGNAL = 3.7; EXPRESSED IN FETAL LIVER, SIGNAL = 2.6; EST_HUMAN HIT: AA233103.1, EVALUE 2.90e+00; SWISSPROT HIT: Q61292, EVALUE 4.40e+00
GVDSCIPLQCCKPNQNMRLDHRNQKMKVTTGRADMVQTHSGCCVTAERSSGSVKRHANFSKIN

SEQ ID NO: 47558 - protein, 50 aa, Homo sapiens
  MAP TO AC005948.6; EXPRESSED IN FETAL LIVER, SIGNAL = 0.96; EXPRESSED IN HELA, SIGNAL =   1; EXPRESSED IN PLACENTA, SIGNAL = 0.99; SWISSPROT HIT: Q09244, EVALUE 1.50e+00; EST_HUMAN HIT: BE740693.1, EVALUE 8.70e+00
GLSEEMMFDQRPGSSEEMTNSWGDQRGATPIAINQDCPRKTNTCGYPIDQ

SEQ ID NO: 47559 - protein, 35 aa, Homo sapiens
  MAP TO AC011364.1; EXPRESSED IN FETAL LIVER, SIGNAL = 1.5; EXPRESSED IN PLACENTA, SIGNAL = 1.6; EST_HUMAN HIT: AA464301.1, EVALUE 1.30e+00
WLWECALRSPSSKGCLLPREAETSDCLGGGDSPQL

SEQ ID NO: 47560 - protein, 102 aa, Homo sapiens
  MAP TO AC006323.3; EXPRESSED IN BT474, SIGNAL = 2.9; EXPRESSED IN FETAL LIVER, SIGNAL = 0.95; EXPRESSED IN PLACENTA, SIGNAL =   1; EXPRESSED IN HBL100, SIGNAL = 1.7; EXPRESSED IN HELA, SIGNAL = 2.5; EXPRESSED IN LUNG, SIGNAL = 1.2; EXPRESSED IN BONE MARROW, SIGNAL = 1.2; EST_HUMAN HIT: AI953668.1, EVALUE 5.00e-12; SWISSPROT HIT: Q15910, EVALUE 6.00e-13
EGAKEFAAALTAERIKTPPKRPGGRRRGRLPNNSSRPSTPTINVLESKDTDSDREAGTETGGENNDKEEEEKKDETSSSSGKTRLITGFYCSVKVRVVRIKD

SEQ ID NO: 47561 - protein, 41 aa, Homo sapiens
  MAP TO AC005158.2; EXPRESSED IN FETAL LIVER, SIGNAL = 1.3; EXPRESSED IN PLACENTA, SIGNAL = 1.1; SWISSPROT HIT: P10071, EVALUE 7.00e-16; EST_HUMAN HIT: AI860179.1, EVALUE 2.00e-15
EAQSHSSTTTEKKKVENSIVKCSTRTDVSEKAVASSTTSNG

SEQ ID NO: 47562 - protein, 107 aa, Homo sapiens
  MAP TO AC006023.2; EXPRESSED IN PLACENTA, SIGNAL = 1.1; EXPRESSED IN BT474, SIGNAL =   1; EXPRESSED IN FETAL LIVER, SIGNAL = 1.6; EST_HUMAN HIT: AW799294.1, EVALUE 2.00e-47; SWISSPROT HIT: P23201, EVALUE 8.80e-01
KTGPGQHLNHSELAILLNLLQSKTSVNMADFVQVLNIKVNSETQQQLNKINLPAGILATGEKQTDPSTPQQESSKPLGGIQPSSQTIQPKVETDAAQAAVQSAFAVL

SEQ ID NO: 47563 - protein, 124 aa, Homo sapiens
  MAP TO AC011406.1; EXPRESSED IN HELA, SIGNAL = 1.3; EXPRESSED IN PLACENTA, SIGNAL = 1.9; EXPRESSED IN FETAL LIVER, SIGNAL =  35; SWISSPROT HIT: P50443, EVALUE 1.00e-66; EST_HUMAN HIT: BE500995.1, EVALUE 2.00e-62
GDVMSGLIVGILLVPQSIAYSLLAGQEPVYGLYTSFFASIIYFLLGTSRHISVGIFGVLCLMIGETVDRELQKAGYDNAHSAPSLGMVSNGSTLLNHTSDRICDKSCYAIMVGSTVTFIAGVYQ

SEQ ID NO: 47564 - protein, 29 aa, Homo sapiens
  MAP TO AC008134.3; EXPRESSED IN FETAL LIVER, SIGNAL = 1.1; EST_HUMAN HIT: Z45777.1, EVALUE 1.00e-09; SWISSPROT HIT: Q13393, EVALUE 1.00e-10
NQFFISCADDKVVFNKIGDAIAQRILKAH

SEQ ID NO: 47565 - protein, 61 aa, Homo sapiens
  MAP TO AC009491.2; EXPRESSED IN FETAL LIVER, SIGNAL = 1.6; EST_HUMAN HIT: AW593215.1, EVALUE 4.00e-02; SWISSPROT HIT: P12252, EVALUE 2.60e+00
NLLCPSTALLETFSAWPSTQTISETGLNLTCMPKRPVQVVRIPLHLGLAIVLVPAFLRKPL

SEQ ID NO: 47566 - protein, 20 aa, Homo sapiens
  MAP TO AC009891.1; EXPRESSED IN FETAL LIVER, SIGNAL = 1.3
LHDLKVHIHYHSVIQNRYAK

SEQ ID NO: 47567 - protein, 83 aa, Homo sapiens
  MAP TO AC005682.2; EXPRESSED IN HBL100, SIGNAL = 1.4; EXPRESSED IN HELA, SIGNAL = 1.9; EXPRESSED IN LUNG, SIGNAL = 6.2; EXPRESSED IN FETAL LIVER, SIGNAL = 0.91; EXPRESSED IN PLACENTA, SIGNAL =   1; EST_HUMAN HIT: AA290947.1, EVALUE 7.00e-18
NTELTGQEELMEISEVDEGFYSRAASSTSQSGLSNSSHNCSNKPSIGKNHRRSGGSKTGGKEKETTGESCKDHFARKQTQRAQ

SEQ ID NO: 47568 - protein, 121 aa, Homo sapiens; identical to SEQ ID NO: 45718
  MAP TO AC009487.1; EXPRESSED IN BT474, SIGNAL = 6.2; EXPRESSED IN FETAL LIVER, SIGNAL = 0.92; EXPRESSED IN HBL100, SIGNAL = 2.2; EXPRESSED IN HELA, SIGNAL = 3.5; EXPRESSED IN LUNG, SIGNAL = 1.5; EST_HUMAN HIT: BE897487.1, EVALUE 1.00e-52; SWISSPROT HIT: P14196, EVALUE 2.40e-01

SEQ ID NO: 47569 - protein, 49 aa, Homo sapiens
  MAP TO AC011406.1; EXPRESSED IN HBL100, SIGNAL = 1.4; EXPRESSED IN HELA, SIGNAL = 2.3; EXPRESSED IN BONE MARROW, SIGNAL = 0.97; EXPRESSED IN LUNG, SIGNAL = 5.2; EXPRESSED IN BT474, SIGNAL = 1.3; EXPRESSED IN FETAL LIVER, SIGNAL = 0.99; SWISSPROT HIT: Q12766, EVALUE 5.00e-14
EKPAKVKVELASGVSSKGSVVKRNQQPVTTEQNSSKENASKLTLENSEA

SEQ ID NO: 47570 - protein, 58 aa, Homo sapiens
  MAP TO AC011406.1; EXPRESSED IN HBL100, SIGNAL = 1.4; EXPRESSED IN HELA, SIGNAL = 2.3; EXPRESSED IN BONE MARROW, SIGNAL = 0.97; EXPRESSED IN LUNG, SIGNAL = 5.2; EXPRESSED IN BT474, SIGNAL = 1.3; EXPRESSED IN FETAL LIVER, SIGNAL = 0.99; EST_HUMAN HIT: AW732349.1, EVALUE 1.00e-03; SWISSPROT HIT: Q12766, EVALUE 3.00e-19
EAPGNCGTAVTKTPVVKSGVQPEVTLGTTDNDSPGADVPTPSEGTSTSSPLPAPKKPT

SEQ ID NO: 47571 - protein, 51 aa, Homo sapiens
  MAP TO AL050317.9; EXPRESSED IN LUNG, SIGNAL =   5; EXPRESSED IN FETAL LIVER, SIGNAL =   2; SWISSPROT HIT: P17587, EVALUE 6.90e-01; EST_HUMAN HIT: BE541252.1, EVALUE 2.90e+00
GPHLLALSKSEKGQAASLHQEPLGSKEISEPGNSPDPRKAASQESEASLQQ

SEQ ID NO: 47572 - protein, 19 aa, Homo sapiens
  MAP TO AC009486.2; EXPRESSED IN BT474, SIGNAL =   1; EXPRESSED IN FETAL LIVER, SIGNAL = 1.4; EXPRESSED IN HBL100, SIGNAL = 1.1; EXPRESSED IN BONE MARROW, SIGNAL =   1; EST_HUMAN HIT: N76646.1, EVALUE 9.00e-03
LPGGQDVEVEDSDIDDHDP

SEQ ID NO: 47573 - protein, 24 aa, Homo sapiens
  MAP TO AC009486.2; EXPRESSED IN BT474, SIGNAL =   1; EXPRESSED IN FETAL LIVER, SIGNAL = 1.4; EXPRESSED IN HBL100, SIGNAL = 1.1; EXPRESSED IN BONE MARROW, SIGNAL =   1; EST_HUMAN HIT: BE350127.1, EVALUE 1.30e-01
TSTSCPPGRSSRENTPHMELSSPM

SEQ ID NO: 47574 - protein, 17 aa, Homo sapiens
  MAP TO AL034397.1; EXPRESSED IN HELA, SIGNAL = 1.8; EXPRESSED IN PLACENTA, SIGNAL = 1.6; EXPRESSED IN BONE MARROW, SIGNAL = 0.93; EXPRESSED IN LUNG, SIGNAL = 3.3; EXPRESSED IN FETAL LIVER, SIGNAL = 0.92; EST_HUMAN HIT: AV690218.1, EVALUE 6.00e-03
GCGTDPILRPEAFRVRT

SEQ ID NO: 47575 - protein, 50 aa, Homo sapiens
  MAP TO AL031669.12; EXPRESSED IN LUNG, SIGNAL = 1.7; EXPRESSED IN BT474, SIGNAL = 0.97; EXPRESSED IN FETAL LIVER, SIGNAL = 1.2; EXPRESSED IN HBL100, SIGNAL =   1; EXPRESSED IN HELA, SIGNAL = 0.96; EST_HUMAN HIT: BE172202.1, EVALUE 2.00e-21; SWISSPROT HIT: P13582, EVALUE 6.00e+00
KRRSGRQVKRRKYNEDLDFKVVDDDGETIAVLGAGRTSALSASTLAWQAE

SEQ ID NO: 47576 - protein, 48 aa, Homo sapiens
  MAP TO AC009408.2; EXPRESSED IN LUNG, SIGNAL =  12; EXPRESSED IN FETAL LIVER, SIGNAL =   1; EST_HUMAN HIT: AI139341.1, EVALUE 4.00e-17
QYLGSSHHSRCGGHVQAPLPEVHKGIVTSVFCLDQTIIDFLSKEKQRH

SEQ ID NO: 47577 - protein, 32 aa, Homo sapiens
  MAP TO AC009408.2; EXPRESSED IN LUNG, SIGNAL =  12; EXPRESSED IN FETAL LIVER, SIGNAL =   1; EST_HUMAN HIT: AU131423.1, EVALUE 2.00e-07
CLCFSFDRKSMIVWSKQKTEVTMPLCTSGSGA

SEQ ID NO: 47578 - protein, 55 aa, Homo sapiens
  MAP TO AF191252.1; EXPRESSED IN FETAL LIVER, SIGNAL = 0.93; EXPRESSED IN PLACENTA, SIGNAL = 1.2; EXPRESSED IN LUNG, SIGNAL = 4.2; EST_HUMAN HIT: AI161228.1, EVALUE 1.60e-01
VTIKIPPNPATGVRRALWIDSDLRCAPLGLSTGGGKSRRVKLGLGVPKFRGSDRN

SEQ ID NO: 47579 - protein, 18 aa, Homo sapiens
  MAP TO AL078624.19; EXPRESSED IN LUNG, SIGNAL = 6.8; EXPRESSED IN FETAL LIVER, SIGNAL = 1.1
HEPVVHLSGTALGVYSTL

SEQ ID NO: 47580 - protein, 38 aa, Homo sapiens
  MAP TO AC009477.2; EXPRESSED IN BT474, SIGNAL =   1; EXPRESSED IN FETAL LIVER, SIGNAL = 1.3; EXPRESSED IN HBL100, SIGNAL = 0.98; EST_HUMAN HIT: BF089281.1, EVALUE 1.00e-14; SWISSPROT HIT: Q04690, EVALUE 8.00e-13
QFVEQTLDIMKNLLDNHTEGSPEHLEQASIETMMLNLV

SEQ ID NO: 47581 - protein, 64 aa, Homo sapiens
  MAP TO AL049652.16; EXPRESSED IN BONE MARROW, SIGNAL = 0.99; EXPRESSED IN HELA, SIGNAL = 2.2; EXPRESSED IN PLACENTA, SIGNAL = 1.2; EXPRESSED IN HBL100, SIGNAL = 1.8; EXPRESSED IN BT474, SIGNAL = 1.5; EXPRESSED IN FETAL LIVER, SIGNAL = 0.98; EXPRESSED IN LUNG, SIGNAL = 1.3; EST_HUMAN HIT: H91032.1, EVALUE 8.00e-25; SWISSPROT HIT: Q14444, EVALUE 3.00e-23
VGTYHGSPDQSHQVTGNHQQPPQQNTGFPRSNQPYYNSRGVSRGGSRGARGLMNGYRGPANGFR

SEQ ID NO: 47582 - protein, 154 aa, Homo sapiens
  MAP TO AL109946.9; EXPRESSED IN FETAL LIVER, SIGNAL = 0.92; EXPRESSED IN BONE MARROW, SIGNAL = 1.3; EXPRESSED IN LUNG, SIGNAL = 1.1; SWISSPROT HIT: P52298, EVALUE 3.00e-50; EST_HUMAN HIT: BE616722.1, EVALUE 3.00e-49
KRPSACCPTSTMSKDLKILCKDPALELSCYRDHQFSGRKFQQEKLLKESSTLNMGNLSFYTTEEKIHELFSRSDIRNIFMGLDKIKKTACGFCFVECHNRADAENAMRFLTGTCLDEWIICTDWDVGFREGQQYGRGKSGGQVRDEFREDFHSG

SEQ ID NO: 47583 - protein, 73 aa, Homo sapiens
  MAP TO AF111168.2; EXPRESSED IN BT474, SIGNAL = 1.1; EXPRESSED IN BONE MARROW, SIGNAL = 1.7; EXPRESSED IN FETAL LIVER, SIGNAL =   1; EXPRESSED IN LUNG, SIGNAL = 0.64; EXPRESSED IN HBL100, SIGNAL = 0.88; SWISSPROT HIT: O15270, EVALUE 4.00e-29; EST_HUMAN HIT: AA043498.1, EVALUE 2.00e-21
MEGSIVRLPEVIALKKKYKAYLYLDEAHSIGALGPTGRGVVEYFGLDPEDVDVMMGTFTKSFGASGGYIGGKK

SEQ ID NO: 47584 - protein, 47 aa, Homo sapiens
  MAP TO AC007041.3; EXPRESSED IN HELA, SIGNAL = 0.99; EXPRESSED IN BT474, SIGNAL = 1.5; EXPRESSED IN HBL100, SIGNAL = 0.89; EXPRESSED IN LUNG, SIGNAL = 0.83; EXPRESSED IN BONE MARROW, SIGNAL = 0.74; EXPRESSED IN FETAL LIVER, SIGNAL = 0.8; SWISSPROT HIT: P25822, EVALUE 2.00e+00; EST_HUMAN HIT: BE839041.1, EVALUE 1.00e-06
PAVVPPQYYGVPWGVYPANLFQQQAAAAANNTASQQAASQAQPGQQQ

SEQ ID NO: 47585 - protein, 57 aa, Homo sapiens
  MAP TO AP000100.1; EXPRESSED IN FETAL LIVER, SIGNAL = 0.57; EXPRESSED IN LUNG, SIGNAL = 0.61; EXPRESSED IN HELA, SIGNAL = 0.76; SWISSPROT HIT: P39864, EVALUE 7.90e+00
VLQIILSSDPLLVVEEIASSHSIKNLLLLLLYLPPVECWLTARDLAYIITYLNPAMQ

SEQ ID NO: 47586 - protein, 42 aa, Homo sapiens
  MAP TO AC011201.1; EXPRESSED IN FETAL LIVER, SIGNAL = 1.2; EXPRESSED IN HELA, SIGNAL = 1.8; SWISSPROT HIT: Q54970, EVALUE 8.00e+00
DTMLLLINYPDMGRQFQEPPFGFSYDNSFYSKVRKKYEDSAK

SEQ ID NO: 47587 - protein, 112 aa, Homo sapiens
  MAP TO AC004895.2; EXPRESSED IN LUNG, SIGNAL = 0.72; EXPRESSED IN HELA, SIGNAL = 1.1; EXPRESSED IN BT474, SIGNAL = 1.1; EXPRESSED IN BONE MARROW, SIGNAL = 0.76; EXPRESSED IN HBL100, SIGNAL = 0.84; EXPRESSED IN FETAL LIVER, SIGNAL = 0.66; SWISSPROT HIT: P51612, EVALUE 4.00e+00; EST_HUMAN HIT: AW575816.1, EVALUE 3.00e-54
PVMNGKSKLNSSVLVPYGAESSEDSDEESKGLGKENGIGTIVSSHSPGQDAEDEEATPHELQEPMTLNGANSADSDSDPKENGLAPDGASCQGQPALHSENPFAKANGLPGK

SEQ ID NO: 47588 - protein, 123 aa, Homo sapiens
  MAP TO AC007543.4; EXPRESSED IN BT474, SIGNAL = 1.4; EXPRESSED IN FETAL LIVER, SIGNAL = 0.63; EXPRESSED IN PLACENTA, SIGNAL =   1; EXPRESSED IN LUNG, SIGNAL = 0.85; EST_HUMAN HIT: AI685950.1, EVALUE 7.00e-62; SWISSPROT HIT: P03967, EVALUE 3.00e-18
GEGFVLVYDITDRGSFEEVLPLKNILDEIKKPKNVTLILVGNKADLDHSRQVSTEEGEKLATELACAFYECSACTGEGNITEIFYELCREVRRRRMVQGKTRRRSSTTHVKQAINKMLTKISS

SEQ ID NO: 47589 - protein, 49 aa, Homo sapiens
  MAP TO AP000238.1; EXPRESSED IN FETAL LIVER, SIGNAL = 0.57; EXPRESSED IN LUNG, SIGNAL = 0.59; EXPRESSED IN HELA, SIGNAL = 0.62; EXPRESSED IN PLACENTA, SIGNAL = 0.61; SWISSPROT HIT: Q60934, EVALUE 1.00e-15; EST_HUMAN HIT: BF509857.1, EVALUE 2.00e-03
AIASHRASQLTVSSLQCHRHKPWRLGPRFMNLIKEASDAPSQPRGPSEH

SEQ ID NO: 47590 - protein, 33 aa, Homo sapiens
  MAP TO AF111168.2; EXPRESSED IN FETAL LIVER, SIGNAL = 0.61; EXPRESSED IN HBL100, SIGNAL = 0.78; EXPRESSED IN HELA, SIGNAL = 0.7; EXPRESSED IN BT474, SIGNAL = 1.1; EXPRESSED IN BONE MARROW, SIGNAL = 0.83; SWISSPROT HIT: P19711, EVALUE 2.80e+00
SEIWVHIKIKLFQMQLNENILQRKLKNNKVKDI

SEQ ID NO: 47591 - protein, 37 aa, Homo sapiens
  MAP TO AL049778.2; EXPRESSED IN FETAL LIVER, SIGNAL = 0.64; EXPRESSED IN LUNG, SIGNAL = 0.66; EXPRESSED IN PLACENTA, SIGNAL = 0.66; EST_HUMAN HIT: AA496111.1, EVALUE 2.60e-01; SWISSPROT HIT: P47990, EVALUE 7.20e-01
NRESEPRWGCCAGNGESEPPWGCCAGNRVSEPPWGCC

SEQ ID NO: 47592 - protein, 43 aa, Homo sapiens
  MAP TO AL049778.2; EXPRESSED IN FETAL LIVER, SIGNAL = 0.64; EXPRESSED IN LUNG, SIGNAL = 0.66; EXPRESSED IN PLACENTA, SIGNAL = 0.66; EST_HUMAN HIT: AW292486.1, EVALUE 4.80e-02; SWISSPROT HIT: P49866, EVALUE 2.10e+00
AQHPQGGSLTRLPAQHPQGGSLSPLPAQHPQRGSLSRLPGVHF

SEQ ID NO: 47593 - protein, 57 aa, Homo sapiens
  MAP TO AL049694.9; EXPRESSED IN FETAL LIVER, SIGNAL = 0.72; EXPRESSED IN LUNG, SIGNAL = 0.85; EXPRESSED IN HELA, SIGNAL = 1.5; EXPRESSED IN PLACENTA, SIGNAL = 0.9; EXPRESSED IN BONE MARROW, SIGNAL = 8.6; EXPRESSED IN HBL100, SIGNAL = 0.88; SWISSPROT HIT: P11586, EVALUE 5.00e-14; EST_HUMAN HIT: BF344101.1, EVALUE 8.00e-18
DIEISRGQTPKAVDVLAKEIGLLADEIEIYGKSKAKVRLSVLERLKDQADGKYVLVA

SEQ ID NO: 47594 - protein, 56 aa, Homo sapiens; identical to SEQ ID NO: 35747
  MAP TO AL035705.16; EXPRESSED IN BONE MARROW, SIGNAL = 1.1; EXPRESSED IN LUNG, SIGNAL = 1.2; EXPRESSED IN HBL100, SIGNAL = 1.4; EXPRESSED IN FETAL LIVER, SIGNAL = 0.97; EST_HUMAN HIT: AA826292.1, EVALUE 2.00e-27; SWISSPROT HIT: Q09137, EVALUE 2.00e-28

SEQ ID NO: 47595 - protein, 74 aa, Homo sapiens; identical to SEQ ID NO: 35748
  MAP TO AL035705.16; EXPRESSED IN BONE MARROW, SIGNAL = 1.1; EXPRESSED IN LUNG, SIGNAL = 1.2; EXPRESSED IN HBL100, SIGNAL = 1.4; EXPRESSED IN FETAL LIVER, SIGNAL = 0.97; EST_HUMAN HIT: BE677760.1, EVALUE 1.00e-29; SWISSPROT HIT: Q09137, EVALUE 8.00e-40

SEQ ID NO: 47596 - protein, 137 aa, Homo sapiens
  MAP TO Z99716.4; EXPRESSED IN FETAL LIVER, SIGNAL =   1; EXPRESSED IN PLACENTA, SIGNAL = 9.7; EXPRESSED IN BONE MARROW, SIGNAL = 0.9; EXPRESSED IN LUNG, SIGNAL = 3.2; SWISSPROT HIT: P01047, EVALUE 9.10e+00; EST_HUMAN HIT: BE311581.1, EVALUE 6.00e+00
IVYGAPPAGYGAPPPGYGAPPAGYGAQPVGNEGPPVGYRASPVRYGAPPLGYGAPPAGYGAPPLGYGAPPLGYGTPPLGYGAPPLGYGAPPAGNEGPPAGYRASPAGSGARPQESTAAQAPENEASLPSASSSQVHS

SEQ ID NO: 47597 - protein, 36 aa, Homo sapiens
  MAP TO Z99716.4; EXPRESSED IN FETAL LIVER, SIGNAL =   1; EXPRESSED IN PLACENTA, SIGNAL = 9.7; EXPRESSED IN BONE MARROW, SIGNAL = 0.9; EXPRESSED IN LUNG, SIGNAL = 3.2
GLHLRRLRMDLRRGGRGKRSLVFRSLGCCRFLRPGS

SEQ ID NO: 47598 - protein, 230 aa, Homo sapiens
  MAP TO AC007655.1; EXPRESSED IN LUNG, SIGNAL = 0.67; EXPRESSED IN PLACENTA, SIGNAL = 0.68; EXPRESSED IN FETAL LIVER, SIGNAL = 0.74; EST_HUMAN HIT: AA456282.1, EVALUE 9.00e-65; SWISSPROT HIT: P09247, EVALUE 1.60e-01
DHIGNMAQSDFLYPENPKRREEVNRLHQQLLDCLSDSFDVTNKLTEVLNMHLGCRLASIEMKRDGTIKENCDLIIQAIMKIQKELQKVDEALKDKLEPTLYRKLQDIKEKETDKIAIVQKVISVILGEATSAASAVAVKLVGSNVTTGIINKLVTVLAQIGASLLGSIGVAVLGLGIDMIVRAILGAVEKTQLQAAIKSYEKHLVEFKSASEKYNHAITEVINTVKHQMK

SEQ ID NO: 47599 - protein, 22 aa, Homo sapiens
  MAP TO AC007655.1; EXPRESSED IN LUNG, SIGNAL = 0.67; EXPRESSED IN PLACENTA, SIGNAL = 0.68; EXPRESSED IN FETAL LIVER, SIGNAL = 0.74
IILEIWPKVTSFTQRTQKGGKK

SEQ ID NO: 47600 - protein, 136 aa, Homo sapiens
  MAP TO AL009179.1; EXPRESSED IN LUNG, SIGNAL = 1.1; EXPRESSED IN HELA, SIGNAL =   1; EXPRESSED IN HBL100, SIGNAL = 1.4; EXPRESSED IN FETAL LIVER, SIGNAL = 1.1; EST_HUMAN HIT: BE336654.1, EVALUE 1.00e-71; SWISSPROT HIT: P16106, EVALUE 2.00e-72
MARTKQTARKSTGGKAPRKQLATKAARKSAPATGGVKKPHRYRPGTVALREIRRYQKSTELLIRKLPFQRLVREIAQDFKTDLRFQSSAVMALQEACEAYLVGLFEDTNLCAIHAKRVTIMPKDIQLARRIRGERA

SEQ ID NO: 47601 - protein, 28 aa, Homo sapiens
  MAP TO AL121675.8; EXPRESSED IN HELA, SIGNAL =   1; EXPRESSED IN FETAL LIVER, SIGNAL = 1.3; EXPRESSED IN BONE MARROW, SIGNAL =   1; SWISSPROT HIT: Q38854, EVALUE 2.80e+00
SGAEKSPHRFLTGQRGEGGRVRVSNGQL

SEQ ID NO: 47602 - protein, 23 aa, Homo sapiens
  MAP TO AC005227.2; EXPRESSED IN FETAL LIVER, SIGNAL =   5; EXPRESSED IN BONE MARROW, SIGNAL = 0.97; EXPRESSED IN LUNG, SIGNAL = 3.5
FLWRTLTHMLNGTCLPPFLCPRT

SEQ ID NO: 47603 - protein, 378 aa, Homo sapiens
  MAP TO AL109823.11; EXPRESSED IN FETAL LIVER, SIGNAL = 0.93; EXPRESSED IN BT474, SIGNAL = 1.1; EXPRESSED IN HELA, SIGNAL = 2.5; EXPRESSED IN PLACENTA, SIGNAL = 1.1; EXPRESSED IN HBL100, SIGNAL = 1.9; SWISSPROT HIT: Q9ZDE6, EVALUE 1.50e+00; EST_HUMAN HIT: AU125474.1, EVALUE 1.00e-129
RLSKALIQVLELDVADIKIVEERRWNSDDLNASPKTSATQPWNRIQRRYFRFFTDERIFMLLRQVCQLLGYYGNLYLLVDHFMELYHQSVVYRKQAAMILNELVTGAAGLEVEDLHEKHIKTNPEELREIVTSILEEYTSQENWYLVTCLETEEMGEELMMEHPGLQAITSGEHTCQVTSFLAFSKPSPTICSMNSNIWQICIQLEGIGQFAYALGKDFCLLLMSALYPVLEKAGDQTLLISQVATSTMMDVCRACGYDSLQHLINQNSDYLVNGISLNLRHLALHPHTPKVLEVMLRNSDANLLPLVADVVQDVLATLDQFYDKRAASFVSVLHALMAALGTLRALFNADVWGTGLSLLVCLASFFALFVVMLWRTF

SEQ ID NO: 47604 - protein, 25 aa, Homo sapiens
  MAP TO AP000402.1; EXPRESSED IN FETAL LIVER, SIGNAL = 5.6; EXPRESSED IN BT474, SIGNAL = 1.2
FETLPTYSVLQLKSWAQSILYLERR

SEQ ID NO: 47605 - protein, 445 aa, Homo sapiens; identical to SEQ ID NO: 46601
  MAP TO AF124731.2; EXPRESSED IN BT474, SIGNAL = 1.6; EXPRESSED IN HBL100, SIGNAL =   1; EXPRESSED IN FETAL LIVER, SIGNAL = 1.6; EXPRESSED IN LUNG, SIGNAL = 1.3; EXPRESSED IN HELA, SIGNAL = 1.7; EXPRESSED IN PLACENTA, SIGNAL = 0.74; EXPRESSED IN BONE MARROW, SIGNAL = 0.72; SWISSPROT HIT: O14867, EVALUE 0.00e+00; EST_HUMAN HIT: AU134963.1, EVALUE 1.00e-130

SEQ ID NO: 47606 - protein, 48 aa, Homo sapiens
  MAP TO AC005534.2; EXPRESSED IN FETAL LIVER, SIGNAL = 0.7; EXPRESSED IN HBL100, SIGNAL = 7.3; EXPRESSED IN BT474, SIGNAL = 0.6; SWISSPROT HIT: P34535, EVALUE 9.00e-05; EST_HUMAN HIT: AF107454.1, EVALUE 5.00e-21
LLGDFGRFNWLGNFYIVLSYNLLFAIVTTLCLVRKFTSAVREELFKAL

SEQ ID NO: 47607 - protein, 27 aa, Homo sapiens
  MAP TO AC007860.6; EXPRESSED IN HELA, SIGNAL = 0.63; EXPRESSED IN BONE MARROW, SIGNAL = 0.66; EXPRESSED IN FETAL LIVER, SIGNAL = 0.58; EXPRESSED IN LUNG, SIGNAL = 0.8; EXPRESSED IN PLACENTA, SIGNAL = 0.77
NSQPVRDKCVMKAASHFDCWYNVCVLK

SEQ ID NO: 47608 - protein, 109 aa, Homo sapiens
  MAP TO AC005883.6; EXPRESSED IN PLACENTA, SIGNAL = 0.59; EXPRESSED IN BT474, SIGNAL = 0.6; EXPRESSED IN HBL100, SIGNAL =   1; EXPRESSED IN LUNG, SIGNAL = 0.65; EXPRESSED IN HELA, SIGNAL = 0.91; EXPRESSED IN FETAL LIVER, SIGNAL = 0.65; EST_HUMAN HIT: W01596.1, EVALUE 7.00e-09; SWISSPROT HIT: O84666, EVALUE 7.70e-01
DAIYAVANTWNTWNTVTKDTVEHAWHKLWPATTFSDDDEQGGDFEGFCMSSEENMMSNLLTYAKNIPSESISKPEEMDIKEVFNINNKVTVVHSLTDGEIAKVIVNQGD

SEQ ID NO: 47609 - protein, 43 aa, Homo sapiens
  MAP TO AC007684.2; EXPRESSED IN LUNG, SIGNAL = 0.65; EXPRESSED IN BT474, SIGNAL = 0.72; EXPRESSED IN FETAL LIVER, SIGNAL = 0.62; EST_HUMAN HIT: W27394.1, EVALUE 4.00e-19; SWISSPROT HIT: P46549, EVALUE 1.00e-06
MAPEVAAVERKGGYNQLCDLWAVGITAIELAELQPPMFDLHPM

SEQ ID NO: 47610 - protein, 27 aa, Homo sapiens
  MAP TO AC007684.2; EXPRESSED IN LUNG, SIGNAL = 0.65; EXPRESSED IN BT474, SIGNAL = 0.72; EXPRESSED IN FETAL LIVER, SIGNAL = 0.62; EST_HUMAN HIT: AA258988.1, EVALUE 1.00e-08
WLQKLQLLRGRGVTINSVISGQWESLP

SEQ ID NO: 47611 - protein, 37 aa, Homo sapiens
  MAP TO AC007006.3; EXPRESSED IN BONE MARROW, SIGNAL = 0.75; EXPRESSED IN HELA, SIGNAL = 0.61; EXPRESSED IN PLACENTA, SIGNAL = 0.68; EXPRESSED IN FETAL LIVER, SIGNAL = 1.1; EXPRESSED IN LUNG, SIGNAL = 0.6
SVKGFQQMDGLGTQFLPHSTISGIISLRKASPSLQKL

SEQ ID NO: 47612 - protein, 27 aa, Homo sapiens
  MAP TO AC007402.3; EXPRESSED IN FETAL LIVER, SIGNAL = 0.62; EXPRESSED IN LUNG, SIGNAL = 0.59
FSLWKVKPCLSSLKFSQIEGVQRLCSC

SEQ ID NO: 47613 - protein, 114 aa, Homo sapiens
  MAP TO AC004916.2; EXPRESSED IN FETAL LIVER, SIGNAL = 0.75; EXPRESSED IN PLACENTA, SIGNAL = 0.98; EXPRESSED IN BT474, SIGNAL = 1.1; EXPRESSED IN BONE MARROW, SIGNAL = 0.64; EST_HUMAN HIT: AU138624.1, EVALUE 7.90e-01; SWISSPROT HIT: P28339, EVALUE 2.40e+00
PGRARPRPAPGAAAGAPSGREGLAGWRARLGFRPAPGAGVIPSRARGGAGPSWPRSGRYKRAAAAARPARSWERDGRPPRRGKMLDGSPLARWLAAAFGLTLLLAALRPSAAYF

SEQ ID NO: 47614 - protein, 62 aa, Homo sapiens
  MAP TO AC009958.1; EXPRESSED IN BONE MARROW, SIGNAL = 0.9; EXPRESSED IN FETAL LIVER, SIGNAL = 0.89; EST_HUMAN HIT: AV685287.1, EVALUE 9.00e-03; SWISSPROT HIT: Q62470, EVALUE 2.30e-01
AADGGDEISPPTVTNPGKDSKVQVIITINNKIQNLTWFLLAPIQAATNIVTASQLMVAFQLL

SEQ ID NO: 47615 - protein, 32 aa, Homo sapiens
  MAP TO AC009958.1; EXPRESSED IN BONE MARROW, SIGNAL = 0.9; EXPRESSED IN FETAL LIVER, SIGNAL = 0.89
YAASSASRLLMEGMKSVHPLSLILARTARCRS

SEQ ID NO: 47616 - protein, 60 aa, Homo sapiens
  MAP TO AL008633.1; EXPRESSED IN HBL100, SIGNAL = 0.98; EXPRESSED IN HELA, SIGNAL = 1.1; EXPRESSED IN BT474, SIGNAL = 0.92; EXPRESSED IN FETAL LIVER, SIGNAL =   1; EXPRESSED IN BONE MARROW, SIGNAL =   1; EXPRESSED IN PLACENTA, SIGNAL = 1.2; SWISSPROT HIT: P38708, EVALUE 5.80e+00
DRSHTHCAFEQLVGTNTRSQKQCRDKGSIPATVVALQSWLALTPAFLLSRKQNSLDPRHM

SEQ ID NO: 47617 - protein, 21 aa, Homo sapiens
  MAP TO AL031599.1; EXPRESSED IN FETAL LIVER, SIGNAL = 0.94; EXPRESSED IN BONE MARROW, SIGNAL = 1.6; EXPRESSED IN PLACENTA, SIGNAL = 0.9; EST_HUMAN HIT: AI263479.1, EVALUE 3.80e-01
CVPYKERKFISHSLGIWKTQD

SEQ ID NO: 47618 - protein, 48 aa, Homo sapiens
  MAP TO AL023656.8; EXPRESSED IN BONE MARROW, SIGNAL =   1; EXPRESSED IN HBL100, SIGNAL = 0.88; EXPRESSED IN FETAL LIVER, SIGNAL = 0.65; EXPRESSED IN BT474, SIGNAL = 0.79; EXPRESSED IN PLACENTA, SIGNAL = 0.72; EXPRESSED IN HELA, SIGNAL = 0.89
LFVQSSLSAKERHLAAVASALWRHFFSFLKSQRMSQVVPFSQLADAAA

SEQ ID NO: 47619 - protein, 130 aa, Homo sapiens
  MAP TO AC005037.2; EXPRESSED IN BT474, SIGNAL = 0.86; EXPRESSED IN HELA, SIGNAL = 0.68; EXPRESSED IN PLACENTA, SIGNAL = 0.66; EXPRESSED IN BONE MARROW, SIGNAL = 1.3; EXPRESSED IN HBL100, SIGNAL = 1.9; EXPRESSED IN FETAL LIVER, SIGNAL = 0.8; EXPRESSED IN LUNG, SIGNAL = 0.78; EST_HUMAN HIT: BE563150.1, EVALUE 4.00e-04; SWISSPROT HIT: Q05319, EVALUE 1.90e+00
CTVCLLAVPGPNALSTLQVVSTAITHFEPARCGRQPRTTRGTATSRMVTTTRWTSTGKILACRYHVAVALPRLASSKSSSGHCAAGMRPARPSTLRRGPIQGQSPGAHRGGLPAGEGQLPALAQLEKLLK

SEQ ID NO: 47620 - protein, 62 aa, Homo sapiens
  MAP TO AL096827.3; EXPRESSED IN PLACENTA, SIGNAL = 0.65; EXPRESSED IN FETAL LIVER, SIGNAL = 0.57; EXPRESSED IN LUNG, SIGNAL = 0.66; EST_HUMAN HIT: AW505249.1, EVALUE 6.70e-02; SWISSPROT HIT: O79671, EVALUE 2.60e+00
TPIVNSSHIQLFSQVFHLDVQYALNSNMPKSELLVFIYKPVPSTDFLTLINGQFILTIAQHK

SEQ ID NO: 47621 - protein, 37 aa, Homo sapiens
  MAP TO AL050327.6; EXPRESSED IN HELA, SIGNAL = 0.99; EXPRESSED IN PLACENTA, SIGNAL = 0.7; EXPRESSED IN FETAL LIVER, SIGNAL = 0.61; EXPRESSED IN LUNG, SIGNAL = 0.69; SWISSPROT HIT: P41357, EVALUE 8.10e+00
LKNPNFISCHRSMWLMGLRRNDVICPSNLAQEAGGEI

SEQ ID NO: 47622 - protein, 20 aa, Homo sapiens
  MAP TO AL050327.6; EXPRESSED IN HELA, SIGNAL = 0.99; EXPRESSED IN PLACENTA, SIGNAL = 0.7; EXPRESSED IN FETAL LIVER, SIGNAL = 0.61; EXPRESSED IN LUNG, SIGNAL = 0.69
EESKFYFLPSIHVVNGPEEE

SEQ ID NO: 47623 - protein, 56 aa, Homo sapiens; identical to SEQ ID NO: 40289
  MAP TO AL050337.6; EXPRESSED IN FETAL LIVER, SIGNAL = 0.67; EXPRESSED IN LUNG, SIGNAL = 0.77; SWISSPROT HIT: O28438, EVALUE 1.20e+00; EST_HUMAN HIT: AV714177.1, EVALUE 4.00e-26

SEQ ID NO: 47624 - protein, 82 aa, Homo sapiens
  MAP TO AC011236.2; EXPRESSED IN BONE MARROW, SIGNAL = 0.93; EXPRESSED IN HBL100, SIGNAL = 2.5; EXPRESSED IN HELA, SIGNAL = 2.2; EXPRESSED IN PLACENTA, SIGNAL = 1.1; EXPRESSED IN BT474, SIGNAL = 2.3; EXPRESSED IN FETAL LIVER, SIGNAL = 1.1; SWISSPROT HIT: P08578, EVALUE 2.00e-16; EST_HUMAN HIT: BF680487.1, EVALUE 6.00e-31
RRCLDSGSCSQRQRAGVLFVKFHHGIPWPGPESAEGEDAPINLIFRYLQNRSQIQVWLYEQVNMRTEGCIIGFNEYTNLVIR

SEQ ID NO: 47625 - protein, 315 aa, Homo sapiens
  MAP TO AC009974.3; EXPRESSED IN LUNG, SIGNAL = 1.2; EXPRESSED IN BT474, SIGNAL = 1.2; EXPRESSED IN FETAL LIVER, SIGNAL = 1.1; EST_HUMAN HIT: AW501089.1, EVALUE 9.00e-84; SWISSPROT HIT: Q62441, EVALUE 4.10e-01
PYLCLAAAGENPSGKSLASAISGKIPSPLSSSYKPMLNNNSFMWPNSTPVPLLQTTQGLKPVSPPKIQPVSWHHSGGTGDCAPQPVDHKVPKSIGTVPADASAHIALSTASSHDTSTTSVASSWYNRNNLAMRAEPLSCALDDSSDSQDPTKEIRFTEAVRKLTARGFEKMPRQGCQLEQSSFLNPSFQWNVLNRSRRWKPPAVNQQFPQEDAGSVRRVLPGASDTLGLDNTVFCTKRISIHLLASHASGLNHNPACESVIDSSAFGEGKAPGPPFPQTLGIANVATRLSSIQLGQSEKERPEEARELDSSDRDI

SEQ ID NO: 47626 - protein, 24 aa, Homo sapiens
  MAP TO AC011502.1; EXPRESSED IN HELA, SIGNAL = 0.94; EXPRESSED IN FETAL LIVER, SIGNAL = 0.96; EST_HUMAN HIT: AI033706.1, EVALUE 1.00e-08; SWISSPROT HIT: Q84291, EVALUE 4.90e+00
SEKQMPHVLTHTWTLKIGCTWKQR

SEQ ID NO: 47627 - protein, 36 aa, Homo sapiens
  MAP TO AL022100.13; EXPRESSED IN FETAL LIVER, SIGNAL = 1.9; EXPRESSED IN HELA, SIGNAL = 5.3; EST_HUMAN HIT: AW581039.1, EVALUE 1.70e+00
HLSPSLAEAPQGQALCLLHLCISGNLHKCPLHCRGS

SEQ ID NO: 47628 - protein, 33 aa, Homo sapiens
  MAP TO AC008278.1; EXPRESSED IN PLACENTA, SIGNAL = 0.6; EXPRESSED IN BT474, SIGNAL = 0.68; EXPRESSED IN HBL100, SIGNAL = 0.78; EXPRESSED IN FETAL LIVER, SIGNAL = 0.59; EXPRESSED IN HELA, SIGNAL =   1; EST_HUMAN HIT: BE782043.1, EVALUE 7.00e-11; SWISSPROT HIT: Q92499, EVALUE 5.00e-12
VDIVVGTPGRLDDLVSTGKLNLSQVRFLVLDEA

SEQ ID NO: 47629 - protein, 60 aa, Homo sapiens
  MAP TO AJ010770.1; EXPRESSED IN BT474, SIGNAL = 1.1; EXPRESSED IN FETAL LIVER, SIGNAL = 0.96; EXPRESSED IN LUNG, SIGNAL =   1; EXPRESSED IN HELA, SIGNAL = 0.96; SWISSPROT HIT: O13710, EVALUE 3.90e-01
DDMEKLGLAIKESDAMSTQDQHVLFGKFAQIIQEKEVEIDQLNEQVTKLQQQLKITTDNK

SEQ ID NO: 47630 - protein, 55 aa, Homo sapiens
  MAP TO AC005064.2; EXPRESSED IN FETAL LIVER, SIGNAL = 0.67; SWISSPROT HIT: O43511, EVALUE 5.00e-06
PFAVISLMIGGVAVRLVPDDIVIPGGVNATNGTEARDALRVKVAMSVTLLSGIIQ

SEQ ID NO: 47631 - protein, 110 aa, Homo sapiens
  MAP TO Z94801.1; EXPRESSED IN BT474, SIGNAL = 1.3; EXPRESSED IN FETAL LIVER, SIGNAL = 1.1; EXPRESSED IN HELA, SIGNAL =   1; EXPRESSED IN LUNG, SIGNAL =   5; EXPRESSED IN BONE MARROW, SIGNAL = 1.2; SWISSPROT HIT: Q04656, EVALUE 1.00e-47; EST_HUMAN HIT: AI074620.1, EVALUE 1.00e-07
EAVSPGLYRVSITSEVESTSNSPSSSSLQKIPLNVVSQPLTQETVINIDGMTCNSCVQSIEGVISKKPGVKSIRVSLANSNGTVEYDPLLTSPETLRGAIEDMGFDATLS

SEQ ID NO: 47632 - protein, 58 aa, Homo sapiens
  MAP TO AC007052.4; EXPRESSED IN LUNG, SIGNAL = 0.94; EXPRESSED IN BT474, SIGNAL = 1.1; EXPRESSED IN FETAL LIVER, SIGNAL = 0.94; SWISSPROT HIT: P34723, EVALUE 2.60e-02; EST_HUMAN HIT: BE882521.1, EVALUE 6.00e-28
GTAATNNISATPTFLFFRNKVRIDQYQGADAVGLEEKIKQHLENDPGSNEDTDIPKGY

SEQ ID NO: 47633 - protein, 20 aa, Homo sapiens
  MAP TO AC007052.4; EXPRESSED IN LUNG, SIGNAL = 0.94; EXPRESSED IN BT474, SIGNAL = 1.1; EXPRESSED IN FETAL LIVER, SIGNAL = 0.94; EST_HUMAN HIT: BE887614.1, EVALUE 1.00e-05
EQLPPTIYQQHLHFCFFETK

SEQ ID NO: 47634 - protein, 51 aa, Homo sapiens
  MAP TO AJ010598.1; EXPRESSED IN HELA, SIGNAL = 0.69; EXPRESSED IN FETAL LIVER, SIGNAL = 0.6; EXPRESSED IN PLACENTA, SIGNAL = 0.61; EST_HUMAN HIT: AA526219.1, EVALUE 2.00e-23; SWISSPROT HIT: Q9UHP3, EVALUE 2.00e-24
DREVNNGLIIMNEFIVPFLPLLLVDEMEEKDILAVEDMRNRWCSYLGQEME

SEQ ID NO: 47635 - protein, 82 aa, Homo sapiens
  MAP TO AL009031.1; EXPRESSED IN FETAL LIVER, SIGNAL = 6.1; EST_HUMAN HIT: AW612517.1, EVALUE 7.00e-43; SWISSPROT HIT: P54253, EVALUE 1.00e-43
VSVEVLVEYPFFVFGQGWSSCCPERTSQLFDLPCSKLSVGDVCISLTLKNLKNGSVKKGQPVDPASVLLKHSKADGLAGSRH

SEQ ID NO: 47636 - protein, 43 aa, Homo sapiens
  MAP TO AL009031.1; EXPRESSED IN FETAL LIVER, SIGNAL = 6.1; EST_HUMAN HIT: AW612517.1, EVALUE 1.00e-19; SWISSPROT HIT: P08489, EVALUE 7.00e-01
KGPARGSRQRPAEALKGRRPGGQQTQVCRAGKRNQPGECPDAL

SEQ ID NO: 47637 - protein, 172 aa, Homo sapiens
  MAP TO AC007382.2; EXPRESSED IN FETAL LIVER, SIGNAL = 1.5; EXPRESSED IN HELA, SIGNAL = 0.72; SWISSPROT HIT: O43405, EVALUE 7.00e-50; EST_HUMAN HIT: BF037138.1, EVALUE 5.00e-73
AVCRTNGFYSLHVQSWFGLHKTLQPLVKRVCDTDRLACSKTCLNSADIGFVIDGSSSVGTGNFRTVLQFVTNLTKEFEISDTDTRIGAVQYTYEQRLEFGFDKYSSKPDILNAIKRVGYWSGGTSTGAAINFALEQLFKKSKPNKRKLMILITDGRSYDDVRIPAMAAHLKG

SEQ ID NO: 47638 - protein, 34 aa, Homo sapiens
  MAP TO AC007382.2; EXPRESSED IN FETAL LIVER, SIGNAL = 1.5; EXPRESSED IN HELA, SIGNAL = 0.72; EST_HUMAN HIT: BF037138.1, EVALUE 5.00e-10
GPSPLSSRPCAEQTASTRSTCRAGLASTRPCSLW

SEQ ID NO: 47639 - protein, 67 aa, Homo sapiens
  MAP TO AC006474.3; EXPRESSED IN FETAL LIVER, SIGNAL = 0.64; EXPRESSED IN LUNG, SIGNAL = 0.68; EXPRESSED IN PLACENTA, SIGNAL = 0.78; EXPRESSED IN BONE MARROW, SIGNAL = 0.7; EST_HUMAN HIT: AA831240.1, EVALUE 9.70e+00
MLAIIVITARPVNERVLPYTYSILNTICCTSKYLDQAIVVVVTKNVGVGKRKIMQRLADSIHSDRPK

SEQ ID NO: 47640 - protein, 54 aa, Homo sapiens
  MAP TO AC004885.2; EXPRESSED IN FETAL LIVER, SIGNAL = 0.68; EXPRESSED IN BONE MARROW, SIGNAL =   1; EST_HUMAN HIT: BF446990.1, EVALUE 6.40e+00; SWISSPROT HIT: P19319, EVALUE 1.20e+00
SSGLQEWSLDKQQQYFLDYCIRCADSQHCVLLPHTYEIRNYGAETQQFVFQQIP

SEQ ID NO: 47641 - protein, 34 aa, Homo sapiens
  MAP TO AC007253.2; EXPRESSED IN FETAL LIVER, SIGNAL = 0.97; EXPRESSED IN PLACENTA, SIGNAL = 0.59; EST_HUMAN HIT: AW160828.1, EVALUE 5.00e-07
RMIPLQRGPGMPVKMLRPTMTTSPHQHREFLKKQ

SEQ ID NO: 47642 - protein, 30 aa, Homo sapiens
  MAP TO AC011415.1; EXPRESSED IN LUNG, SIGNAL = 1.3; EXPRESSED IN FETAL LIVER, SIGNAL = 1.3
EFKKLYKQHPVNLFKTVAHGNSFPLNADWD

SEQ ID NO: 47643 - protein, 59 aa, Homo sapiens
  MAP TO AC005902.7; EXPRESSED IN BONE MARROW, SIGNAL = 1.2; EXPRESSED IN HBL100, SIGNAL = 0.8; EXPRESSED IN HELA, SIGNAL = 0.73; EXPRESSED IN FETAL LIVER, SIGNAL = 0.64; EST_HUMAN HIT: H10248.1, EVALUE 7.00e-21; SWISSPROT HIT: Q09436, EVALUE 2.60e+00
WNTTTTTQPPGTLQLACSTSAAGTEPPPWGARCLSAGATMALASSALPRCTALWQTSGA

SEQ ID NO: 47644 - protein, 49 aa, Homo sapiens
  MAP TO AC012078.1; EXPRESSED IN FETAL LIVER, SIGNAL = 0.97; EST_HUMAN HIT: AU138754.1, EVALUE 2.30e+00
MAVPLILSPPQICVAPKAPLQLSPFEASYERTFLYFDFLLGEEIATITQ

SEQ ID NO: 47645 - protein, 21 aa, Homo sapiens
  MAP TO AC012078.1; EXPRESSED IN FETAL LIVER, SIGNAL = 0.97
WQYLLSLALLRSVLPLRLPCN

SEQ ID NO: 47646 - protein, 26 aa, Homo sapiens
  MAP TO AC007024.4; EXPRESSED IN BT474, SIGNAL = 0.76; EXPRESSED IN HELA, SIGNAL = 0.61; EXPRESSED IN BONE MARROW, SIGNAL = 0.69; EXPRESSED IN FETAL LIVER, SIGNAL = 0.59; EXPRESSED IN PLACENTA, SIGNAL = 0.79
LCRIVSNLVSCSFMKDEVRRKAQNFI

SEQ ID NO: 47647 - protein, 36 aa, Homo sapiens; identical to SEQ ID NO: 46789
  MAP TO AC007092.3; EXPRESSED IN FETAL LIVER, SIGNAL =  20

SEQ ID NO: 47648 - protein, 34 aa, Homo sapiens
  MAP TO AC007092.3; EXPRESSED IN FETAL LIVER, SIGNAL =  20
IHLKETRAVLASQICKRSMSPSTQNLPGVFKIMQ

SEQ ID NO: 47649 - protein, 53 aa, Homo sapiens
  MAP TO Z83826.12; EXPRESSED IN BONE MARROW, SIGNAL = 0.73; EXPRESSED IN HBL100, SIGNAL = 0.96; EXPRESSED IN FETAL LIVER, SIGNAL = 0.57; EXPRESSED IN HELA, SIGNAL = 0.62; SWISSPROT HIT: O52399, EVALUE 5.90e+00; EST_HUMAN HIT: AA813575.1, EVALUE 3.00e-22
NRAVSSGPSLLTVFLGVVCIAALMLPTLGDVESLVPLYLHLSVNQKLVAAYIL

SEQ ID NO: 47650 - protein, 346 aa, Homo sapiens
  MAP TO AC004526.1; EXPRESSED IN HBL100, SIGNAL = 1.1; EXPRESSED IN PLACENTA, SIGNAL = 0.95; EXPRESSED IN FETAL LIVER, SIGNAL = 0.93; EXPRESSED IN LUNG, SIGNAL = 2.6; EXPRESSED IN BONE MARROW, SIGNAL = 4.9; EST_HUMAN HIT: AA805897.1, EVALUE 9.00e-92; SWISSPROT HIT: P34910, EVALUE 0.00e+00
TETITTEKQSQPTLFTSSMSQVLANSQNTTGNPLGQPTQFSDTFSGQSISPAKVTAGQPTPAVYTSSEKPEAHTSAGQPLAYNTKQPTPIANTSSQQAVFTSARQLPSARTSTTQPPKSFVYTFTQQSSSVQIPSRKQITVHNPSTQPTSTVKNSPRSTPGFILDTTSNKQTPQKNNYNSIAAILIGVLLTSMLVAIIIIVLWKCLRKPVLNDQNWAGRSPFADGETPDICMDNIRENEISTKRTSIISLTPWKPSKSTLLADDLEIKLFESSENIEDSNNPKTEKIKDQVNGTSEDSADGSTVGTAVSSSDDADLPPPPPLLDLEGQESNQSDQTHNDNCISSSK

SEQ ID NO: 47651 - protein, 23 aa, Homo sapiens
  MAP TO AC004526.1; EXPRESSED IN HBL100, SIGNAL = 1.1; EXPRESSED IN PLACENTA, SIGNAL = 0.95; EXPRESSED IN FETAL LIVER, SIGNAL = 0.93; EXPRESSED IN LUNG, SIGNAL = 2.6; EXPRESSED IN BONE MARROW, SIGNAL = 4.9; EST_HUMAN HIT: H62006.1, EVALUE 2.00e-04
RDNYNREAVTAYLIHIINVTGIG

SEQ ID NO: 47652 - protein, 47 aa, Homo sapiens
  MAP TO AC007021.2; EXPRESSED IN HBL100, SIGNAL = 0.76; EXPRESSED IN FETAL LIVER, SIGNAL = 0.57; EXPRESSED IN LUNG, SIGNAL = 0.82; EXPRESSED IN PLACENTA, SIGNAL = 0.75; EXPRESSED IN BT474, SIGNAL = 0.72; EXPRESSED IN BONE MARROW, SIGNAL = 1.5; EXPRESSED IN HELA, SIGNAL = 0.63; EST_HUMAN HIT: W23667.1, EVALUE 1.00e-05; SWISSPROT HIT: Q26601, EVALUE 2.00e+00
RLDFSGIEPDIKPFEEKCNKRFLVNCHDLTFNILGQIGDNAKGPPTN

SEQ ID NO: 47653 - protein, 39 aa, Homo sapiens
  MAP TO AC009226.2; EXPRESSED IN FETAL LIVER, SIGNAL = 3.5
TCIGIVNPCWNLRQLRTYGWMQKLPTMPMHLTWSVYTSL

SEQ ID NO: 47654 - protein, 38 aa, Homo sapiens
  MAP TO AC007001.2; EXPRESSED IN FETAL LIVER, SIGNAL = 0.61; EST_HUMAN HIT: H84654.1, EVALUE 7.30e+00; SWISSPROT HIT: P40615, EVALUE 4.70e+00
KVETMLSNSSSLSGKHNDELGSLHPAVKGTEKLSRAIF

SEQ ID NO: 47655 - protein, 39 aa, Homo sapiens
  MAP TO AC007001.2; EXPRESSED IN FETAL LIVER, SIGNAL = 0.61; EST_HUMAN HIT: BE546315.1, EVALUE 1.30e-01; SWISSPROT HIT: Q60519, EVALUE 6.20e+00
GKWRLCSPTPAPSLESIMTSWVLCTQQSKVLRSCQELFS

SEQ ID NO: 47656 - protein, 75 aa, Homo sapiens [sequence omitted]

SEQ ID NO: 47657 - protein, 39 aa, Homo sapiens
  MAP TO AC007877.3; EXPRESSED IN BONE MARROW, SIGNAL = 0.72; EXPRESSED IN HBL100, SIGNAL = 1.5; EXPRESSED IN FETAL LIVER, SIGNAL = 0.65; EXPRESSED IN LUNG, SIGNAL = 0.68; EXPRESSED IN BT474, SIGNAL = 0.65; EXPRESSED IN HELA, SIGNAL = 0.71; EST_HUMAN HIT: AI830965.1, EVALUE 2.80e+00
RKQWWFSVTLLHSLVCSPSLSITLMILNFMVTTFAIFTK

SEQ ID NO: 47658 - protein, 32 aa, Homo sapiens
  MAP TO AC006560.8; EXPRESSED IN FETAL LIVER, SIGNAL = 0.84; EXPRESSED IN HELA, SIGNAL = 0.73; EXPRESSED IN PLACENTA, SIGNAL = 0.59
AHSRFSRSQSSFCSRHSRDSCDPATSYAHLGS

SEQ ID NO: 47659 - protein, 36 aa, Homo sapiens
  MAP TO AC011376.1; EXPRESSED IN FETAL LIVER, SIGNAL =   4; SWISSPROT HIT: P34356, EVALUE 2.80e+00; EST_HUMAN HIT: AA829460.1, EVALUE 6.60e+00
FLPPPMFTLLFYYVLTSACGRWCSGRVPFRGFLNTT

SEQ ID NO: 47660 - protein, 44 aa, Homo sapiens
  MAP TO AC010727.1; EXPRESSED IN FETAL LIVER, SIGNAL = 0.96; SWISSPROT HIT: P43622, EVALUE 4.60e+00
LLLLLTMIISIPAASKSTAPSQYISCRDPQRGQGGRRGRTAFLP

SEQ ID NO: 47661 - protein, 41 aa, Homo sapiens
  MAP TO AC011395.1; EXPRESSED IN FETAL LIVER, SIGNAL =   1
FTKIRMSQNPSDFSKRQKLFFPILKVRNQRCHGKDLLMKVT

SEQ ID NO: 47662 - protein, 33 aa, Homo sapiens
  MAP TO AP000237.1; EXPRESSED IN FETAL LIVER, SIGNAL = 0.61
MVLTSMPVIDFSPKYLQPERPKDALVSPRMLIL

SEQ ID NO: 47663 - protein, 92 aa, Homo sapiens
  MAP TO AC005484.2; EXPRESSED IN BONE MARROW, SIGNAL = 0.78; EXPRESSED IN LUNG, SIGNAL = 0.7; EXPRESSED IN HELA, SIGNAL = 0.6; EXPRESSED IN HBL100, SIGNAL = 0.85; EXPRESSED IN FETAL LIVER, SIGNAL = 0.71; SWISSPROT HIT: Q9Z0J4, EVALUE 4.10e-01; EST_HUMAN HIT: N99520.1, EVALUE 2.00e-07
MKDREMNRVKKLAKNILDERTEVERFFLDALHQVKQQILISRKHYKQIAQAAFNLKMRAACTGRTEYPKIRTFDGREHSTNSVNQDLLEAEK

SEQ ID NO: 47664 - protein, 63 aa, Homo sapiens
  MAP TO AC007390.2; EXPRESSED IN BONE MARROW, SIGNAL = 0.83; EXPRESSED IN FETAL LIVER, SIGNAL = 0.68; EXPRESSED IN HELA, SIGNAL = 0.63; SWISSPROT HIT: P15151, EVALUE 1.50e+00; EST_HUMAN HIT: BE902386.1, EVALUE 3.00e-30
LKNCDISVHLVEVSQKLSEIQALTLTKEKVPLERNAGSPVYMKGVTKSGIPISWYRDLHDVPK

SEQ ID NO: 47665 - protein, 24 aa, Homo sapiens
  MAP TO AL021706.1; EXPRESSED IN FETAL LIVER, SIGNAL = 0.99; EXPRESSED IN BONE MARROW, SIGNAL = 0.92
GLPHFLVTYCGAVAQTAFPVNFSL

SEQ ID NO: 47666 - protein, 25 aa, Homo sapiens
  MAP TO AL021706.1; EXPRESSED IN FETAL LIVER, SIGNAL = 0.99; EXPRESSED IN BONE MARROW, SIGNAL = 0.92
RITTLPGHILWCCGSDGLSCELFSE

SEQ ID NO: 47667 - protein, 57 aa, Homo sapiens; identical to SEQ ID NO: 46311
  MAP TO AC007376.7; EXPRESSED IN FETAL LIVER, SIGNAL = 1.1; EST_HUMAN HIT: AA120843.1, EVALUE 4.30e-01

SEQ ID NO: 47668 - protein, 32 aa, Homo sapiens
  MAP TO AC007376.7; EXPRESSED IN FETAL LIVER, SIGNAL = 1.1
DVAVIIITAIVIIILIIITPSSSPSSSPPPLI

SEQ ID NO: 47669 - protein, 42 aa, Homo sapiens
  MAP TO AF130418.2; EXPRESSED IN FETAL LIVER, SIGNAL = 1.1; SWISSPROT HIT: O84042, EVALUE 3.60e+00
GVKKFRHKSHRADIVDGILDRFADSKSHAHFPSPKHLISYGM

SEQ ID NO: 47670 - protein, 166 aa, Homo sapiens
  MAP TO AJ239323.2; EXPRESSED IN HELA, SIGNAL = 8.9; EXPRESSED IN FETAL LIVER, SIGNAL = 3.9; EST_HUMAN HIT: AU133286.1, EVALUE 1.00e-60; SWISSPROT HIT: P51795, EVALUE 5.00e-82
AALVAAFTLRSINPFGNSRLVLFYVEFHTPWHLFELVPFILLGIFGGLWGALFIRTNIAWCRKRKTTQLGKYPVIEVLVVTAITAILAFPNEYTRMSTSELISELFNDCGLLDSSKLCDYENRFNTSKGGELPDRPAGVGVYSAMWQLALTLILKIVITIFTFGMK

SEQ ID NO: 47671 - protein, 74 aa, Homo sapiens
  MAP TO AJ239323.2; EXPRESSED IN HELA, SIGNAL = 8.9; EXPRESSED IN FETAL LIVER, SIGNAL = 3.9; EST_HUMAN HIT: AU133286.1, EVALUE 1.00e-07; SWISSPROT HIT: Q58180, EVALUE 8.30e+00
LPWWQHSLYAPSIHLGTAAWYYFMWSFTPHGISLSSCHSFCWAYLVVCGEHCLSAQTLPGVGSERPPSWASILL

SEQ ID NO: 47672 - protein, 35 aa, Homo sapiens
  MAP TO AL031283.15; EXPRESSED IN HBL100, SIGNAL = 0.95; EXPRESSED IN FETAL LIVER, SIGNAL = 0.94; SWISSPROT HIT: P23785, EVALUE 3.20e-01; EST_HUMAN HIT: BF241473.1, EVALUE 1.70e-01
QCPVPSAQCPAHLISLSGLPGCCCTPLSQSSCCKL

SEQ ID NO: 47673 - protein, 35 aa, Homo sapiens
  MAP TO AL031283.15; EXPRESSED IN HBL100, SIGNAL = 0.95; EXPRESSED IN FETAL LIVER, SIGNAL = 0.94
YNLQQLLCESGVQQQPGNPDRLIKCAGHWALGTGH

SEQ ID NO: 47674 - protein, 59 aa, Homo sapiens
  MAP TO AL080249.12; EXPRESSED IN FETAL LIVER, SIGNAL = 3.2; SWISSPROT HIT: P18428, EVALUE 1.00e-29; EST_HUMAN HIT: AV658726.1, EVALUE 1.00e-28
GEIFHRNHRSPVTLLAAVMSLPEEHNKMVYFAISDYVFNTASLVYHEEGYLNFSITDDM

SEQ ID NO: 47675 - protein, 29 aa, Homo sapiens
  MAP TO AL080250.11; EXPRESSED IN FETAL LIVER, SIGNAL = 1.1; EST_HUMAN HIT: AW182429.1, EVALUE 3.00e-10
SERASSTIWGHCGRTSCLGSSAAVEGTRI

SEQ ID NO: 47676 - protein, 27 aa, Homo sapiens
  MAP TO AC006296.8; EXPRESSED IN LUNG, SIGNAL = 0.6; EXPRESSED IN BONE MARROW, SIGNAL = 0.74; EXPRESSED IN FETAL LIVER, SIGNAL = 0.61
YSTCQQQACQQQAKQQAKQQAKQQAKP

SEQ ID NO: 47677 - protein, 31 aa, Homo sapiens
  MAP TO AF165144.1; EXPRESSED IN FETAL LIVER, SIGNAL =   1
TSGAQSIRPMSAVPKWGVSVQMLAPACLHGY

SEQ ID NO: 47678 - protein, 43 aa, Homo sapiens
  MAP TO AC010719.1; EXPRESSED IN FETAL LIVER, SIGNAL =   1
YHLLILQYPAGTSSGKTSWIFQVDLAACYVYHTEMAYIQKLTH

SEQ ID NO: 47679 - protein, 24 aa, Homo sapiens
  MAP TO AC010719.1; EXPRESSED IN FETAL LIVER, SIGNAL =   1
TTYSSSNIQLAPPLGRLPGYFRLI

SEQ ID NO: 47680 - protein, 36 aa, Homo sapiens
  MAP TO AL049812.3; EXPRESSED IN FETAL LIVER, SIGNAL = 1.6; SWISSPROT HIT: Q22703, EVALUE 4.80e+00
ALNAEFYHTGNTNQLKQINIYGLGVTSGHQIFPRPT

SEQ ID NO: 47681 - protein, 96 aa, Homo sapiens
  MAP TO AC006286.12; EXPRESSED IN PLACENTA, SIGNAL = 0.71; EXPRESSED IN BT474, SIGNAL = 0.81; EXPRESSED IN HBL100, SIGNAL =   1; EXPRESSED IN FETAL LIVER, SIGNAL = 0.57; EXPRESSED IN BONE MARROW, SIGNAL = 1.2; EST_HUMAN HIT: R59271.1, EVALUE 6.00e-30; SWISSPROT HIT: Q28107, EVALUE 2.40e+00
GTGTRVICSDCYDNANIYSRTREYCPYTYIAEEDVLDQTLSSLMVQMPKETYLVHPPQDTTALESLIPSANREPSAFPTNHERISEKKLPSTQMSG

SEQ ID NO: 47682 - protein, 54 aa, Homo sapiens
  MAP TO AL050403.12; EXPRESSED IN FETAL LIVER, SIGNAL = 1.8; EXPRESSED IN HBL100, SIGNAL = 1.1; EST_HUMAN HIT: T03176.1, EVALUE 4.00e-18; SWISSPROT HIT: Q91187, EVALUE 3.40e+00
VPRDLTVTKACSEQYVTQTIFELRKNRKYFNYMHNKILHIPLLQLVEVMEPYLV

SEQ ID NO: 47683 - protein, 22 aa, Homo sapiens
  MAP TO AL050403.12; EXPRESSED IN FETAL LIVER, SIGNAL = 1.8; EXPRESSED IN HBL100, SIGNAL = 1.1
PSRPDCDQGMLRTICDTNNIRT

SEQ ID NO: 47684 - protein, 51 aa, Homo sapiens
  MAP TO AC009453.1; EXPRESSED IN FETAL LIVER, SIGNAL = 0.92; EXPRESSED IN HELA, SIGNAL =  10; EXPRESSED IN LUNG, SIGNAL =   1; SWISSPROT HIT: P03079, EVALUE 6.00e+00
  unsure 16
  unsure 27
NSSISNPVKSIPKAQXGIKLKFFSNNXHVVANSQRHKVKKCVVLFLAFANK

SEQ ID NO: 47685 - protein, 81 aa, Homo sapiens
  MAP TO AC009305.1; EXPRESSED IN FETAL LIVER, SIGNAL = 0.57; EST_HUMAN HIT: BE881567.1, EVALUE 3.00e-04; SWISSPROT HIT: Q09472, EVALUE 2.00e-04
TLSRPSEPPAVKPSPASQGLHPRVSSSAPCPHIPLQEPSGPAKPAQSLPLTVPVSQPPQTSLDSVTFPPPAAQTVTVVQFR

SEQ ID NO: 47686 - protein, 59 aa, Homo sapiens
  MAP TO AF165124.1; EXPRESSED IN HBL100, SIGNAL = 9.5; EXPRESSED IN FETAL LIVER, SIGNAL = 1.1; EST_HUMAN HIT: AI961969.1, EVALUE 4.00e+00; SWISSPROT HIT: P10613, EVALUE 1.20e+00
IKKLRLRDIEKLPEITQSVSDRIRILNPVNLIFALAVDTVDAPATLSPFLNSHTHLSDA

SEQ ID NO: 47687 - protein, 38 aa, Homo sapiens
  MAP TO AP000096.1; EXPRESSED IN PLACENTA, SIGNAL = 0.64; EXPRESSED IN FETAL LIVER, SIGNAL = 0.57; EXPRESSED IN LUNG, SIGNAL = 0.64; EST_HUMAN HIT: AA628516.1, EVALUE 6.50e+00
PTAPPRSKHQVCQSISNTILLHVLHYKLNRKHKTRVPT

SEQ ID NO: 47688 - protein, 27 aa, Homo sapiens
  MAP TO AP000096.1; EXPRESSED IN PLACENTA, SIGNAL = 0.64; EXPRESSED IN FETAL LIVER, SIGNAL = 0.57; EXPRESSED IN LUNG, SIGNAL = 0.64
QQRHLDQNTKFVKASRILFYCMCYIIS

SEQ ID NO: 47689 - protein, 47 aa, Homo sapiens
  MAP TO AC008277.1; EXPRESSED IN PLACENTA, SIGNAL =   1; EXPRESSED IN FETAL LIVER, SIGNAL = 0.61; EXPRESSED IN LUNG, SIGNAL = 0.79; EXPRESSED IN BONE MARROW, SIGNAL = 0.74; EST_HUMAN HIT: AW957864.1, EVALUE 7.00e-05
EKERLKQEKRDEKRLNKERKLEQRRLELEMAKELKKPNEDMCLADQK

SEQ ID NO: 47690 - protein, 65 aa, Homo sapiens
  MAP TO AC006432.15; EXPRESSED IN BT474, SIGNAL =   1; EXPRESSED IN BONE MARROW, SIGNAL = 4.2; EXPRESSED IN HBL100, SIGNAL = 1.6; EXPRESSED IN FETAL LIVER, SIGNAL = 0.85; EXPRESSED IN HELA, SIGNAL = 0.98; EST_HUMAN HIT: AW176401.1, EVALUE 2.00e-13; SWISSPROT HIT: P22516, EVALUE 2.00e-08
LVVLPYQMLLHAATRQAAGIRLQDQVVIIDEAHNLIDTTTSMHSVEVSGSQVRGPPLPGPGPAVR

SEQ ID NO: 47691 - protein, 41 aa, Homo sapiens
  MAP TO AC006432.15; EXPRESSED IN BT474, SIGNAL =   1; EXPRESSED IN BONE MARROW, SIGNAL = 4.2; EXPRESSED IN HBL100, SIGNAL = 1.6; EXPRESSED IN FETAL LIVER, SIGNAL = 0.85; EXPRESSED IN HELA, SIGNAL = 0.98; EST_HUMAN HIT: AW176401.1, EVALUE 2.00e-09; SWISSPROT HIT: O32848, EVALUE 1.20e+00
GGDHRRGAQPDRHHHEHAQRGGQRLPGAWASPPRARACREV

SEQ ID NO: 47692 - protein, 37 aa, Homo sapiens
  MAP TO AL035086.12; EXPRESSED IN BONE MARROW, SIGNAL = 1.3; EXPRESSED IN FETAL LIVER, SIGNAL = 0.6; EXPRESSED IN LUNG, SIGNAL = 0.59; EXPRESSED IN HELA, SIGNAL = 0.9; EXPRESSED IN HBL100, SIGNAL = 0.81; SWISSPROT HIT: P27653, EVALUE 8.30e-02; EST_HUMAN HIT: BE299916.1, EVALUE 1.00e-15
LHEADIVVLGSPKPEEIPLTWIQPGTTVLNCSHDFLS

SEQ ID NO: 47693 - protein, 47 aa, Homo sapiens
  MAP TO AC008024.1; EXPRESSED IN BONE MARROW, SIGNAL = 3.9; EXPRESSED IN LUNG, SIGNAL = 7.1; EXPRESSED IN FETAL LIVER, SIGNAL =   1; SWISSPROT HIT: O02697, EVALUE 6.00e+00
  unsure 22
SRGSTVNVVTMVVKATILTKKXNQLPYNIAYQLLFQIKKKQNCVFPI

SEQ ID NO: 47694 - protein, 26 aa, Homo sapiens
  MAP TO AC009598.2; EXPRESSED IN LUNG, SIGNAL = 1.8; EXPRESSED IN FETAL LIVER, SIGNAL = 0.93
  unsure 5
PRTWXVLTETHSKDKLMGKSSICPCH

SEQ ID NO: 47695 - protein, 30 aa, Homo sapiens
  MAP TO AC005193.2; EXPRESSED IN FETAL LIVER, SIGNAL = 0.97
LCPTVTSARRSSQTTSSKVVHSSNQSFSKK

SEQ ID NO: 47696 - protein, 44 aa, Homo sapiens
  MAP TO AL033532.12; EXPRESSED IN LUNG, SIGNAL =   2; EXPRESSED IN FETAL LIVER, SIGNAL = 0.88; EXPRESSED IN BT474, SIGNAL = 1.4; EXPRESSED IN HBL100, SIGNAL = 1.2; SWISSPROT HIT: P34274, EVALUE 1.60e-02; EST_HUMAN HIT: BF574321.1, EVALUE 1.00e-09
VVPTTDHIDTEKLKAREQIKFFEEVLLFEDELHDHGVSSLSVKI

SEQ ID NO: 47697 - protein, 39 aa, Homo sapiens
  MAP TO AC011347.1; EXPRESSED IN LUNG, SIGNAL = 0.96; EXPRESSED IN FETAL LIVER, SIGNAL =   1; EST_HUMAN HIT: H91806.1, EVALUE 7.20e+00; SWISSPROT HIT: Q03372, EVALUE 3.60e+00
LLRRSSETWPLATSPVASCTTPSHLLSVHQPHLASFLLL

SEQ ID NO: 47698 - protein, 46 aa, Homo sapiens
  MAP TO AC010083.1; EXPRESSED IN LUNG, SIGNAL = 3.5; EXPRESSED IN FETAL LIVER, SIGNAL =   1; EST_HUMAN HIT: AI133031.1, EVALUE 2.70e-02
HKQMDVAVFRYNFTYKNRPWADLAGGPYFVTFAVGDQRKRTQQEKS

SEQ ID NO: 47699 - protein, 22 aa, Homo sapiens
  MAP TO AC010083.1; EXPRESSED IN LUNG, SIGNAL = 3.5; EXPRESSED IN FETAL LIVER, SIGNAL =   1; EST_HUMAN HIT: AW085910.1, EVALUE 7.50e-02
INKWMWLCSDTTLLTKTGHGLI

SEQ ID NO: 47700 - protein, 33 aa, Homo sapiens
  MAP TO AC004032.7; EXPRESSED IN LUNG, SIGNAL = 0.63; EXPRESSED IN FETAL LIVER, SIGNAL = 0.75; EST_HUMAN HIT: AA835014.1, EVALUE 6.80e+00
TRDDHMETTSRPWTFLGFVSPMGPYCQLKTSMA

SEQ ID NO: 47701 - protein, 74 aa, Homo sapiens
  MAP TO AC005973.2; EXPRESSED IN PLACENTA, SIGNAL = 0.74; EXPRESSED IN FETAL LIVER, SIGNAL = 0.87; EXPRESSED IN LUNG, SIGNAL = 0.8; EST_HUMAN HIT: AW166535.1, EVALUE 3.00e-41; SWISSPROT HIT: P41366, EVALUE 3.00e-21
APTTLGDNTAANNVRFRCSDGEELQGPGLSWGDFGDWSDHCPKGACGLQTKIQGPRGLGDDTALNDARLFCCRS

SEQ ID NO: 47702 - protein, 52 aa, Homo sapiens
  MAP TO AC007749.2; EXPRESSED IN LUNG, SIGNAL =  11; EXPRESSED IN FETAL LIVER, SIGNAL = 1.1; EST_HUMAN HIT: AA705136.1, EVALUE 2.50e+00
IKALSKNVLGTGLCARNTKMRMDPPYPQGAQALVSLFGFDLHPRFLFVLHMP

SEQ ID NO: 47703 - protein, 75 aa, Homo sapiens
  MAP TO AC004900.2; EXPRESSED IN FETAL LIVER, SIGNAL = 0.94; EXPRESSED IN HBL100, SIGNAL = 6.7; EST_HUMAN HIT: BE549540.1, EVALUE 4.30e+00; SWISSPROT HIT: P80680, EVALUE 9.00e+00
QKKEHEMKKEKSPYNIIRVSLPAHHAGVLKKPDSRVNGYKFKRCHHILFCVQNHFRDFPNNTCKVSFEVMEEGRC

SEQ ID NO: 47704 - protein, 33 aa, Homo sapiens
  MAP TO AL096792.5; EXPRESSED IN FETAL LIVER, SIGNAL = 0.59
ETLVNAYKERFVSTVCNNRIQNNIAASPSVNRQ

SEQ ID NO: 47705 - protein, 26 aa, Homo sapiens
  MAP TO AL078590.12; EXPRESSED IN PLACENTA, SIGNAL = 1.3; EXPRESSED IN FETAL LIVER, SIGNAL = 1.2; EXPRESSED IN BT474, SIGNAL = 1.1; EXPRESSED IN BONE MARROW, SIGNAL = 1.2; EXPRESSED IN LUNG, SIGNAL = 1.2
SGKGDEIAQEDVMHVGQILNPEEHQI

SEQ ID NO: 47706 - protein, 153 aa, Homo sapiens
  MAP TO AB023055.1; EXPRESSED IN PLACENTA, SIGNAL = 0.82; EXPRESSED IN BT474, SIGNAL = 0.76; EXPRESSED IN FETAL LIVER, SIGNAL = 0.77; SWISSPROT HIT: P19474, EVALUE 2.00e-27; EST_HUMAN HIT: BE867264.1, EVALUE 2.00e-50
AQLPTVLKQPCCSVMASGQFVNKLQEEVICPICLDILQKPVTIDCGHNFCLKCITQIGETSCGFFKCPLCKTSVRKNAIRFNSLLRNLVEKIQALQASEVQSKRKEATCPRHQEMFHYFCEDDGKFLCFVCRESKDHKSHNVSLIEEAAQNYQ

SEQ ID NO: 47707 - protein, 39 aa, Homo sapiens
  MAP TO AC010899.1; EXPRESSED IN LUNG, SIGNAL = 5.5; EXPRESSED IN FETAL LIVER, SIGNAL = 1.1
DTQMFFKTQQFTTQTDTFRFSELMTSVKMDEVLDVWANV

SEQ ID NO: 47708 - protein, 48 aa, Homo sapiens
  MAP TO AC007969.2; EXPRESSED IN BONE MARROW, SIGNAL = 0.88; EXPRESSED IN HBL100, SIGNAL = 0.98; EXPRESSED IN FETAL LIVER, SIGNAL = 0.74; EXPRESSED IN LUNG, SIGNAL = 1.4; EST_HUMAN HIT: AA148822.1, EVALUE 3.00e-21; SWISSPROT HIT: P10614, EVALUE 1.60e+00
FFSLSASMGSAFSPSISHAHTCLFWNCHLWNSDCNSTYGIDRETDFFP

SEQ ID NO: 47709 - protein, 296 aa, Homo sapiens
  MAP TO AC004827.1; EXPRESSED IN PLACENTA, SIGNAL =   2; EXPRESSED IN FETAL LIVER, SIGNAL = 0.98; EST_HUMAN HIT: BE840012.1, EVALUE 4.00e-26; SWISSPROT HIT: P06599, EVALUE 9.00e-03
APPAIEMRNSEEQPSGGTTVLQRLLQEQLRYGNPSENRSLLAIHQQATGNGPPFPSGSGNPGPQSDVLSPQDHHQQLVAHAARQEPQGQEIQSENLIMEKQLSPRMQNNEELPTYEEAKVQSQYFRGQQHASVGAAFYVTGVTNQKMRTEGRPSVQRLNPGKMHQDEGLRDLKQGHVRSLSERLMQMSLATSGVKAHPPVTSAPLSPPQPNDLYKNPTSSSEFYKAQGPLPNQHSLKGMEHRGPPPEYPFKGMPPQSVVCKPQEPGHFYSEHRLNQPGRTEGQLMRYQHPPEYGAA

SEQ ID NO: 47710 - protein, 65 aa, Homo sapiens
  MAP TO AC007390.2; EXPRESSED IN LUNG, SIGNAL = 0.62; EXPRESSED IN BT474, SIGNAL = 0.67; EXPRESSED IN HBL100, SIGNAL = 0.95; EXPRESSED IN FETAL LIVER, SIGNAL = 0.81; EXPRESSED IN HELA, SIGNAL = 0.99; EXPRESSED IN BONE MARROW, SIGNAL = 0.71; EST_HUMAN HIT: AU153947.1, EVALUE 2.00e-22; SWISSPROT HIT: Q03701, EVALUE 2.00e-23
NVKKRTKGAKDNTLDEDSEGSDDELGNLDDDEVSLGSMDDEEFAEVDEDGGTFMDVLDDESESVP

SEQ ID NO: 47711 - protein, 46 aa, Homo sapiens
  MAP TO AL117326.5; EXPRESSED IN LUNG, SIGNAL = 1.7; EXPRESSED IN FETAL LIVER, SIGNAL = 1.7; SWISSPROT HIT: O75914, EVALUE 9.00e-14; EST_HUMAN HIT: AA568999.1, EVALUE 2.00e-11
NKKKEKERPEISLPSDFEHTIHVGFDAVTGEFTVSKLLVLFCKPRK

SEQ ID NO: 47712 - protein, 82 aa, Homo sapiens
  MAP TO AC007597.2; EXPRESSED IN BT474, SIGNAL = 0.61; EXPRESSED IN FETAL LIVER, SIGNAL = 0.6; EXPRESSED IN HELA, SIGNAL =   1; EXPRESSED IN BONE MARROW, SIGNAL = 0.65; EXPRESSED IN LUNG, SIGNAL = 0.66; EXPRESSED IN PLACENTA, SIGNAL = 0.67; EST_HUMAN HIT: AA147408.1, EVALUE 2.00e+00
SKFRPANSRRASSSRKPAEQPHTHSLIPSLQLRQDCGLLIKYWLAGSRFSSQKTCWKQEAGTPYCNCRARSLGARKILPQSS

SEQ ID NO: 47713 - protein, 25 aa, Homo sapiens
  MAP TO AL079337.3; EXPRESSED IN BONE MARROW, SIGNAL = 0.91; EXPRESSED IN FETAL LIVER, SIGNAL = 0.89
DLFGCDKFPDCPSLTVLESTVQVIL

SEQ ID NO: 47714 - protein, 49 aa, Homo sapiens
  MAP TO AL035670.16; EXPRESSED IN FETAL LIVER, SIGNAL =  12; SWISSPROT HIT: Q63688, EVALUE 6.00e+00
HLLYPVTVNMLFNKSLFSTNKKKIKEFHQYFQVYDEDFEYGSQLPECLL

SEQ ID NO: 47715 - protein, 30 aa, Homo sapiens
  MAP TO AC011309.1; EXPRESSED IN BONE MARROW, SIGNAL = 1.1; EXPRESSED IN FETAL LIVER, SIGNAL =   1; EST_HUMAN HIT: BE018184.1, EVALUE 5.30e+00
VSVHGSRHFSLMLPKDWNTSACGNGSGVNK

SEQ ID NO: 47716 - protein, 60 aa, Homo sapiens
  MAP TO AC010905.1; EXPRESSED IN BONE MARROW, SIGNAL = 3.2; EXPRESSED IN FETAL LIVER, SIGNAL = 0.92
TKVITSEIMNHQYSTKQLLADIKGDVIGRKSTSATPVKTLHKYVVKNGLGGYGPVVYVAF

SEQ ID NO: 47717 - protein, 32 aa, Homo sapiens
  MAP TO AC006230.11; EXPRESSED IN FETAL LIVER, SIGNAL = 0.78; EXPRESSED IN BT474, SIGNAL =  12
ENSKTVEFITSESCLEQKSLMNFEFYYRPCVV

SEQ ID NO: 47718 - protein, 23 aa, Homo sapiens
  MAP TO AC006230.11; EXPRESSED IN FETAL LIVER, SIGNAL = 0.78; EXPRESSED IN BT474, SIGNAL =  12
RELQNRRVYHLRVLPGTKITDEL

SEQ ID NO: 47719 - protein, 33 aa, Homo sapiens
  MAP TO AC004838.2; EXPRESSED IN LUNG, SIGNAL = 2.2; EXPRESSED IN FETAL LIVER, SIGNAL = 0.9; SWISSPROT HIT: Q24322, EVALUE 6.30e+00
YRHYGPAFLADNINCLLDGHFPYFFLAVIVPAL

SEQ ID NO: 47720 - protein, 44 aa, Homo sapiens
  MAP TO AC005232.1; EXPRESSED IN FETAL LIVER, SIGNAL = 0.88; EXPRESSED IN LUNG, SIGNAL = 2.5; EST_HUMAN HIT: BF314578.1, EVALUE 5.30e+00
CHPSSGYRNQELHRIVQLQNPSTLLGTHWGCSEGGGLRGDCTRV

SEQ ID NO: 47721 - protein, 59 aa, Homo sapiens
  MAP TO AC009558.2; EXPRESSED IN FETAL LIVER, SIGNAL = 1.3; SWISSPROT HIT: Q95741, EVALUE 2.60e+00; EST_HUMAN HIT: BF674562.1, EVALUE 8.00e+00
GEETEAKRNKVIYPRLIPGQPHSIIHTLDHFAILPILGFLLESALEFFVKFMAKLLGME

SEQ ID NO: 47722 - protein, 54 aa, Homo sapiens
  MAP TO AL031432.1; EXPRESSED IN FETAL LIVER, SIGNAL = 0.94; EXPRESSED IN LUNG, SIGNAL = 1.3; EXPRESSED IN HELA, SIGNAL =   1; EXPRESSED IN PLACENTA, SIGNAL = 0.93; EST_HUMAN HIT: BF092178.1, EVALUE 2.00e-25; SWISSPROT HIT: Q09385, EVALUE 7.00e-16
IEKRDKYSRRRPYNDDADIDYINERNAKFNKKAERFYGKYTAEIKQNLERGTAV

SEQ ID NO: 47723 - protein, 301 aa, Homo sapiens
  MAP TO AL022393.1; EXPRESSED IN BT474, SIGNAL = 0.91; EXPRESSED IN HELA, SIGNAL = 0.94; EXPRESSED IN FETAL LIVER, SIGNAL = 0.98; EST_HUMAN HIT: AL040316.1, EVALUE 0.00e+00; SWISSPROT HIT: Q15776, EVALUE 2.00e-79
THHRAFLPWQGITHSCRPFVVSGGEIQTKSRDLPPVKKLPEKEHGKICHLREDIAQIPTHAEAGEQEGRLQRKQKNAIGSRRHYCHECGKSFAQSSGLTKHRRIHTGEKPYECEDCGKTFIGSSALVIHQRVHTGEKPYECEECGKVFSHSSNLIKHQRTHTGEKPYECDDCGKTFSQSCSLLEHHKIHTGEKPYQCNMCGKAFRRNSHLLRHQRIHGDKNVQNPEHGESWESQGRTESQWENTEAPVSYKCNECERSFTRNRSLIEHQKIHTGEKPYQCDTCGKGFTRTSYLVQHQRSHV

SEQ ID NO: 47724 - protein, 558 aa, Homo sapiens [sequence omitted]

SEQ ID NO: 47725 - protein, 84 aa, Homo sapiens
  MAP TO AL033520.9; EXPRESSED IN LUNG, SIGNAL = 1.7; EXPRESSED IN FETAL LIVER, SIGNAL = 1.2; EST_HUMAN HIT: BE897334.1, EVALUE 3.00e-10
QESSTLKTGHIRPAVGLRFEVGPGAAVHSPLASQNGFLHLLLHGCDLELLTSVLSGLGPFLEDEEIPVVVPMQIELLNSSITLK

SEQ ID NO: 47726 - protein, 52 aa, Homo sapiens
  MAP TO AC004975.2; EXPRESSED IN FETAL LIVER, SIGNAL =   1; EST_HUMAN HIT: BE156197.1, EVALUE 5.00e-01
AGAQEPWCTDMLALTLHYWGVIKTFVSDPGVSCPLPAFMKLWVATSFIRKDL

SEQ ID NO: 47727 - protein, 26 aa, Homo sapiens
  MAP TO AP000096.1; EXPRESSED IN FETAL LIVER, SIGNAL =   3; EXPRESSED IN LUNG, SIGNAL = 0.63; EXPRESSED IN HELA, SIGNAL = 0.61; SWISSPROT HIT: P07082, EVALUE 8.40e+00
EREWSRVTTQMIDKWEDGDYQSLKQE

SEQ ID NO: 47728 - protein, 68 aa, Homo sapiens
  MAP TO AC010808.2; EXPRESSED IN PLACENTA, SIGNAL = 0.92; EXPRESSED IN FETAL LIVER, SIGNAL =   1; EST_HUMAN HIT: AU121795.1, EVALUE 5.00e-17; SWISSPROT HIT: P23743, EVALUE 5.00e-01
RQGGASSILHGWQQAERIRKMQKQKPLIKPSDLMRHIHYQENSVRKTAPMIQLSPTSSFPQYVRIMGV

SEQ ID NO: 47729 - protein, 324 aa, Homo sapiens
  MAP TO AC004835.2; EXPRESSED IN FETAL LIVER, SIGNAL = 2.7; EST_HUMAN HIT: BE250109.1, EVALUE 7.10e-01; SWISSPROT HIT: P29374, EVALUE 1.10e-01
KICTQDPERKRGKVDYAKECTNGFETHCQETAHKAGGQLSPTDGNSCLLEKTHSYHIEDSKSTRKSQVSPPHESIGLGLQLTDFLEEISSDSECFSETLSINKEEKEKSVATFNSFSEKEPLDTDKMITRKQNTRSSQQTFFSKWKRDGEEKYSNYKFRTPGRKSEYEPRWICSWPRGESHFIRHENNNGQMKGQLAPRYLFDEGYYQEPSSSYLKRFSDSTLDQKVNYGPSQVPVMSSRSARSFYFGNFHGRRGTPWKSEYNQNSRFRGCNYNYLKFNSDYYYNRHNGQEYIDYGSYSGNNCTGSLNFKCFDDHLDQEYPFSQ

SEQ ID NO: 47730 - protein, 33 aa, Homo sapiens
  MAP TO AC009336.2; EXPRESSED IN BONE MARROW, SIGNAL = 0.98; EXPRESSED IN FETAL LIVER, SIGNAL = 0.88; EXPRESSED IN HELA, SIGNAL = 1.4; EST_HUMAN HIT: BE965102.2, EVALUE 5.80e+00
CGRERAAAGSWTTCLCSHSRRGGNFSPIFRRKS

SEQ ID NO: 47731 - protein, 102 aa, Homo sapiens
  MAP TO AL021938.1; EXPRESSED IN FETAL LIVER, SIGNAL = 1.1; EXPRESSED IN BT474, SIGNAL = 0.95; EXPRESSED IN BONE MARROW, SIGNAL = 1.1; EXPRESSED IN HELA, SIGNAL = 1.2; EST_HUMAN HIT: BE242572.1, EVALUE 1.50e-01; SWISSPROT HIT: Q62315, EVALUE 1.00e-46
EHRRLEKEVLMEKEILEKRKGPLEGHTENDHHKFHPLPRFEPKNGLIHGVAPRNGFRSKLKEVGQAQLKTGRRRLFAQEKEVVKEEEEDKGVLNDFHKCIYK

SEQ ID NO: 47732 - protein, 26 aa, Homo sapiens
  MAP TO AC009485.2; EXPRESSED IN FETAL LIVER, SIGNAL = 0.92; EST_HUMAN HIT: AW593282.1, EVALUE 3.20e-02
WLCMMQTQRRLFPRKQPTWWIGKKPL

SEQ ID NO: 47733 - protein, 27 aa, Homo sapiens
  MAP TO AC008039.1; EXPRESSED IN FETAL LIVER, SIGNAL = 4.1
MKPVLPPPFLIPGRSMSSTGITPGLHR

SEQ ID NO: 47734 - protein, 18 aa, Homo sapiens
  MAP TO AC008039.1; EXPRESSED IN FETAL LIVER, SIGNAL = 4.1; EST_HUMAN HIT: H80211.1, EVALUE 4.30e+00
WCCTACDEPHPPVSWRGP

SEQ ID NO: 47735 - protein, 67 aa, Homo sapiens
  MAP TO AL121656.1; EXPRESSED IN FETAL LIVER, SIGNAL =   1; EXPRESSED IN HELA, SIGNAL = 0.95; EST_HUMAN HIT: AI693667.1, EVALUE 5.00e-29; SWISSPROT HIT: P09342, EVALUE 3.80e-01
FSLCPFPYTWAYSLQISPSFVTLEVTLPNNSCSFPLRPVATSPLRSVIPSITALTRILRTLKMHRTN

SEQ ID NO: 47736 - protein, 43 aa, Homo sapiens
  MAP TO AF159056.1; EXPRESSED IN BONE MARROW, SIGNAL = 0.93; EXPRESSED IN LUNG, SIGNAL = 0.9; EXPRESSED IN FETAL LIVER, SIGNAL = 0.9; EST_HUMAN HIT: AV733743.1, EVALUE 6.00e-07; SWISSPROT HIT: P03979, EVALUE 1.00e-09
IHWYLRQEGKAPQHLLYYDVCNSRDMLESGVSQESMILMEVEG

SEQ ID NO: 47737 - protein, 33 aa, Homo sapiens
  MAP TO AC007316.2; EXPRESSED IN FETAL LIVER, SIGNAL = 0.59; EXPRESSED IN PLACENTA, SIGNAL = 0.65; EST_HUMAN HIT: AW500547.1, EVALUE 1.70e+00; SWISSPROT HIT: Q56339, EVALUE 6.30e+00
VEPLATPRSTKRPRKIPTRPIVFIALLQKLVIV

SEQ ID NO: 47738 - protein, 53 aa, Homo sapiens
  MAP TO AC006296.8; EXPRESSED IN FETAL LIVER, SIGNAL = 0.58; SWISSPROT HIT: O95447, EVALUE 1.50e+00
MELGEVGLIREAQKNFPEVMSEMKSETEAVLCRKTRKEERTKNTHDLYQGQQA

SEQ ID NO: 47739 - protein, 20 aa, Homo sapiens
  MAP TO AC006296.8; EXPRESSED IN FETAL LIVER, SIGNAL = 0.58
GVGRSWPHQRGPEKFPRSDV

SEQ ID NO: 47740 - protein, 46 aa, Homo sapiens
  MAP TO AC008013.8; EXPRESSED IN LUNG, SIGNAL = 1.2; EXPRESSED IN FETAL LIVER, SIGNAL = 0.95; SWISSPROT HIT: P20768, EVALUE 2.70e+00
VVVYFQCLDSPLKMRIMVPPSHTFTRMIPRTSKIVLQSTPQRKGMV

SEQ ID NO: 47741 - protein, 24 aa, Homo sapiens
  MAP TO AC007563.1; EXPRESSED IN PLACENTA, SIGNAL = 0.78; EXPRESSED IN FETAL LIVER, SIGNAL = 0.65
RKRAAGEELKKRREIGKKHYNLAK

SEQ ID NO: 47742 - protein, 126 aa, Homo sapiens
  MAP TO AC012267.1; EXPRESSED IN FETAL LIVER, SIGNAL =  14; EST_HUMAN HIT: AW997709.1, EVALUE 7.00e-17; SWISSPROT HIT: P08548, EVALUE 5.00e-19
NKKAVNMSSTIEEMDPKNIHRTVHPTEEYTFFSRTHGIFSGIDHTAGHKISPNKFKVKIIPSIFSDHSVMKLEINNRRQTGKFHKYVEIKQHSTKQTVKEKIKKYLETNKNGNTYTKTYGIQQKQF

SEQ ID NO: 47743 - protein, 17 aa, Homo sapiens
  MAP TO AC006042.2; EXPRESSED IN HELA, SIGNAL =  12; EXPRESSED IN FETAL LIVER, SIGNAL =   2
FLFCSDGDKEDFPEQCQ

SEQ ID NO: 47744 - protein, 35 aa, Homo sapiens
  MAP TO AC007128.2; EXPRESSED IN FETAL LIVER, SIGNAL = 0.9; EXPRESSED IN HBL100, SIGNAL = 1.3; EST_HUMAN HIT: BF568860.1, EVALUE 5.70e+00
CLNLIYMGVSSRVDHKPTQQGEKTIDGRGYVEERK

SEQ ID NO: 47745 - protein, 37 aa, Homo sapiens
  MAP TO AC010881.1; EXPRESSED IN LUNG, SIGNAL =   3; EXPRESSED IN FETAL LIVER, SIGNAL = 0.97
LWLASPSGEEIPLKSLVSWCSYVTLITTEKGLQMSRP

SEQ ID NO: 47746 - protein, 33 aa, Homo sapiens
  MAP TO AC009640.2; EXPRESSED IN FETAL LIVER, SIGNAL = 2.6; EST_HUMAN HIT: BF692371.1, EVALUE 2.00e-08
KSQAERKILKLLGKANYNGMAGMVLVGVAKCHL

SEQ ID NO: 47747 - protein, 35 aa, Homo sapiens
  MAP TO AC009951.3; EXPRESSED IN FETAL LIVER, SIGNAL = 1.1; EST_HUMAN HIT: BE090770.1, EVALUE 6.60e+00
RQIICIFKYVFVPVFLELSRFTRHGIPGAKTGKVQ

SEQ ID NO: 47748 - protein, 39 aa, Homo sapiens
  MAP TO AC008024.1; EXPRESSED IN BONE MARROW, SIGNAL = 0.97; EXPRESSED IN FETAL LIVER, SIGNAL = 1.1; EST_HUMAN HIT: BF237841.1, EVALUE 4.20e+00
  unsure 9
LMDVTSVHXIFLDLLCFLVKWPCLPEDRLRHDYVMCFDQ

SEQ ID NO: 47749 - protein, 100 aa, Homo sapiens
  MAP TO AL109809.9; EXPRESSED IN FETAL LIVER, SIGNAL = 0.88; EST_HUMAN HIT: AW406955.1, EVALUE 1.00e-01; SWISSPROT HIT: P01871, EVALUE 7.00e-03
QRSEPGTRIRLTYASSGFSTHQVTVTWLKNKHELPNPQTSVQYSGHTYNVTSSVLVPLMDDDVFSHVVCHVEHKLTWFFQKTTGLDQYLQGKISLSAQLR

SEQ ID NO: 47750 - protein, 28 aa, Homo sapiens
  MAP TO AC009303.1; EXPRESSED IN FETAL LIVER, SIGNAL = 0.95; EXPRESSED IN HELA, SIGNAL = 7.4; EXPRESSED IN HBL100, SIGNAL = 1.2; EXPRESSED IN LUNG, SIGNAL = 4.5; EST_HUMAN HIT: AU135587.1, EVALUE 8.00e-08
ILHRKIDEVPSRAELIQYQKRFIELYRQ

SEQ ID NO: 47751 - protein, 54 aa, Homo sapiens
  MAP TO AC011288.1; EXPRESSED IN FETAL LIVER, SIGNAL = 1.1
KHDNDPIKWNLRLPPGNLGLLMPLNQKVRKAVTMLVGMIWATKGKLNYYLTTKE

SEQ ID NO: 47752 - protein, 75 aa, Homo sapiens
  MAP TO AC011302.1; EXPRESSED IN FETAL LIVER, SIGNAL = 0.9; EST_HUMAN HIT: AA149419.1, EVALUE 7.00e-03; SWISSPROT HIT: P21642, EVALUE 9.00e-01
NCSSLCPQGTLAMPGNVFPGWRVGPDIWWVKPRDTAQQHTAHKDAPPGNHAAPNVNSAKADTAALLALLLCYRSH

SEQ ID NO: 47753 - protein, 29 aa, Homo sapiens
  MAP TO AC011302.1; EXPRESSED IN FETAL LIVER, SIGNAL = 0.9
IAVHFALRGHWQCLETSSLGGELVLTSGG

SEQ ID NO: 47754 - protein, 56 aa, Homo sapiens
  MAP TO AL117192.1; EXPRESSED IN FETAL LIVER, SIGNAL = 1.1; SWISSPROT HIT: Q00132, EVALUE 2.60e+00; EST_HUMAN HIT: AI279092.1, EVALUE 1.00e-09
MEVKDSAVQGSPSEATSGAQQIFVENLLCAWLDQGGAVELHIIVCIRVSPESQALE

SEQ ID NO: 47755 - protein, 37 aa, Homo sapiens
  MAP TO AL117192.1; EXPRESSED IN FETAL LIVER, SIGNAL = 1.1
WKSRTQQSKAALLKQLQGLSKYLLRTSSVPGWIRVGL

SEQ ID NO: 47756 - protein, 40 aa, Homo sapiens
  MAP TO AC009401.1; EXPRESSED IN FETAL LIVER, SIGNAL = 1.1; SWISSPROT HIT: O08560, EVALUE 1.00e-03; EST_HUMAN HIT: BF589937.1, EVALUE 3.00e-17
LIESYKNGGSLLIQGPDHCSLLHYAAKTGNGEIVKYILDH

SEQ ID NO: 47757 - protein, 43 aa, Homo sapiens
  MAP TO AL109954.10; EXPRESSED IN FETAL LIVER, SIGNAL = 1.8; EST_HUMAN HIT: AA861184.1, EVALUE 1.00e-18; SWISSPROT HIT: P01035, EVALUE 2.40e-01
WEGFQQKLMSKKNMNSTLNFFIQSYNNASNDTYLYRVQRLIRS

SEQ ID NO: 47758 - protein, 128 aa, Homo sapiens
  MAP TO AC009433.1; EXPRESSED IN FETAL LIVER, SIGNAL = 2.1; EST_HUMAN HIT: AA631792.1, EVALUE 1.20e+00
  unsure 13
  unsure 23
  unsure 37
  unsure 56
  unsure 62
  unsure 75
  unsure 76
  unsure 81
  unsure 105
  unsure 122
VTSILDVMFITAXEYLSVFNTHXISTINIYYSFACFXSFTSTGESVADGLCPLSHXPLSPPXFQHSCGDSSEHPXXVAPLXVQCPFCFPALGFLPSSRRLISLCXAQPEGPGAGIPGDNLQXNGNKDQ

SEQ ID NO: 47759 - protein, 39 aa, Homo sapiens
  MAP TO AC009756.1; EXPRESSED IN FETAL LIVER, SIGNAL = 7.8
  unsure 2
  unsure 23
MXTSESETKDALLLMAIFRISTXLMVLIQSYTQDYAKYT

SEQ ID NO: 47760 - protein, 45 aa, Homo sapiens
  MAP TO AC009974.2; EXPRESSED IN FETAL LIVER, SIGNAL = 1.1; EXPRESSED IN HBL100, SIGNAL = 1.1; SWISSPROT HIT: P23647, EVALUE 3.00e-07; EST_HUMAN HIT: BF686388.1, EVALUE 5.00e-04
ALKFIPKLGRSEKELRNLQREIEIMRGLRHPNIVHMLDSFETDKE

SEQ ID NO: 47761 - protein, 29 aa, Homo sapiens
  MAP TO AC008279.1; EXPRESSED IN FETAL LIVER, SIGNAL = 0.69; EST_HUMAN HIT: AI026932.1, EVALUE 4.00e-10; SWISSPROT HIT: P93107, EVALUE 2.20e+00
KLWDFRKLLPIVSIDIGPSPGNEVNFDSS

SEQ ID NO: 47762 - protein, 27 aa, Homo sapiens
  MAP TO AC008179.1; EXPRESSED IN FETAL LIVER, SIGNAL = 0.91
LLWLTFAMPLPSPPSAPSAPSQPPSPR

SEQ ID NO: 47763 - protein, 75 aa, Homo sapiens
  MAP TO AL049777.2; EXPRESSED IN FETAL LIVER, SIGNAL =  22
YLPRSTSTAQIVTICRLQMHHMVYLSRSVCVCVCVCMHRGTHVNICQCFIFIFVFNFYRFRKGLCRFLIRIYYIM

SEQ ID NO: 47764 - protein, 84 aa, Homo sapiens
  MAP TO AC005064.2; EXPRESSED IN FETAL LIVER, SIGNAL = 1.6; SWISSPROT HIT: Q13228, EVALUE 7.30e-01; EST_HUMAN HIT: R55918.1, EVALUE 1.00e-05
VNILLPPDAKEIATRFRWWQPRHDGLDQNDWAIDNVLISGSADQRTVMLDTFSSAPVPQHERSPADAGPVGRIAFDMFMEDKTS

SEQ ID NO: 47765 - protein, 44 aa, Homo sapiens
  MAP TO AC009951.3; EXPRESSED IN FETAL LIVER, SIGNAL = 4.8; EST_HUMAN HIT: BF028090.1, EVALUE 3.60e-01; SWISSPROT HIT: P75522, EVALUE 8.00e+00
YPVSFWPANFNLKLDWADLMQIPPGKTLKLMNSYVKSILHHREK

SEQ ID NO: 47766 - protein, 44 aa, Homo sapiens
  MAP TO AC009951.3; EXPRESSED IN FETAL LIVER, SIGNAL = 4.8; EST_HUMAN HIT: BF028837.1, EVALUE 7.00e+00; SWISSPROT HIT: P29933, EVALUE 8.00e+00
LFPMVQNRLDITVHQFQGFPWRYLHQISPVKLQVEIGRPETHRV

SEQ ID NO: 47767 - protein, 30 aa, Homo sapiens
  MAP TO AC012113.1; EXPRESSED IN FETAL LIVER, SIGNAL =   1
RNTDLFEPIHGTVFNYGFHREVSYTCKRLA

SEQ ID NO: 47768 - protein, 80 aa, Homo sapiens [sequence omitted]

SEQ ID NO: 47769 - protein, 30 aa, Homo sapiens
  MAP TO AC011619.1; EXPRESSED IN LUNG, SIGNAL =  13; EXPRESSED IN FETAL LIVER, SIGNAL = 0.98
EKTFLNDRDPSKCESGRGRGLWEANECNCM

SEQ ID NO: 47770 - protein, 47 aa, Homo sapiens
  MAP TO AC009893.1; EXPRESSED IN FETAL LIVER, SIGNAL = 0.94; SWISSPROT HIT: P33251, EVALUE 6.00e+00; EST_HUMAN HIT: BF365702.1, EVALUE 1.80e+00
GLTAFFGIFPETMKSLIPLLKLKKNSVALLKNQVKTWAFMLPLVELL

SEQ ID NO: 47771 - protein, 34 aa, Homo sapiens
  MAP TO AC009811.2; EXPRESSED IN FETAL LIVER, SIGNAL =   1
KPRDNITLEIVVMRTEINKIEDGGNDNGSSKSRT

SEQ ID NO: 47772 - protein, 141 aa, Homo sapiens
  MAP TO AP000020.2; EXPRESSED IN FETAL LIVER, SIGNAL = 1.4; EST_HUMAN HIT: BE542371.1, EVALUE 4.30e-01; SWISSPROT HIT: P29375, EVALUE 5.30e+00
NKVDIKKQKESKKKFFGADCKQPLRNPEGWPVTCRGSQAPVVQLTPKWSLDITHVLWIARCLATPHPSQLAKASPVGLCETLVRGGNHSCGQGGGGGQFCGPKWMYNLDSKLKNVFAAELLGVFKMLMIAVKIQEGPKLGK

SEQ ID NO: 47773 - protein, 29 aa, Homo sapiens
  MAP TO AC007684.2; EXPRESSED IN FETAL LIVER, SIGNAL = 1.1; SWISSPROT HIT: P41892, EVALUE 2.20e-02; EST_HUMAN HIT: AW026004.1, EVALUE 4.00e-10
EDFAVVQQEIIMMKDCKHPNIVAYFGSYL

SEQ ID NO: 47774 - protein, 75 aa, Homo sapiens
  MAP TO AC009232.1; EXPRESSED IN FETAL LIVER, SIGNAL =  14
MLCVDYYPEISYADSAKGGRVEKAPNALLSTFKAKSLCGSQRALFPEKGGSCEGGSKSCSWNGDQAGQWSPLRLT

SEQ ID NO: 47775 - protein, 20 aa, Homo sapiens
  MAP TO AC009232.1; EXPRESSED IN FETAL LIVER, SIGNAL =  14
CSVWTIIQKFHMLTQPKVEE

SEQ ID NO: 47776 - protein, 28 aa, Homo sapiens
  MAP TO AL022328.21; EXPRESSED IN PLACENTA, SIGNAL = 1.7; EXPRESSED IN FETAL LIVER, SIGNAL = 1.6; SWISSPROT HIT: P00533, EVALUE 8.60e+00
SHVHRIFGSCLTVTVSYQLLTFICFLVG

SEQ ID NO: 47777 - protein, 65 aa, Homo sapiens
  MAP TO AC007463.3; EXPRESSED IN FETAL LIVER, SIGNAL = 1.3; EST_HUMAN HIT: BE062378.1, EVALUE 2.60e+00
GNRKTSAYSSVSLMKNENFAPILSKMKIFQPVFTCSDAVERSSQLPNGVKSNFTHACLQAACSTD

SEQ ID NO: 47778 - protein, 69 aa, Homo sapiens
  MAP TO AC007539.8; EXPRESSED IN PLACENTA, SIGNAL = 1.4; EXPRESSED IN LUNG, SIGNAL = 1.5; EXPRESSED IN BONE MARROW, SIGNAL = 1.4; EXPRESSED IN FETAL LIVER, SIGNAL = 1.7; EXPRESSED IN HELA, SIGNAL = 2.2; SWISSPROT HIT: P42593, EVALUE 5.90e-02
DSAHSKHPEQWDLDYSLEPYTGLTPEYMEMSENPWSCLPLGAGSDKGSVGLKGEGRGLGKMTGTASASS

SEQ ID NO: 47779 - protein, 40 aa, Homo sapiens
  MAP TO AC007539.8; EXPRESSED IN FETAL LIVER, SIGNAL = 1.5; EXPRESSED IN HELA, SIGNAL = 1.7; EXPRESSED IN PLACENTA, SIGNAL = 1.2; SWISSPROT HIT: P42388, EVALUE 3.70e+00
VSTCIHDTLALWEGLPEKLRSSKWEASPCTSQPFPFVALL

SEQ ID NO: 47780 - protein, 34 aa, Homo sapiens
  MAP TO AC007556.2; EXPRESSED IN FETAL LIVER, SIGNAL = 1.3; EXPRESSED IN PLACENTA, SIGNAL = 1.6; SWISSPROT HIT: P98164, EVALUE 1.00e-14
VKSNDAMVPIAGIQNGLDVEFDDAEQYIYWVENP

SEQ ID NO: 47781 - protein, 23 aa, Homo sapiens
  MAP TO AP000123.1; EXPRESSED IN FETAL LIVER, SIGNAL = 1.3; SWISSPROT HIT: P33589, EVALUE 6.70e+00
GPIPIPTSQPNQDAVCRVQTASA

SEQ ID NO: 47782 - protein, 46 aa, Homo sapiens
  MAP TO AC007539.8; EXPRESSED IN PLACENTA, SIGNAL = 1.4; EXPRESSED IN HELA, SIGNAL = 1.3; EXPRESSED IN LUNG, SIGNAL = 1.3; EXPRESSED IN FETAL LIVER, SIGNAL = 1.4
RWHQQPPKCSLQSPSAILALSFSLSLALSLPGALSLSLSPLGSSLL

SEQ ID NO: 47783 - protein, 38 aa, Homo sapiens
  MAP TO AC008272.1; EXPRESSED IN PLACENTA, SIGNAL = 1.3; EXPRESSED IN LUNG, SIGNAL = 1.3; EXPRESSED IN FETAL LIVER, SIGNAL = 1.5
RPTAGVCRAQGSSRHRSPSSLRLNCHQNTPSLVTEHPQ

SEQ ID NO: 47784 - protein, 54 aa, Homo sapiens
  MAP TO AL022318.2; EXPRESSED IN FETAL LIVER, SIGNAL = 2.8; EXPRESSED IN PLACENTA, SIGNAL = 1.5; EST_HUMAN HIT: AV708430.1, EVALUE 8.00e-19
DAGLKRRQRKEENRAKAPAASQSQSPDITNALIGSIYCLIHLKLNFCHPRLEVY

SEQ ID NO: 47785 - protein, 46 aa, Homo sapiens
  MAP TO AL022238.1; EXPRESSED IN FETAL LIVER, SIGNAL = 1.4; SWISSPROT HIT: P47135, EVALUE 8.20e+00
IDGSTLRTICMQHGPLLTFHLNLTQGTALIRYSTKQEAAKAQTALH

SEQ ID NO: 47786 - protein, 54 aa, Homo sapiens
  MAP TO AL078474.2; EXPRESSED IN FETAL LIVER, SIGNAL = 1.4; EXPRESSED IN PLACENTA, SIGNAL = 1.3; SWISSPROT HIT: P98073, EVALUE 5.00e-27
KWTAILGLHMKSNLTSPQTVPRLIDEIVINPHYNRRRKDNDIAMMHLEFKVNYT

SEQ ID NO: 47787 - protein, 37 aa, Homo sapiens
  MAP TO AC007556.2; EXPRESSED IN FETAL LIVER, SIGNAL = 1.4; SWISSPROT HIT: P98164, EVALUE 1.00e-19
RECTESEFRCVNQQCIPSRWICDHYNDCGDNSDERDC

SEQ ID NO: 47788 - protein, 38 aa, Homo sapiens
  MAP TO AC007556.2; EXPRESSED IN FETAL LIVER, SIGNAL = 1.4
PGSAQRASFDVSISSAFPRDGSVTITTTVGTTQMNGTV

SEQ ID NO: 47789 - protein, 22 aa, Homo sapiens
  MAP TO Z82201.1; EXPRESSED IN HELA, SIGNAL = 1.4; EXPRESSED IN FETAL LIVER, SIGNAL = 2.4; SWISSPROT HIT: P44402, EVALUE 6.70e+00
LDAKRIWPCPRWKDIAGGWRNK

SEQ ID NO: 47790 - protein, 52 aa, Homo sapiens
  MAP TO AL022318.2; EXPRESSED IN FETAL LIVER, SIGNAL = 1.5; EXPRESSED IN BONE MARROW, SIGNAL = 1.4; EST_HUMAN HIT: AV710022.1, EVALUE 8.00e-13
NPMEAMYPHIFYFHFKNLLKACGRNESWLCFTMEVTKHHSAVFRKRGVFRNQ

SEQ ID NO: 47791 - protein, 32 aa, Homo sapiens
  MAP TO AL035682.16; EXPRESSED IN PLACENTA, SIGNAL = 1.2; EXPRESSED IN FETAL LIVER, SIGNAL = 1.3
FAFQVAGLAQLTMNALGPLESWSKVGIINLFY

SEQ ID NO: 47792 - protein, 95 aa, Homo sapiens
  MAP TO Z97055.1; EXPRESSED IN FETAL LIVER, SIGNAL =   3; SWISSPROT HIT: P35570, EVALUE 7.30e-01
LCFRPPSSQMASESCGGLWALSILIPSSCGSSMGCGQALGHLRTLPHVQPPVGAGPGLHSKTQAASEPCQKVGIRDASAECGEDAGMGSPQVPVN

SEQ ID NO: 47793 - protein, 74 aa, Homo sapiens
  MAP TO AP000053.1; EXPRESSED IN LUNG, SIGNAL = 1.2; EXPRESSED IN FETAL LIVER, SIGNAL = 1.6; EXPRESSED IN PLACENTA, SIGNAL = 1.2; SWISSPROT HIT: P06474, EVALUE 6.20e+00
DDGNDVENVKRERNTWKYISPSINKARGLILTCMSSWGELQTAVCGQENDISSLAPGTSPKAELDELYINWYKI

SEQ ID NO: 47794 - protein, 57 aa, Homo sapiens
  MAP TO AP000352.2; EXPRESSED IN FETAL LIVER, SIGNAL = 1.7; EXPRESSED IN PLACENTA, SIGNAL = 1.4; SWISSPROT HIT: Q9Y6J0, EVALUE 6.00e-26
DSTAVALSDSSSTQDFFNEPTSLLEGSRKSYTEKRLPILSSQAGATGKDLQGATEER

SEQ ID NO: 47795 - protein, 44 aa, Homo sapiens
  MAP TO AC007539.8; EXPRESSED IN BONE MARROW, SIGNAL = 1.4; EXPRESSED IN FETAL LIVER, SIGNAL = 1.7; EXPRESSED IN HELA, SIGNAL = 1.5
MSPTRDCLLSVAGSDTFALGTIFSFSHPQFFSSPLLLYLHPFKH

SEQ ID NO: 47796 - protein, 71 aa, Homo sapiens
  MAP TO AC004832.3; EXPRESSED IN LUNG, SIGNAL = 1.4; EXPRESSED IN FETAL LIVER, SIGNAL = 1.7; SWISSPROT HIT: Q9Z1M0, EVALUE 9.40e+00
GLILCPEYSKCSINALNRHCVEAWICLDSSWIQAAGCLGARRVNFACLETKALGKERPPACPLNPRAHCLQ

SEQ ID NO: 47797 - protein, 43 aa, Homo sapiens
  MAP TO AL078474.2; EXPRESSED IN FETAL LIVER, SIGNAL = 1.4; EXPRESSED IN PLACENTA, SIGNAL = 1.4
KSKKVVFDTVVGESVTDQLKMEGKSKEMKENVTQISLKVTANS

SEQ ID NO: 47798 - protein, 36 aa, Homo sapiens
  MAP TO AP000344.1; EXPRESSED IN PLACENTA, SIGNAL = 1.8; EXPRESSED IN BONE MARROW, SIGNAL = 1.5; EXPRESSED IN LUNG, SIGNAL = 1.3; EXPRESSED IN FETAL LIVER, SIGNAL = 1.6
PEAQGNDFGDNDPCQSQCLVTYLVVMMAIKGVPAFM

SEQ ID NO: 47799 - protein, 25 aa, Homo sapiens
  MAP TO AP000344.1; EXPRESSED IN PLACENTA, SIGNAL = 1.8; EXPRESSED IN BONE MARROW, SIGNAL = 1.5; EXPRESSED IN LUNG, SIGNAL = 1.3; EXPRESSED IN FETAL LIVER, SIGNAL = 1.6
LKLKEMTLVTMTLARANALSPTWWS

SEQ ID NO: 47800 - protein, 189 aa, Homo sapiens; identical to SEQ ID NO: 38888
  MAP TO AP000345.1; EXPRESSED IN PLACENTA, SIGNAL = 1.2; EXPRESSED IN LUNG, SIGNAL = 1.4; EXPRESSED IN FETAL LIVER, SIGNAL = 1.4; SWISSPROT HIT: P10264, EVALUE 8.00e-63

SEQ ID NO: 47801 - protein, 26 aa, Homo sapiens
  MAP TO AP000345.1; EXPRESSED IN PLACENTA, SIGNAL = 1.2; EXPRESSED IN LUNG, SIGNAL = 1.4; EXPRESSED IN FETAL LIVER, SIGNAL = 1.4; SWISSPROT HIT: P10263, EVALUE 4.40e-01
VDRVVHCMQSLMKPENRAILRHGGSW

SEQ ID NO: 47802 - protein, 86 aa, Homo sapiens
  MAP TO AC006427.13; EXPRESSED IN LUNG, SIGNAL = 1.5; EXPRESSED IN FETAL LIVER, SIGNAL = 1.3
GRQRKRHHRRQLPSFQRTCLLVKTAKIPPLCLCSGSSLCLQRLSMPFHDCSAKPLINCSSPPASASLYLIVSWHTVPGPHPSSSMF

SEQ ID NO: 47803 - protein, 24 aa, Homo sapiens
  MAP TO AC005014.1; EXPRESSED IN BONE MARROW, SIGNAL = 0.58; EXPRESSED IN LUNG, SIGNAL = 0.48; EXPRESSED IN FETAL LIVER, SIGNAL = 0.81; EST_HUMAN HIT: BE674857.1, EVALUE 8.00e-06
TSSPTCPMDGTPMKCSSSMKRTTV

SEQ ID NO: 47804 - protein, 74 aa, Homo sapiens
  MAP TO AC001228.1; EXPRESSED IN LUNG, SIGNAL = 0.43; EXPRESSED IN FETAL LIVER, SIGNAL = 1.6; SWISSPROT HIT: P40144, EVALUE 4.70e+00; EST_HUMAN HIT: BE798659.1, EVALUE 1.00e+00
QVWSVGAHCCVPGCSVGALASLSRGAEVARTVRVGLSSSAGKGRALLCLAVAQAKTCSSVLRKLNRVFAPGLLP

SEQ ID NO: 47805 - protein, 29 aa, Homo sapiens
  MAP TO AC002460.1; EXPRESSED IN LUNG, SIGNAL = 0.44; EXPRESSED IN FETAL LIVER, SIGNAL = 0.69; EST_HUMAN HIT: AW996497.1, EVALUE 7.80e+00
FEIWFLEFPGKETHCHCQAIFSDYSYISS

SEQ ID NO: 47806 - protein, 109 aa, Homo sapiens
  MAP TO AC006357.2; EXPRESSED IN FETAL LIVER, SIGNAL = 1.3; EST_HUMAN HIT: AA814242.1, EVALUE 3.00e-10
YEGLRWHLLPIEGCFVDTENLCMKSPSSNTLAGSFGELAAASPLALAASPCTFMLWRRLLSFNLMNQPLPASSSSAASSPLSPPRRPLELGPGPGLGCGLGNIVAGLIF

SEQ ID NO: 47807 - protein, 84 aa, Homo sapiens
  MAP TO AC025119.2; EXPRESSED IN BONE MARROW, SIGNAL = 0.44; EXPRESSED IN PLACENTA, SIGNAL = 0.46; EXPRESSED IN FETAL LIVER, SIGNAL = 6.5; SWISSPROT HIT: P00450, EVALUE 4.00e-47; EST_HUMAN HIT: AV652035.1, EVALUE 1.00e-30
VNGYTFGSLPGLSMCAEDRVKWYLFGMGNEVDVHAAFFHGQALTNKNYRIDTINLFPATLFDAYMVAQNPGEWMLSCQNLNHLK

SEQ ID NO: 47808 - protein, 77 aa, Homo sapiens
  MAP TO AC011472.3; EXPRESSED IN FETAL LIVER, SIGNAL = 0.75; EST_HUMAN HIT: BF369965.1, EVALUE 1.00e-05; SWISSPROT HIT: Q06639, EVALUE 2.50e+00
DPYLDKFFTLVHVLEEGAFPFRLKDTVLSEGNVEQELRASLAALRLASPEPLVAFSHHVLDKLVRLVIRPPIISGQI

SEQ ID NO: 47809 - protein, 27 aa, Homo sapiens
  MAP TO AC011472.3; EXPRESSED IN FETAL LIVER, SIGNAL = 0.75; EST_HUMAN HIT: BF342373.1, EVALUE 4.60e+00
TPTWTNSSPWCTSWRREPSHSGSRTLC

SEQ ID NO: 47810 - protein, 55 aa, Homo sapiens
  MAP TO AL137141.7; EXPRESSED IN LUNG, SIGNAL = 1.7; EXPRESSED IN BONE MARROW, SIGNAL = 3.9; EXPRESSED IN PLACENTA, SIGNAL = 0.53; EXPRESSED IN FETAL LIVER, SIGNAL = 0.83; EST_HUMAN HIT: AW503346.1, EVALUE 9.00e-25; SWISSPROT HIT: Q61233, EVALUE 7.00e-26
ENLNLALNSASAIGCHVVNIGAEDLKEGKPYLVLGLLWQVIKIGLFADIELSRNE

SEQ ID NO: 47811 - protein, 26 aa, Homo sapiens
  MAP TO AP001415.1; EXPRESSED IN PLACENTA, SIGNAL = 0.58; EXPRESSED IN FETAL LIVER, SIGNAL = 0.47; EXPRESSED IN BONE MARROW, SIGNAL = 0.49
HTLCFHSSSHFPRDKGHGAGRVCTTQ

SEQ ID NO: 47812 - protein, 59 aa, Homo sapiens
  MAP TO AC010290.4; EXPRESSED IN BONE MARROW, SIGNAL = 0.51; EXPRESSED IN PLACENTA, SIGNAL = 0.5; EXPRESSED IN FETAL LIVER, SIGNAL = 0.64; EST_HUMAN HIT: BE244981.1, EVALUE 1.00e-12
LYDLAVLKKKVKEKEEKKKKKIKTIKSEAEDLAEPLSSTEGVAPLSQAPSPLAIPAIKE

SEQ ID NO: 47813 - protein, 30 aa, Homo sapiens
  MAP TO AC015529.3; EXPRESSED IN BONE MARROW, SIGNAL = 0.59; EXPRESSED IN PLACENTA, SIGNAL = 0.61; EXPRESSED IN FETAL LIVER, SIGNAL = 0.56; SWISSPROT HIT: O55042, EVALUE 5.00e-10; EST_HUMAN HIT: BE967371.1, EVALUE 7.00e-09
AKEGVVAAAEKTKQGVAEAAGKTKEGVLYV

SEQ ID NO: 47814 - protein, 30 aa, Homo sapiens
  MAP TO AC015529.3; EXPRESSED IN BONE MARROW, SIGNAL = 0.59; EXPRESSED IN PLACENTA, SIGNAL = 0.61; EXPRESSED IN FETAL LIVER, SIGNAL = 0.56; EST_HUMAN HIT: AI879066.1, EVALUE 6.00e-11
RPRRELWLLLRKPNRVWQKQQERQKRVFSM

SEQ ID NO: 47815 - protein, 37 aa, Homo sapiens
  MAP TO AL132981.5; EXPRESSED IN FETAL LIVER, SIGNAL = 0.62; EXPRESSED IN BONE MARROW, SIGNAL = 0.44; EST_HUMAN HIT: AA009706.1, EVALUE 5.60e+00
ESMFLKQTMSETDNFPKVQHCKEFGELKHALCAVGMQ

SEQ ID NO: 47816 - protein, 51 aa, Homo sapiens
  MAP TO AC025746.2; EXPRESSED IN BONE MARROW, SIGNAL = 0.69; EXPRESSED IN FETAL LIVER, SIGNAL = 0.73; SWISSPROT HIT: P20303, EVALUE 4.70e+00; EST_HUMAN HIT: BE168410.1, EVALUE 4.00e-18
YQRKQNGSQFWNSKMSSSVSPCTLTPSFSLSLRIPQTTCPNLRGWSCPKGF

SEQ ID NO: 47817 - protein, 51 aa, Homo sapiens
  MAP TO AC021383.3; EXPRESSED IN FETAL LIVER, SIGNAL = 0.57; EXPRESSED IN PLACENTA, SIGNAL = 0.46; EST_HUMAN HIT: AA406460.1, EVALUE 1.30e+00
KYQPQFSNVHVHTSDFKLSQKEPISGYYISECLCSATTSSIKYYTSYDSIL

SEQ ID NO: 47818 - protein, 51 aa, Homo sapiens
  MAP TO AC021383.3; EXPRESSED IN FETAL LIVER, SIGNAL = 0.57; EXPRESSED IN PLACENTA, SIGNAL = 0.46; SWISSPROT HIT: P43670, EVALUE 8.00e+00
NISLNFLMFMYTPVTSNSARKNQSQATISLSACVLQLLLASNITPVMIPFY

SEQ ID NO: 47819 - protein, 64 aa, Homo sapiens
  MAP TO AL118505.13; EXPRESSED IN PLACENTA, SIGNAL = 0.52; EXPRESSED IN BONE MARROW, SIGNAL = 0.89; EXPRESSED IN FETAL LIVER, SIGNAL = 0.55; SWISSPROT HIT: Q15006, EVALUE 5.90e+00; EST_HUMAN HIT: AW449639.1, EVALUE 7.60e+00
SRNKNDKCMFLLYIEANSISNSKGQKTKSSEDGCKHGMLMEFSLKDLYAIQEIQAEENLFKLIV

SEQ ID NO: 47820 - protein, 39 aa, Homo sapiens
  MAP TO AL118505.13; EXPRESSED IN PLACENTA, SIGNAL = 0.52; EXPRESSED IN BONE MARROW, SIGNAL = 0.89; EXPRESSED IN FETAL LIVER, SIGNAL = 0.55
VLEIRMTSVCSFCILKQILLVIAKDRKQRVLRMGVSMEC

SEQ ID NO: 47821 - protein, 71 aa, Homo sapiens
  MAP TO AC010876.2; EXPRESSED IN PLACENTA, SIGNAL = 0.46; EXPRESSED IN FETAL LIVER, SIGNAL = 0.55; EXPRESSED IN BONE MARROW, SIGNAL = 0.5; EST_HUMAN HIT: BF337464.1, EVALUE 6.00e-33; SWISSPROT HIT: P21507, EVALUE 2.00e-03
EENVAARASPEPELQLRPYQMEVAQPALEGKNIIICLPTGSGKTRVAVYIAKDHLDKKKKASEPGKVIVLV

SEQ ID NO: 47822 - protein, 50 aa, Homo sapiens
  MAP TO AC025129.2; EXPRESSED IN PLACENTA, SIGNAL = 0.47; EXPRESSED IN FETAL LIVER, SIGNAL = 1.3; EXPRESSED IN BONE MARROW, SIGNAL = 0.59
SDANANSNTNAGANANTDSNANSNTSNNANANITSNTHANRNIDTNANTK

SEQ ID NO: 47823 - protein, 53 aa, Homo sapiens
  MAP TO AC025129.2; EXPRESSED IN PLACENTA, SIGNAL = 0.47; EXPRESSED IN FETAL LIVER, SIGNAL = 1.3; EXPRESSED IN BONE MARROW, SIGNAL = 0.59
VVMLMLIVTLMLVLMLIPTVMLIVTLVIMLMLISLVILMLIGTLILMLIPRVK

SEQ ID NO: 47824 - protein, 52 aa, Homo sapiens
  MAP TO AC021037.4; EXPRESSED IN FETAL LIVER, SIGNAL = 0.65; EXPRESSED IN BONE MARROW, SIGNAL = 0.43; SWISSPROT HIT: Q13094, EVALUE 1.60e-02; EST_HUMAN HIT: BF664531.1, EVALUE 8.00e-26
DSDYENPDEHSDSEMYVMPAEENADDSYEPPPVEQETRPVHPALPFARGEYI

SEQ ID NO: 47825 - protein, 38 aa, Homo sapiens
  MAP TO AL117381.9; EXPRESSED IN FETAL LIVER, SIGNAL = 0.47; EXPRESSED IN BONE MARROW, SIGNAL = 0.43; EST_HUMAN HIT: AI439401.1, EVALUE 2.00e-17; SWISSPROT HIT: P26954, EVALUE 3.70e+00
MATPLSDADQCWMLWGREYWADSQWMWILFPSSIADLQ

SEQ ID NO: 47826 - protein, 46 aa, Homo sapiens
  MAP TO AL121777.16; EXPRESSED IN FETAL LIVER, SIGNAL = 0.48; SWISSPROT HIT: Q12872, EVALUE 6.20e+00; EST_HUMAN HIT: BE255516.1, EVALUE 5.20e+00
RVKVFRHVQAPPLPGQAHVTYEDNGTSQRQSNTSPCKNCQCNRPLP

SEQ ID NO: 47827 - protein, 49 aa, Homo sapiens
  MAP TO AC015496.3; EXPRESSED IN PLACENTA, SIGNAL = 0.45; EXPRESSED IN FETAL LIVER, SIGNAL = 0.49; EXPRESSED IN BONE MARROW, SIGNAL = 0.49
EYSVQADTVVQQYKGFGLLLSSCSDILLWDCGSFGNKVLVHLHTSFLFQ

SEQ ID NO: 47828 - protein, 38 aa, Homo sapiens
  MAP TO AC015496.3; EXPRESSED IN PLACENTA, SIGNAL = 0.45; EXPRESSED IN FETAL LIVER, SIGNAL = 0.49; EXPRESSED IN BONE MARROW, SIGNAL = 0.49
NTRCRLIQWFSNIKDLGSFYLPALIFYCGTVVPLATKF

SEQ ID NO: 47829 - protein, 64 aa, Homo sapiens
  MAP TO AC015529.3; EXPRESSED IN PLACENTA, SIGNAL = 0.66; EXPRESSED IN FETAL LIVER, SIGNAL = 0.77; EXPRESSED IN BONE MARROW, SIGNAL = 0.5; EST_HUMAN HIT: AA777407.1, EVALUE 1.00e-09; SWISSPROT HIT: Q13201, EVALUE 1.00e-18
SFARKSNEQATSLNTVGGTGGIGGVGGTGGVGNRAPRETYLSRGDSSSSQRTDYQKSNFETTRG

SEQ ID NO: 47830 - protein, 49 aa, Homo sapiens
  MAP TO AC015529.3; EXPRESSED IN PLACENTA, SIGNAL = 0.66; EXPRESSED IN FETAL LIVER, SIGNAL = 0.77; EXPRESSED IN BONE MARROW, SIGNAL = 0.5; EST_HUMAN HIT: AA777407.1, EVALUE 2.00e-08
LEALEALEALEALEAWEIEPHGKHTSAGVTAVPAKELTTKNQISKQLEE

SEQ ID NO: 47831 - protein, 54 aa, Homo sapiens
  MAP TO AC009943.4; EXPRESSED IN FETAL LIVER, SIGNAL = 0.48; EST_HUMAN HIT: AW183064.1, EVALUE 1.00e-10
VKYLPGAKEHINLSTAASFSLNLHAHTLSAVTALNLEGISILRSNETMIVRLKK

SEQ ID NO: 47832 - protein, 71 aa, Homo sapiens
  MAP TO AC024196.2; EXPRESSED IN LUNG, SIGNAL = 0.98; EXPRESSED IN PLACENTA, SIGNAL = 1.2; EXPRESSED IN FETAL LIVER, SIGNAL = 0.98; EXPRESSED IN BONE MARROW, SIGNAL = 0.46; EST_HUMAN HIT: BE563824.1, EVALUE 1.00e-34; SWISSPROT HIT: P13647, EVALUE 1.00e-35
VRFLEQQNKVLDTKWTLLQEQGTKTVRQNLEPLFEQYINNLRRQLDSIVGERGRLDSELRNMQDLVEDFKN

SEQ ID NO: 47833 - protein, 25 aa, Homo sapiens
  MAP TO AC024196.2; EXPRESSED IN LUNG, SIGNAL = 0.98; EXPRESSED IN PLACENTA, SIGNAL = 1.2; EXPRESSED IN FETAL LIVER, SIGNAL = 0.98; EXPRESSED IN BONE MARROW, SIGNAL = 0.46; EST_HUMAN HIT: BE614844.1, EVALUE 9.00e-10; SWISSPROT HIT: Q13057, EVALUE 1.30e+00
CGSWSSRTRFWTPSGPCCRSRAPRL

SEQ ID NO: 47834 - protein, 50 aa, Homo sapiens
  MAP TO AC022994.2; EXPRESSED IN PLACENTA, SIGNAL = 0.78; EXPRESSED IN FETAL LIVER, SIGNAL = 0.66; SWISSPROT HIT: P38573, EVALUE 2.70e+00; EST_HUMAN HIT: BE736381.1, EVALUE 3.90e+00
DRLACVQATNSNQHFVVADTNSAIGICLPCVPVLSLNCGITHGSVLYVIF

SEQ ID NO: 47835 - protein, 60 aa, Homo sapiens; identical to SEQ ID NO: 34723
  MAP TO AC009311.2; EXPRESSED IN BONE MARROW, SIGNAL = 0.79; EXPRESSED IN PLACENTA, SIGNAL = 0.55; EXPRESSED IN FETAL LIVER, SIGNAL = 0.75; SWISSPROT HIT: P80217, EVALUE 7.00e-03; EST_HUMAN HIT: AI862910.1, EVALUE 2.00e-28

SEQ ID NO: 47836 - protein, 62 aa, Homo sapiens
  MAP TO AC010397.3; EXPRESSED IN PLACENTA, SIGNAL = 0.48; EXPRESSED IN FETAL LIVER, SIGNAL = 1.8; EST_HUMAN HIT: H23481.1, EVALUE 2.00e-30; SWISSPROT HIT: P10394, EVALUE 1.00e-03
KKLFYVGKDRKQNRLVIVSEEEKKKVLRECHENDSGAHHGISRTLTLVESNYYWTSVTNDVK

SEQ ID NO: 47837 - protein, 45 aa, Homo sapiens
  MAP TO AL135998.2; EXPRESSED IN PLACENTA, SIGNAL = 0.46; EXPRESSED IN FETAL LIVER, SIGNAL = 0.65; EXPRESSED IN BONE MARROW, SIGNAL = 0.43
RRAQAVDELDWPPQASSSGSSDSLGSGEAAPAQKDGIFKVMLVGE

SEQ ID NO: 47838 - protein, 70 aa, Homo sapiens
  MAP TO AC018780.3; EXPRESSED IN FETAL LIVER, SIGNAL = 0.79; EXPRESSED IN BONE MARROW, SIGNAL = 0.73; EST_HUMAN HIT: BE886295.1, EVALUE 4.00e-30; SWISSPROT HIT: P42695, EVALUE 5.00e-31
CVQIQKAWLRGVVPVVMDCESTVQEKALEFLDQLLLQNIRHHSHFHSGDDSQVLAWALLTLLTTESQELR

SEQ ID NO: 47839 - protein, 79 aa, Homo sapiens
  MAP TO AC018780.3; EXPRESSED IN FETAL LIVER, SIGNAL = 0.49; EST_HUMAN HIT: AU125261.1, EVALUE 1.00e-39; SWISSPROT HIT: P42695, EVALUE 2.00e-40
KLCLQHEDLAKKSIPALVRELEVCEDVAVRNNVIIVMCDLCIRYTIMVDKYIPNISMCLKDSDPFIRKQTLILLTNLLQ

SEQ ID NO: 47840 - protein, 30 aa, Homo sapiens
  MAP TO AC018780.3; EXPRESSED IN FETAL LIVER, SIGNAL = 0.49; EST_HUMAN HIT: AU124782.1, EVALUE 1.00e-11
TRIWQRRASQPWCESSRCVRTWLSATTSSL

SEQ ID NO: 47841 - protein, 38 aa, Homo sapiens
  MAP TO AC022268.3; EXPRESSED IN FETAL LIVER, SIGNAL =   2; SWISSPROT HIT: Q63415, EVALUE 3.70e+00
AHSENEGTALPSADSCTSPTKMDLSYSKTAKQCLEEIS

SEQ ID NO: 47842 - protein, 38 aa, Homo sapiens
  MAP TO AC022268.3; EXPRESSED IN FETAL LIVER, SIGNAL =   2
HIQKMKVPLYHRLTPVPVLQRWTYHIVRLLSSAWRRYL

SEQ ID NO: 47843 - protein, 46 aa, Homo sapiens
  MAP TO AL049838.3; EXPRESSED IN FETAL LIVER, SIGNAL = 0.79
LPVFNIFLMLFFLVVVPFKENCSSIRKSTKFSPEADKHKVLTAKVN

SEQ ID NO: 47844 - protein, 141 aa, Homo sapiens
  MAP TO AL157911.2; EXPRESSED IN FETAL LIVER, SIGNAL = 0.46; EXPRESSED IN BONE MARROW, SIGNAL = 0.48; EST_HUMAN HIT: AW748117.1, EVALUE 1.00e-51; SWISSPROT HIT: P73087, EVALUE 1.40e+00
FTSLYAKNKSTTVERILTTDILAEEDEHEFTSCTGAETVKFLIPGKKYVANTVFHSILAGLACGLGTWYLLPNRITLLYGSTGGTALLFFFGWMTLCIAEYSLIVNTATETATFQTQDTYEIIPLMRPLYIFFFVSVDLAH

SEQ ID NO: 47845 - protein, 57 aa, Homo sapiens
  MAP TO AC006038.2; EXPRESSED IN BONE MARROW, SIGNAL = 0.66; EXPRESSED IN FETAL LIVER, SIGNAL = 0.51; SWISSPROT HIT: Q05344, EVALUE 2.00e+00; EST_HUMAN HIT: AI017333.1, EVALUE 9.00e-14
GTEKKKEKPQGQREKKEESHSNDQSPQIRASPSPQPSSQPLQIHRQTPESKNATPTK

SEQ ID NO: 47846 - protein, 65 aa, Homo sapiens
  MAP TO AC006038.2; EXPRESSED IN BONE MARROW, SIGNAL = 0.66; EXPRESSED IN FETAL LIVER, SIGNAL = 0.51; EST_HUMAN HIT: AI017333.1, EVALUE 3.00e-13
VQKKRKKNHKDREKKKRNLILMIKVHKFEHHLLPSPLHNLSKYTDKLQKARMLLPPKGFNCPQVQ

SEQ ID NO: 47847 - protein, 43 aa, Homo sapiens
  MAP TO AC024196.2; EXPRESSED IN FETAL LIVER, SIGNAL = 1.8; EXPRESSED IN BONE MARROW, SIGNAL = 0.42; EST_HUMAN HIT: BE778201.1, EVALUE 1.60e-01
SVCSWLLAALGSWLQVWGTASVCSLSASLQTASLPISPFPTHL

SEQ ID NO: 47848 - protein, 44 aa, Homo sapiens
  MAP TO AC016546.2; EXPRESSED IN BONE MARROW, SIGNAL = 0.47; EXPRESSED IN FETAL LIVER, SIGNAL = 0.62; EST_HUMAN HIT: BF667792.1, EVALUE 1.40e+00; SWISSPROT HIT: O84242, EVALUE 3.70e+00
DSDVRHQRLTSRFIKWLIKSAARRMTFICFTCLKILGLKDLTIS

SEQ ID NO: 47849 - protein, 44 aa, Homo sapiens
  MAP TO AL137124.6; EXPRESSED IN PLACENTA, SIGNAL = 1.1; EXPRESSED IN BONE MARROW, SIGNAL = 2.7; EXPRESSED IN FETAL LIVER, SIGNAL = 0.49; EST_HUMAN HIT: AU138248.1, EVALUE 4.00e-15
GTIQSGWLKVTTRNQRARCLLMPSLRRHAEKNIRRKTQRSLSIL

SEQ ID NO: 47850 - protein, 32 aa, Homo sapiens
  MAP TO AC021186.2; EXPRESSED IN FETAL LIVER, SIGNAL = 0.5
EKPRELTEAEVILDEYSSYYHNKLNKREERNH

SEQ ID NO: 47851 - protein, 35 aa, Homo sapiens; identical to SEQ ID NO: 47421
  MAP TO AL161744.1; EXPRESSED IN PLACENTA, SIGNAL = 0.45; EXPRESSED IN FETAL LIVER, SIGNAL = 0.48; SWISSPROT HIT: Q04605, EVALUE 6.40e+00

SEQ ID NO: 47852 - protein, 22 aa, Homo sapiens
  MAP TO AL161744.1; EXPRESSED IN PLACENTA, SIGNAL = 0.45; EXPRESSED IN FETAL LIVER, SIGNAL = 0.48
KIRKKSIKILLIFPHHRLRLAK

SEQ ID NO: 47853 - protein, 84 aa, Homo sapiens
  MAP TO AC018780.3; EXPRESSED IN FETAL LIVER, SIGNAL = 0.8; EST_HUMAN HIT: BE245345.1, EVALUE 2.00e-32; SWISSPROT HIT: P42695, EVALUE 5.00e-42
IPHRVFTLDVVLALLELPEREVDNTLSLEHQKFLKHKFLVQEIMFDRCLDKAPTVRSKALSSFAHCLELTVTSASESILELLIN

SEQ ID NO: 47854 - protein, 44 aa, Homo sapiens
  MAP TO AL161752.1; EXPRESSED IN FETAL LIVER, SIGNAL = 0.51; EXPRESSED IN BONE MARROW, SIGNAL = 0.44; SWISSPROT HIT: Q9ZMW3, EVALUE 8.20e+00; EST_HUMAN HIT: AI798202.1, EVALUE 6.00e-20
EGLDNIVWIDWINTEEQESGRIVPCMQQAMLYTGLSGCSREVPW

SEQ ID NO: 47855 - protein, 63 aa, Homo sapiens
  MAP TO AL133163.2; EXPRESSED IN FETAL LIVER, SIGNAL = 2.8; EXPRESSED IN PLACENTA, SIGNAL = 1.5; EXPRESSED IN BONE MARROW, SIGNAL = 1.6; EXPRESSED IN LUNG, SIGNAL =  21; EST_HUMAN HIT: BE549706.1, EVALUE 2.00e-31; SWISSPROT HIT: P25963, EVALUE 1.00e-32
EPCNGRTALHLAVDLQNPDLVSLLLKCGADVNRVTYQGYSPYQLTWGRPSTRIQQQLGQLTLE

SEQ ID NO: 47856 - protein, 67 aa, Homo sapiens
  MAP TO AC010311.5; EXPRESSED IN FETAL LIVER, SIGNAL =   2; EXPRESSED IN LUNG, SIGNAL = 2.6; EXPRESSED IN PLACENTA, SIGNAL = 1.9; EST_HUMAN HIT: BE168726.1, EVALUE 1.00e-16
MSSNSISSSSLSGALFSSLWKNDTSGKLGCRSSLSRLTISRKVGLILGLNCQHMRMRSVLRGRRTRP

SEQ ID NO: 47857 - protein, 34 aa, Homo sapiens
  MAP TO AC019248.3; EXPRESSED IN PLACENTA, SIGNAL = 1.4; EXPRESSED IN FETAL LIVER, SIGNAL = 1.6; EST_HUMAN HIT: AI223124.1, EVALUE 4.40e+00
LLKQCGTWLTCLFLPVVLALTCLPRAVKVRRQGS

SEQ ID NO: 47858 - protein, 46 aa, Homo sapiens
  MAP TO AC017111.2; EXPRESSED IN FETAL LIVER, SIGNAL = 2.3; EST_HUMAN HIT: AA485790.1, EVALUE 6.80e+00; SWISSPROT HIT: P10184, EVALUE 6.20e+00
CTPEFLILGMHTSSTDIHSTKCKLPIRKVQCYPIKSGLMKEICLNS

SEQ ID NO: 47859 - protein, 49 aa, Homo sapiens
  MAP TO AC002126.1; EXPRESSED IN HELA, SIGNAL = 1.9; EXPRESSED IN LUNG, SIGNAL = 2.5; EXPRESSED IN FETAL LIVER, SIGNAL = 1.7; EST_HUMAN HIT: BE905633.1, EVALUE 3.00e-22; SWISSPROT HIT: O14593, EVALUE 2.00e-23
MELTQPAEDLIQTQQTPASELGDPEDPGEEAADGSDTVVLSLFPCTPEP

SEQ ID NO: 47860 - protein, 57 aa, Homo sapiens
  MAP TO AC018739.2; EXPRESSED IN FETAL LIVER, SIGNAL = 1.6; EST_HUMAN HIT: BE173199.1, EVALUE 1.00e-04
QAKSSPSNATCLRQGPVTVVYPLSFFPIYWRRGLRETLSPLWHLYLVTVGLREEEAV

SEQ ID NO: 47861 - protein, 90 aa, Homo sapiens
  MAP TO AC011469.3; EXPRESSED IN FETAL LIVER, SIGNAL =  33; SWISSPROT HIT: P21817, EVALUE 2.00e-45
SLQELVSHMVVRWAQEDFVQSPELVRAMFSLLHRQYDGLGELLRALPRAYTISPSSVEDTMSLLECLGQIRSLLIVQMGPQEENLMIQSI

SEQ ID NO: 47862 - protein, 45 aa, Homo sapiens
  MAP TO AC010487.4; EXPRESSED IN PLACENTA, SIGNAL = 3.6; EXPRESSED IN BONE MARROW, SIGNAL = 2.3; EXPRESSED IN FETAL LIVER, SIGNAL = 1.6; EXPRESSED IN HELA, SIGNAL = 1.7; EXPRESSED IN LUNG, SIGNAL = 1.9
GEQRRRRDGRRGRNIWRLRMIERLGRRSNKRLKNLRRWSRRGGRE

SEQ ID NO: 47863 - protein, 75 aa, Homo sapiens
  MAP TO AC023404.2; EXPRESSED IN PLACENTA, SIGNAL = 1.3; EXPRESSED IN FETAL LIVER, SIGNAL = 1.9; EST_HUMAN HIT: AA446356.1, EVALUE 1.00e-39; SWISSPROT HIT: Q03571, EVALUE 2.00e-15
VEVKPYVLDDQLCDECQGARCGGKFAPFFCANVTCLQYYCEYCWAAIHSRAGREFHKPLVKEGGDRPRHISFRWN

SEQ ID NO: 47864 - protein, 59 aa, Homo sapiens
  MAP TO AC023404.2; EXPRESSED IN PLACENTA, SIGNAL = 1.3; EXPRESSED IN FETAL LIVER, SIGNAL = 1.9; EST_HUMAN HIT: T93967.1, EVALUE 9.00e-29; SWISSPROT HIT: P03960, EVALUE 1.60e+00
WKLSHMSWMISCVMNVRGPVVGGNLLHFSVLMLPVCSITVNIAGLLSILVLAGNSTSPW

SEQ ID NO: 47865 - protein, 43 aa, Homo sapiens
  MAP TO AL138717.2; EXPRESSED IN PLACENTA, SIGNAL = 1.8; EXPRESSED IN HELA, SIGNAL = 1.8; EXPRESSED IN BONE MARROW, SIGNAL = 1.5; EXPRESSED IN FETAL LIVER, SIGNAL = 1.6; EXPRESSED IN LUNG, SIGNAL =   3; SWISSPROT HIT: P48724, EVALUE 7.30e-01; EST_HUMAN HIT: BF685652.1, EVALUE 5.00e-18
SQDFCCEGCGSAMKDVLLPLKSGSDSSQADQEAKELARQISFK

SEQ ID NO: 47866 - protein, 31 aa, Homo sapiens
  MAP TO AL121852.2; EXPRESSED IN BONE MARROW, SIGNAL = 1.6; EXPRESSED IN HELA, SIGNAL = 3.4; EXPRESSED IN FETAL LIVER, SIGNAL = 2.7; EST_HUMAN HIT: N75989.1, EVALUE 8.00e-04
MLGSPSRLEMESVLDGEQNGPDVIQGRPLVL

SEQ ID NO: 47867 - protein, 96 aa, Homo sapiens
  MAP TO AC008655.3; EXPRESSED IN FETAL LIVER, SIGNAL = 1.9; EXPRESSED IN PLACENTA, SIGNAL = 1.7; EXPRESSED IN BONE MARROW, SIGNAL = 1.8; EXPRESSED IN LUNG, SIGNAL = 4.3; EST_HUMAN HIT: AU136157.1, EVALUE 1.00e-21; SWISSPROT HIT: Q60644, EVALUE 7.00e-23
IPDPEEEPERKRKKGPAPKMLGHELCRVCGDKASGFHYNVLSCEGCKGFFRRSVVRGGARRYACRGGGTCQMDAFMRRKCQQCRLRKCKEAGMREQ

SEQ ID NO: 47868 - protein, 93 aa, Homo sapiens
  MAP TO AC008655.3; EXPRESSED IN FETAL LIVER, SIGNAL = 1.9; EXPRESSED IN PLACENTA, SIGNAL = 1.7; EXPRESSED IN BONE MARROW, SIGNAL = 1.8; EXPRESSED IN LUNG, SIGNAL = 4.3; EST_HUMAN HIT: BE410116.1, EVALUE 2.00e-25
SSQIPKRNQSASERRAQPRRCWATSFAVSVGTRPPASTTTCSAAKAARASSGAVWSVVGPGAMPAGVAEPARWTLSCGASASSAGCASARRQG

SEQ ID NO: 47869 - protein, 34 aa, Homo sapiens
  MAP TO AC004662.1; EXPRESSED IN HELA, SIGNAL = 1.8; EXPRESSED IN FETAL LIVER, SIGNAL = 1.7; EST_HUMAN HIT: AV645579.1, EVALUE 4.00e-03
REVRDPERRDRLEPRQKKINCEDFMDIYQFPKLI

SEQ ID NO: 47870 - protein, 18 aa, Homo sapiens
  MAP TO AC004662.1; EXPRESSED IN HELA, SIGNAL = 1.8; EXPRESSED IN FETAL LIVER, SIGNAL = 1.7; EST_HUMAN HIT: AW849941.1, EVALUE 3.20e-01
GKSGTLNGGTGWSQGRRR

SEQ ID NO: 47871 - protein, 51 aa, Homo sapiens
  MAP TO AC011462.3; EXPRESSED IN PLACENTA, SIGNAL = 2.9; EXPRESSED IN FETAL LIVER, SIGNAL = 1.6; EXPRESSED IN BONE MARROW, SIGNAL = 6.5; EXPRESSED IN LUNG, SIGNAL = 7.8; EST_HUMAN HIT: BE737006.1, EVALUE 4.00e-28; SWISSPROT HIT: O19011, EVALUE 3.00e-29
STEKNCCVRQLYIDFRKDLGWKWIHEPKGYHANFCLGPCPYIWSLDTQYSK

SEQ ID NO: 47872 - protein, 50 aa, Homo sapiens
  MAP TO AC011462.3; EXPRESSED IN PLACENTA, SIGNAL = 2.9; EXPRESSED IN FETAL LIVER, SIGNAL = 1.6; EXPRESSED IN BONE MARROW, SIGNAL = 6.5; EXPRESSED IN LUNG, SIGNAL = 7.8; EST_HUMAN HIT: AI089904.1, EVALUE 2.00e-11
PRRRTAACGSCTLTSARTSAGSGSTSPRATMPTSASGPAPTFGAWTRSTA

SEQ ID NO: 47873 - protein, 44 aa, Homo sapiens
  MAP TO AC008569.3; EXPRESSED IN BONE MARROW, SIGNAL = 2.6; EXPRESSED IN FETAL LIVER, SIGNAL =   2; EXPRESSED IN LUNG, SIGNAL = 3.6; EST_HUMAN HIT: BE378337.1, EVALUE 9.00e-19; SWISSPROT HIT: Q63413, EVALUE 2.00e-19
PMEVFVDDETKLTLHGLQQYYVKLKDSEKNRKLFDLLDVLEFNQ

SEQ ID NO: 47874 - protein, 36 aa, Homo sapiens
  MAP TO AC008569.3; EXPRESSED IN BONE MARROW, SIGNAL = 2.6; EXPRESSED IN FETAL LIVER, SIGNAL =   2; EXPRESSED IN LUNG, SIGNAL = 3.6; EST_HUMAN HIT: BF526823.1, EVALUE 9.00e-13; SWISSPROT HIT: Q29024, EVALUE 1.00e-12
VIIFVKSVQRCMALAQLLVEQNFPAIAIHRGMAQEE

SEQ ID NO: 47875 - protein, 44 aa, Homo sapiens
  MAP TO AC008569.3; EXPRESSED IN BONE MARROW, SIGNAL = 2.6; EXPRESSED IN FETAL LIVER, SIGNAL =   2; EXPRESSED IN LUNG, SIGNAL = 3.6; EST_HUMAN HIT: BE904942.1, EVALUE 7.00e-08
PWRCLWTTRPSSRCTACSSTTSNSKTVRRTASSLISWMCWSLTR

SEQ ID NO: 47876 - protein, 17 aa, Homo sapiens
  MAP TO AC020748.2; EXPRESSED IN FETAL LIVER, SIGNAL = 2.1; EST_HUMAN HIT: AI904584.1, EVALUE 1.70e-02
VSRMATGILVDCRLVTW

SEQ ID NO: 47877 - protein, 52 aa, Homo sapiens
  MAP TO AC020912.3; EXPRESSED IN FETAL LIVER, SIGNAL =   2; EXPRESSED IN LUNG, SIGNAL =   6; EST_HUMAN HIT: BE734881.1, EVALUE 8.50e+00; SWISSPROT HIT: P53804, EVALUE 2.10e+00
MVAMQVAAHRGPSRHSLEDPLFQPVSASCPGATTSVQFISKQSDITEKDLSQ

SEQ ID NO: 47878 - protein, 34 aa, Homo sapiens
  MAP TO AL109938.8; EXPRESSED IN FETAL LIVER, SIGNAL =   2; EST_HUMAN HIT: BE501320.1, EVALUE 8.70e-01
MRELPGWFLFFGVFLPVTLLLLLLIAYFRIKLIE

SEQ ID NO: 47879 - protein, 22 aa, Homo sapiens
  MAP TO AC009263.6; EXPRESSED IN FETAL LIVER, SIGNAL = 1.7; EST_HUMAN HIT: AI678980.1, EVALUE 1.40e-01
AASQMCLQLTLPGGRASALLPE

SEQ ID NO: 47880 - protein, 42 aa, Homo sapiens
  MAP TO AC008770.3; EXPRESSED IN FETAL LIVER, SIGNAL = 1.7; EXPRESSED IN LUNG, SIGNAL = 1.8; SWISSPROT HIT: P52737, EVALUE 5.00e-12; EST_HUMAN HIT: AW206752.1, EVALUE 8.00e-18
DPVAFKDVAVNFTQEEWALLDISQKNLYREVMLETFWNLTSI

SEQ ID NO: 47881 - protein, 44 aa, Homo sapiens
  MAP TO AC008543.4; EXPRESSED IN BONE MARROW, SIGNAL = 1.6; EXPRESSED IN FETAL LIVER, SIGNAL = 2.1; EST_HUMAN HIT: BF131926.1, EVALUE 4.00e-08; SWISSPROT HIT: Q13495, EVALUE 8.20e+00
LFEIMKTLTLVKNPVNVSNVGKPLVIPVTFEYMKEFTLESRCIN

SEQ ID NO: 47882 - protein, 51 aa, Homo sapiens
  MAP TO AC008897.4; EXPRESSED IN FETAL LIVER, SIGNAL = 2.3; EXPRESSED IN HELA, SIGNAL = 1.7; EST_HUMAN HIT: AU132001.1, EVALUE 7.00e-23; SWISSPROT HIT: P04035, EVALUE 6.00e-24
MLGVQGACKDNPGENARQLARIVCGTVMAGELSLMAALAAGHLVKSHMIHN

SEQ ID NO: 47883 - protein, 44 aa, Homo sapiens
  MAP TO AC022374.1; EXPRESSED IN HELA, SIGNAL = 2.2; EXPRESSED IN FETAL LIVER, SIGNAL = 1.7; EST_HUMAN HIT: BE298428.1, EVALUE 4.70e-01; SWISSPROT HIT: P28996, EVALUE 4.80e+00
SWQREQDREGKVKIKDGKNGQGQDKDLHARNMKEELDCEGKRKE

SEQ ID NO: 47884 - protein, 58 aa, Homo sapiens
  MAP TO AC007216.2; EXPRESSED IN BONE MARROW, SIGNAL = 1.9; EXPRESSED IN FETAL LIVER, SIGNAL = 1.7; SWISSPROT HIT: P15170, EVALUE 4.00e-29; EST_HUMAN HIT: BE790942.1, EVALUE 4.00e-28
HNVEVLGILSDDVETDTVAPGENLKIRLKGIEEEEILPGFILCDPNNLCHSGRTFDAQ

SEQ ID NO: 47885 - protein, 24 aa, Homo sapiens
  MAP TO AC007216.2; EXPRESSED IN BONE MARROW, SIGNAL = 1.9; EXPRESSED IN FETAL LIVER, SIGNAL = 1.7
ECVRKPPVLFSFKAQRGSSWNTFR

SEQ ID NO: 47886 - protein, 34 aa, Homo sapiens
  MAP TO AL135747.2; EXPRESSED IN FETAL LIVER, SIGNAL = 1.7
NTSCIHSSVYQIGENSSLTFLEKREESGHLQRDW

SEQ ID NO: 47887 - protein, 55 aa, Homo sapiens
  MAP TO AF223391.1; EXPRESSED IN FETAL LIVER, SIGNAL = 1.8; EST_HUMAN HIT: BE350127.1, EVALUE 1.00e-19; SWISSPROT HIT: P47510, EVALUE 4.60e+00
EDTNTHTSLGLHRVRTINITVFHLHILSHWKVFRSNNTQGAVISYDDNAFLWNTS

SEQ ID NO: 47888 - protein, 131 aa, Homo sapiens
  MAP TO AC016537.2; EXPRESSED IN FETAL LIVER, SIGNAL = 1.7; EXPRESSED IN PLACENTA, SIGNAL = 1.5; EXPRESSED IN HELA, SIGNAL = 2.8; EST_HUMAN HIT: AW847812.1, EVALUE 1.00e-47; SWISSPROT HIT: P07575, EVALUE 1.00e-23
FANGTKELPVPLMTLTPQKRVIPLIPLMVGLGLSASTIALSTGIAGISTSVTTFRSPSNDFSASITDISQTLSVLQAQVDSLAAVVLQNRRGLGLSILLNEECCFYLNQSGLVYENIKKLKDRTQKLANQA

SEQ ID NO: 47889 - protein, 71 aa, Homo sapiens
  MAP TO AC022205.2; EXPRESSED IN LUNG, SIGNAL = 1.6; EXPRESSED IN PLACENTA, SIGNAL = 1.8; EXPRESSED IN FETAL LIVER, SIGNAL = 1.6; EST_HUMAN HIT: AI692576.1, EVALUE 2.00e-34; SWISSPROT HIT: P12024, EVALUE 2.00e-07
RLDANHITSVPEDSFEGLVQLRHLWLDDNSLTEVPVHPLSNLPTLQALTLALNKISSIPDFAFTNLSSLVV

SEQ ID NO: 47890 - protein, 58 aa, Homo sapiens
  MAP TO AF233439.1; EXPRESSED IN BONE MARROW, SIGNAL = 1.6e+02; EXPRESSED IN FETAL LIVER, SIGNAL =  18; EXPRESSED IN LUNG, SIGNAL =  24; EST_HUMAN HIT: AA321281.1, EVALUE 7.00e-16; SWISSPROT HIT: P11479, EVALUE 6.00e-17
MRTLAILAAILLVALQAQAEPLQARADEVAAAPEQIAADIPEVVVSLAWDESLAPKHP

SEQ ID NO: 47891 - protein, 28 aa, Homo sapiens
  MAP TO AC010828.3; EXPRESSED IN FETAL LIVER, SIGNAL = 1.6
GQVDMRRVQGKSVRRARYGRFLWWVRKG

SEQ ID NO: 47892 - protein, 89 aa, Homo sapiens
  MAP TO AC010636.3; EXPRESSED IN FETAL LIVER, SIGNAL = 2.1; EST_HUMAN HIT: AW853949.1, EVALUE 4.00e-26; SWISSPROT HIT: P26808, EVALUE 4.00e-17
SESPVEHNCVEVLDSVYSSRPDLRDQPWASVDLELYLDGSSFINPQGERCAEYAVVTLDAVIETKPLPQGTSAQKAELIALTRALELSE

SEQ ID NO: 47893 - protein, 39 aa, Homo sapiens
  MAP TO AC018698.3; EXPRESSED IN FETAL LIVER, SIGNAL = 1.6; EXPRESSED IN HELA, SIGNAL = 1.8
LDEGWLEDERNEFLEELNLEMLEEEHNEAMQPTANEVEQ

SEQ ID NO: 47894 - protein, 33 aa, Homo sapiens
  MAP TO AC010478.5; EXPRESSED IN FETAL LIVER, SIGNAL = 1.9; EST_HUMAN HIT: AA393617.1, EVALUE 3.40e-02
EHKSIKWKTGNSYRKSIRLKAGSLKRPIKLTSL

SEQ ID NO: 47895 - protein, 55 aa, Homo sapiens; identical to SEQ ID NO: 47887
  MAP TO AH009158.1; EXPRESSED IN FETAL LIVER, SIGNAL = 1.6; EXPRESSED IN HELA, SIGNAL = 1.8; SWISSPROT HIT: P47510, EVALUE 4.60e+00; EST_HUMAN HIT: BE350127.1, EVALUE 1.00e-19

SEQ ID NO: 47896 - protein, 53 aa, Homo sapiens
  MAP TO AF223391.1; EXPRESSED IN FETAL LIVER, SIGNAL = 2.7; SWISSPROT HIT: Q15878, EVALUE 2.00e-25; EST_HUMAN HIT: AA297200.1, EVALUE 2.00e-17
AVFDCVVTSLKNVFNILIVYKLFMFIFAVIAVQLFKGKFFYCTDSSKDTEKEC

SEQ ID NO: 47897 - protein, 36 aa, Homo sapiens
  MAP TO AC008723.3; EXPRESSED IN FETAL LIVER, SIGNAL = 1.5; EST_HUMAN HIT: BF183958.1, EVALUE 2.00e-07; SWISSPROT HIT: O75330, EVALUE 2.00e-08
MICTIHFSAESKQNLNVDKDTTLPASARKVKSSESK

SEQ ID NO: 47898 - protein, 209 aa, Homo sapiens
  MAP TO AL049548.6; EXPRESSED IN LUNG, SIGNAL = 0.61; EXPRESSED IN BONE MARROW, SIGNAL =   2; SWISSPROT HIT: P48725, EVALUE 1.00e-04; EST_HUMAN HIT: AL042602.1, EVALUE 6.50e-02
DHAAEVESKKGELQSLQGHLAKLGSLGRAEDLHLLQGKAEDCFQLFEEASQVVERRQLALSHLAEFLQSHASLSGILRQLRQTVEATNSMNKNESDLIEKDLNDALQNAKALESAAVSLDGILSKAQYHLKIGSSEQRTSCRATADQLCGEVERIQNLLGTKQSEADALAVLKKAFQDQKEELLKSIEDIEERTDKERLKEPTRQALQQ

SEQ ID NO: 47899 - protein, 32 aa, Homo sapiens
  MAP TO AC009230.2; EXPRESSED IN LUNG, SIGNAL = 1.3; EXPRESSED IN BT474, SIGNAL = 1.3; EXPRESSED IN HBL100, SIGNAL = 0.99; EST_HUMAN HIT: BF038269.1, EVALUE 5.00e-16; SWISSPROT HIT: Q07929, EVALUE 8.30e+00
TPFPNSFKCFTCENAGDNYNCNRWAEDKWCPQ

SEQ ID NO: 47900 - protein, 33 aa, Homo sapiens
  MAP TO AC009230.2; EXPRESSED IN LUNG, SIGNAL = 1.3; EXPRESSED IN BT474, SIGNAL = 1.3; EXPRESSED IN HBL100, SIGNAL = 0.99; EST_HUMAN HIT: BF038269.1, EVALUE 2.00e-11
LHHFQIASSALLVKTQGIIITAIDGQKTNGVHK

SEQ ID NO: 47901 - protein, 105 aa, Homo sapiens
  MAP TO AF159056.1; EXPRESSED IN BT474, SIGNAL = 1.1; EXPRESSED IN BONE MARROW, SIGNAL = 2.2; EXPRESSED IN LUNG, SIGNAL = 1.1; SWISSPROT HIT: P03986, EVALUE 6.00e-58; EST_HUMAN HIT: BF674593.1, EVALUE 1.00e-57
ADVSPKPTIFLPSIAETKLQKAGTYLCLLEKFFPDVIKIHWQEKKSNTILGSQEGNTMKTNDTYMKFSWLTVPEKSLDKEHRCIVRHENNKNGVDQEIIFPPIKT

SEQ ID NO: 47902 - protein, 35 aa, Homo sapiens
  MAP TO AC010754.1; EXPRESSED IN LUNG, SIGNAL = 1.9; EXPRESSED IN PLACENTA, SIGNAL = 2.3; EST_HUMAN HIT: AW365648.1, EVALUE 4.50e-01
  unsure 15
  unsure 21
  unsure 25
  unsure 28
  unsure 30
SSPVSTTWGTVRLNXQVDQIXDQEXRLXEXSYGSG

SEQ ID NO: 47903 - protein, 36 aa, Homo sapiens
  MAP TO AC010754.1; EXPRESSED IN LUNG, SIGNAL = 1.9; EXPRESSED IN PLACENTA, SIGNAL = 2.3; SWISSPROT HIT: Q16787, EVALUE 1.60e-02; EST_HUMAN HIT: AW365648.1, EVALUE 1.50e-01
  unsure 22
  unsure 26
  unsure 28
  unsure 36
QLTCVYNLGDREAELPSGPDLXPRVXTXGGQLWIGX

SEQ ID NO: 47904 - protein, 101 aa, Homo sapiens
  MAP TO AC006042.2; EXPRESSED IN BONE MARROW, SIGNAL = 1.1; EXPRESSED IN LUNG, SIGNAL = 0.98; EXPRESSED IN HELA, SIGNAL = 1.4; EXPRESSED IN PLACENTA, SIGNAL = 1.7; SWISSPROT HIT: P32805, EVALUE 4.20e+00; EST_HUMAN HIT: AA236844.1, EVALUE 2.00e-38
APLFSCPDKNKVNFIPTGSAFCPVKLLGPLLPASDLMLKNSPNSGQSSALATLTVEQLSSRVSFTSLSDDTSTAGSMEASVQQPSQQQQLLQELQGEDHIS

SEQ ID NO: 47905 - protein, 34 aa, Homo sapiens
  MAP TO AC009532.2; EXPRESSED IN PLACENTA, SIGNAL = 3.3; EXPRESSED IN LUNG, SIGNAL = 1.8; SWISSPROT HIT: P13608, EVALUE 4.90e-02; EST_HUMAN HIT: AW961536.1, EVALUE 3.00e-08
LNFTEAKEACRLLGLSLAGKDQVETALKASFETC

SEQ ID NO: 47906 - protein, 53 aa, Homo sapiens; identical to SEQ ID NO: 34707
  MAP TO AP000365.1; EXPRESSED IN PLACENTA, SIGNAL = 1.3; EXPRESSED IN HELA, SIGNAL = 0.99; EXPRESSED IN LUNG, SIGNAL = 1.2; SWISSPROT HIT: P56180, EVALUE 3.00e-12; EST_HUMAN HIT: AU126316.1, EVALUE 7.00e-12

SEQ ID NO: 47907 - protein, 17 aa, Homo sapiens
  MAP TO AP000365.1; EXPRESSED IN PLACENTA, SIGNAL = 1.3; EXPRESSED IN HELA, SIGNAL = 0.99; EXPRESSED IN LUNG, SIGNAL = 1.2; EST_HUMAN HIT: AU126316.1, EVALUE 1.00e-04
FPGLTGCHSRPCRPNFH

SEQ ID NO: 47908 - protein, 49 aa, Homo sapiens
  MAP TO AC007981.24; EXPRESSED IN BT474, SIGNAL = 3.6; EXPRESSED IN PLACENTA, SIGNAL = 2.5; EXPRESSED IN LUNG, SIGNAL = 0.98; SWISSPROT HIT: P32660, EVALUE 3.50e+00; EST_HUMAN HIT: BE171984.1, EVALUE 1.00e-12
ADRQHHGLFLPLCHLHPARPRREDLHRKSPGEPNPIAHHRSSGPGCRGI

SEQ ID NO: 47909 - protein, 36 aa, Homo sapiens
  MAP TO AL022100.13; EXPRESSED IN PLACENTA, SIGNAL =   1; EXPRESSED IN LUNG, SIGNAL = 1.8; SWISSPROT HIT: O59647, EVALUE 8.20e+00; EST_HUMAN HIT: AI144487.1, EVALUE 9.00e-06
AKWQVLEKDIKYVLQEKGPNPDPKRGFLDLVQERIQ

SEQ ID NO: 47910 - protein, 41 aa, Homo sapiens
  MAP TO AP000567.1; EXPRESSED IN PLACENTA, SIGNAL = 0.94; EXPRESSED IN HELA, SIGNAL = 1.8; EXPRESSED IN HBL100, SIGNAL = 0.95; EXPRESSED IN LUNG, SIGNAL = 1.2
RTPSAEAATSTAIAIAQATEASTAVAQASVVAAVVTHGVRS

SEQ ID NO: 47911 - protein, 30 aa, Homo sapiens
  MAP TO AL049796.17; EXPRESSED IN HELA, SIGNAL = 1.8; EXPRESSED IN PLACENTA, SIGNAL = 0.94; EXPRESSED IN HBL100, SIGNAL = 1.2; EXPRESSED IN LUNG, SIGNAL = 1.5; EXPRESSED IN BT474, SIGNAL = 1.9
YNRRKYSEIMAEKAANAAGKKFRKKKKFRN

SEQ ID NO: 47912 - protein, 31 aa, Homo sapiens
  MAP TO AC007671.5; EXPRESSED IN LUNG, SIGNAL = 8.2; EST_HUMAN HIT: BE077091.1, EVALUE 1.00e-11
GGKMAYYEMRAEHSVDIDVDIDWPIAEQRVL

SEQ ID NO: 47913 - protein, 60 aa, Homo sapiens
  MAP TO AC008073.1; EXPRESSED IN HELA, SIGNAL = 0.91; EXPRESSED IN LUNG, SIGNAL = 2.7; EST_HUMAN HIT: AW206547.1, EVALUE 3.00e-30; SWISSPROT HIT: Q15811, EVALUE 2.00e-09
VDEKTVGEPGWLYGSFQGNFGWFPCNYVEKMPSSENEKAVSPKKALLPPTVSLSATSTSS

SEQ ID NO: 47914 - protein, 19 aa, Homo sapiens
  MAP TO AC008073.1; EXPRESSED IN HELA, SIGNAL = 0.91; EXPRESSED IN LUNG, SIGNAL = 2.7; EST_HUMAN HIT: R13318.1, EVALUE 3.00e-03
LVGFMVVFKEILAGFHAIM

SEQ ID NO: 47915 - protein, 43 aa, Homo sapiens
  MAP TO AC010719.1; EXPRESSED IN PLACENTA, SIGNAL = 1.2; EXPRESSED IN LUNG, SIGNAL = 2.8; SWISSPROT HIT: P43689, EVALUE 5.40e-01
EDTAGLNKTRQVEDIECRQERTQKETNSLDDSKGRSQDNNYAS

SEQ ID NO: 47916 - protein, 51 aa, Homo sapiens
  MAP TO AL118511.2; EXPRESSED IN LUNG, SIGNAL = 3.1; EXPRESSED IN HELA, SIGNAL =   1; EXPRESSED IN HBL100, SIGNAL =   1; EST_HUMAN HIT: AL045736.2, EVALUE 1.70e-01
FNHNVHGPYEGHPVCLQFLSGRHNATYRAKHPGCFWSSDRASFICQQMAVE

SEQ ID NO: 47917 - protein, 53 aa, Homo sapiens
  MAP TO AL118511.2; EXPRESSED IN LUNG, SIGNAL = 3.1; EXPRESSED IN HELA, SIGNAL =   1; EXPRESSED IN HBL100, SIGNAL =   1; EST_HUMAN HIT: AI568881.1, EVALUE 5.60e+00; SWISSPROT HIT: P31301, EVALUE 5.90e+00
VLTTMFMAPMRATLCACNFYLEGIMPPTEPNTLDAFGAVTEPVLSASKWLLSK

SEQ ID NO: 47918 - protein, 43 aa, Homo sapiens
  MAP TO AL121591.2; EXPRESSED IN LUNG, SIGNAL = 5.4
HLSLCPPCAHSQDARTQPLYSSWMPLIQGHYDSNKMMNNGEIK

SEQ ID NO: 47919 - protein, 20 aa, Homo sapiens
  MAP TO AL121591.2; EXPRESSED IN LUNG, SIGNAL = 5.4
SSLSLPTLCPLPGCQNPAVV

SEQ ID NO: 47920 - protein, 22 aa, Homo sapiens
  MAP TO AJ239329.2; EXPRESSED IN LUNG, SIGNAL =   2; EST_HUMAN HIT: AA774113.1, EVALUE 1.70e-01
CIIGIDILGSLRNPNIGSLTCE

SEQ ID NO: 47921 - protein, 32 aa, Homo sapiens
  MAP TO AJ239329.2; EXPRESSED IN LUNG, SIGNAL =   2; EST_HUMAN HIT: AA714294.1, EVALUE 1.00e-05
WSFSSGPSHNGASGSPKPSCGCFPISRMHNWN

SEQ ID NO: 47922 - protein, 57 aa, Homo sapiens
  MAP TO AC009493.1; EXPRESSED IN LUNG, SIGNAL = 1.3; EXPRESSED IN PLACENTA, SIGNAL = 1.4; EST_HUMAN HIT: BE393397.1, EVALUE 5.00e-13; SWISSPROT HIT: P14210, EVALUE 1.00e-32
DNTMNDTDVPLETTECIQGQGEGYRGTVNTIWNGIPCQRWDSQYPHEHDMTPENFKC

SEQ ID NO: 47923 - protein, 42 aa, Homo sapiens
  MAP TO AC009493.1; EXPRESSED IN LUNG, SIGNAL = 1.3; EXPRESSED IN PLACENTA, SIGNAL = 1.4; EST_HUMAN HIT: R13658.1, EVALUE 3.20e-01
MFLWKQLNASKVKEKATGALSIPFGMEFHVSVGILSILTSMT

SEQ ID NO: 47924 - protein, 52 aa, Homo sapiens
  MAP TO AC006445.10; EXPRESSED IN LUNG, SIGNAL = 6.6; EST_HUMAN HIT: N94109.1, EVALUE 6.50e+00
YWLTFHRHALELFFSAVRANEGQFRAIFLKIAAQPCLTCNSNPYARLKGVAG

SEQ ID NO: 47925 - protein, 43 aa, Homo sapiens
  MAP TO AC010881.1; EXPRESSED IN LUNG, SIGNAL = 1.5
ETDMTYLSHFLHFLMMRDLLTFSANPVAIMNRKLDFKLQHAQS

SEQ ID NO: 47926 - protein, 40 aa, Homo sapiens
  MAP TO AC010106.1; EXPRESSED IN PLACENTA, SIGNAL =   1; EXPRESSED IN LUNG, SIGNAL = 7.8; SWISSPROT HIT: P29537, EVALUE 6.20e+00
FLSVQKRTVWRLCLAAYLFLKVRLMRYNQAERALVRKRSL

SEQ ID NO: 47927 - protein, 50 aa, Homo sapiens
  MAP TO AL008639.10; EXPRESSED IN HELA, SIGNAL =   1; EXPRESSED IN BONE MARROW, SIGNAL = 1.8; EXPRESSED IN LUNG, SIGNAL = 2.4; SWISSPROT HIT: P17251, EVALUE 1.20e+00; EST_HUMAN HIT: AW380450.1, EVALUE 8.00e-23
NHLKDILTSVVSRRKAYRLRDGHFKYAFGSNVTPQPYLKNSVVAYNNLIE

SEQ ID NO: 47928 - protein, 25 aa, Homo sapiens
  MAP TO AL049691.17; EXPRESSED IN LUNG, SIGNAL = 4.1; EXPRESSED IN HELA, SIGNAL =  10
NRYTFQVLYGYGALSEYLVLDEMTE

SEQ ID NO: 47929 - protein, 22 aa, Homo sapiens
  MAP TO AL049691.17; EXPRESSED IN LUNG, SIGNAL = 4.1; EXPRESSED IN HELA, SIGNAL =  10
IGTLFKYFMVMVPFLNTWSSMK

SEQ ID NO: 47930 - protein, 115 aa, Homo sapiens
  MAP TO AC010127.2; EXPRESSED IN LUNG, SIGNAL =   5; EST_HUMAN HIT: AA912739.1, EVALUE 7.00e-28; SWISSPROT HIT: P04774, EVALUE 3.00e-40
VLNLFLALLLSSFSADNLAATDDDNEMNNLQIAVDRMHKGVAYVKRKIYEFIQQSFIRKQKILDEIKPLDDLNNKKDSCMSNHTAEIGKDLDYLKDVNGTTSGIGTGSSVEKYII

SEQ ID NO: 47931 - protein, 83 aa, Homo sapiens [sequence omitted]

SEQ ID NO: 47932 - protein, 21 aa, Homo sapiens
  MAP TO AC009402.2; EXPRESSED IN LUNG, SIGNAL = 4.2
TCLGKNWVSVGQCAQLVGCIG

SEQ ID NO: 47933 - protein, 38 aa, Homo sapiens
  MAP TO AC009497.2; EXPRESSED IN LUNG, SIGNAL = 2.1; EST_HUMAN HIT: AU129905.1, EVALUE 2.00e-14
INSLLQLEELGFRSGAPMIKKIAFIAWKSLIDNFALNP

SEQ ID NO: 47934 - protein, 48 aa, Homo sapiens
  MAP TO AC009230.2; EXPRESSED IN LUNG, SIGNAL = 4.6; EST_HUMAN HIT: AI690506.1, EVALUE 2.30e-01
QGPWFSPGCSDGLGVLVQGTFQPQGNTDTCTCQVSAVEGKGEGLMQLA

SEQ ID NO: 47935 - protein, 41 aa, Homo sapiens
  MAP TO AC009230.2; EXPRESSED IN LUNG, SIGNAL = 4.6; SWISSPROT HIT: P46331, EVALUE 3.60e+00; EST_HUMAN HIT: BF529426.1, EVALUE 3.20e+00
NKALGSLQAAVMGWEFLSRAHSSRRAILTLAPAKFQQWKEK

SEQ ID NO: 47936 - protein, 41 aa, Homo sapiens
  MAP TO AC009946.1; EXPRESSED IN LUNG, SIGNAL = 3.9; EXPRESSED IN BONE MARROW, SIGNAL = 1.1; EST_HUMAN HIT: AV711088.1, EVALUE 7.10e+00; SWISSPROT HIT: P07357, EVALUE 6.10e+00
SSTSSLVRHGRHDLRAGHHAADCSNVSSNSQPCSQRSPILH

SEQ ID NO: 47937 - protein, 38 aa, Homo sapiens; identical to SEQ ID NO: 36836
  MAP TO AL096814.10; EXPRESSED IN LUNG, SIGNAL =  10; EST_HUMAN HIT: BE616514.1, EVALUE 3.20e+00

SEQ ID NO: 47938 - protein, 70 aa, Homo sapiens; identical to SEQ ID NO: 37448
  MAP TO AL035425.10; EXPRESSED IN HBL100, SIGNAL =   1; EXPRESSED IN LUNG, SIGNAL =   2; EXPRESSED IN HELA, SIGNAL =   5; EST_HUMAN HIT: W07655.1, EVALUE 6.00e-23; SWISSPROT HIT: P29400, EVALUE 9.00e-24

SEQ ID NO: 47939 - protein, 32 aa, Homo sapiens
  MAP TO AB020862.1; EXPRESSED IN LUNG, SIGNAL = 2.3
LTRHPRFRDFVRVMVQFYILILHSEGVQEAHF

SEQ ID NO: 47940 - protein, 38 aa, Homo sapiens
  MAP TO AL035462.12; EXPRESSED IN PLACENTA, SIGNAL =   1; EXPRESSED IN HBL100, SIGNAL = 0.96; EXPRESSED IN HELA, SIGNAL = 1.7; EXPRESSED IN LUNG, SIGNAL = 1.9; EST_HUMAN HIT: BF692595.1, EVALUE 1.00e-15
SVASLSVGEGTGVRAPVRTATDDTKPKTTCASKDSWHG

SEQ ID NO: 47941 - protein, 36 aa, Homo sapiens
  MAP TO AC007917.15; EXPRESSED IN LUNG, SIGNAL = 2.1
LSLASSAFMDCLCGKMPAEFQRGGEQVHHPVIPCMV

SEQ ID NO: 47942 - protein, 74 aa, Homo sapiens
  MAP TO AC006466.3; EXPRESSED IN LUNG, SIGNAL = 2.3; SWISSPROT HIT: P35114, EVALUE 8.80e+00; EST_HUMAN HIT: BE711106.1, EVALUE 6.90e+00
FPAGVAVRTKMADKDSKNADRRAGVRGECSNCDGGTVLALNAILMEIFTLIPATRSNHMTVSIARVQALGSGSL

SEQ ID NO: 47943 - protein, 77 aa, Homo sapiens
  MAP TO AC010087.2; EXPRESSED IN LUNG, SIGNAL = 5.3; EXPRESSED IN BT474, SIGNAL =   1; EST_HUMAN HIT: BF359284.1, EVALUE 4.00e-17; SWISSPROT HIT: Q39610, EVALUE 1.00e-19
IARMIRQERGNALLVGVGGTGKQSLTRLAAHICGYKCLQIELSRGYNYDSFHEDLRKLYKMAGVEDKNMVFLFTDTQ

SEQ ID NO: 47944 - protein, 85 aa, Homo sapiens
  MAP TO AC010091.1; EXPRESSED IN LUNG, SIGNAL = 2.5; SWISSPROT HIT: P33545, EVALUE 1.00e-08; EST_HUMAN HIT: AU128864.1, EVALUE 7.00e-06
IITVIVRVSRINELNPIGSASAFTFSVFENSPVDTLVGKVTFTDADWPFNNMEYTVVGGNLGTPPKFYIEPDTGIVKTLTSINHK

SEQ ID NO: 47945 - protein, 52 aa, Homo sapiens
  MAP TO AC010798.1; EXPRESSED IN LUNG, SIGNAL = 5.4
  unsure 8
  unsure 12
  unsure 21
  unsure 38
  unsure 40
ILALPVFXDTPXMAKAQSIVXWFHSIANTFWKNLSREXLXNKAFKFRALIAL

SEQ ID NO: 47946 - protein, 51 aa, Homo sapiens; identical to SEQ ID NO: 38176
  MAP TO AL078591.15; EXPRESSED IN LUNG, SIGNAL = 2.5; EST_HUMAN HIT: AW813906.1, EVALUE 2.00e-13; SWISSPROT HIT: P47025, EVALUE 4.50e+00

SEQ ID NO: 47947 - protein, 240 aa, Homo sapiens
  MAP TO AC005798.9; EXPRESSED IN HBL100, SIGNAL = 3.1; EXPRESSED IN LUNG, SIGNAL = 1.7; SWISSPROT HIT: Q62441, EVALUE 8.50e-01; EST_HUMAN HIT: BF037713.1, EVALUE 2.00e-95
ERPAAAMKICSLTLLSFLLLAAQVLLVEGKKKVKNGLHSKVVSEQKDTLGNTQIKQKSRPGNKGKFVTKDQANCRWAATEQEEGISLKVECTQLDHEFSCVFAGNPTSCLKLKDERVYWKQVARNLRSQKDICRYSKTAVKTRVCRKDFPESSLKLVSSTLFGNTKPRKEKTEMSPREHIKGKETTPSSLAVTQTMATKAPECVEDPDMANQRKTALEFCGETWSSLCTFFLSIVQDTSC

SEQ ID NO: 47948 - protein, 70 aa, Homo sapiens
  MAP TO AC006042.2; EXPRESSED IN PLACENTA, SIGNAL =   1; EXPRESSED IN LUNG, SIGNAL =   1; EST_HUMAN HIT: R45715.1, EVALUE 9.00e-19
PLDIPDGRRAPLPAHYRSSSTRSIDTQTPSVQERSSSCSSHSPCVSPFCPPESQDGSPCSTEDLLYDRDK

SEQ ID NO: 47949 - protein, 36 aa, Homo sapiens
  MAP TO AL049868.10; EXPRESSED IN PLACENTA, SIGNAL = 1.2; EXPRESSED IN HBL100, SIGNAL = 0.98; EXPRESSED IN BONE MARROW, SIGNAL = 0.98; EXPRESSED IN LUNG, SIGNAL = 1.1; EST_HUMAN HIT: AI190579.1, EVALUE 2.00e-13
HPLNTGLFRIKIQGATGKFNMVIPLVDGMIVSRRAL

SEQ ID NO: 47950 - protein, 163 aa, Homo sapiens
  MAP TO AC007283.3; EXPRESSED IN BONE MARROW, SIGNAL = 1.1; EXPRESSED IN LUNG, SIGNAL = 3.1; EST_HUMAN HIT: BE271526.1, EVALUE 4.00e-31; SWISSPROT HIT: Q92851, EVALUE 3.00e-94
ILSHVFQWLGFTVHIHNNVTKVEMEMVLQKQKCNPAHADGDCFVFCILTHGRFGAVYSSDEALIPIREIMSHFTALQCPRLAEKPKLFFIQACQGEEIQPSVSIEADALNPEQAPTSLQDSIPAEADFLLGLATVPGYVSFRHVEEGSWYIQSLCNHLKKLVP

SEQ ID NO: 47951 - protein, 18 aa, Homo sapiens
  MAP TO AC007283.3; EXPRESSED IN BONE MARROW, SIGNAL = 1.1; EXPRESSED IN LUNG, SIGNAL = 3.1
RPAKVKRYSLPYPSKQML

SEQ ID NO: 47952 - protein, 64 aa, Homo sapiens
  MAP TO AL109935.20; EXPRESSED IN LUNG, SIGNAL = 1.2; EST_HUMAN HIT: AW327746.1, EVALUE 4.00e-33; SWISSPROT HIT: P57567, EVALUE 1.20e+00
DRVSPTVLHKMSNSLEISLISDNEFKCRHSQPECGYGLQPDRWTEYSIQTMEPDNLELIFDFFE

SEQ ID NO: 47953 - protein, 18 aa, Homo sapiens
  MAP TO AL109935.20; EXPRESSED IN LUNG, SIGNAL = 1.2; EST_HUMAN HIT: AI444628.1, EVALUE 9.00e-05
IGYLPLYSTKCPIAWRYP

SEQ ID NO: 47954 - protein, 40 aa, Homo sapiens
  MAP TO AC009651.2; EXPRESSED IN LUNG, SIGNAL =   3; EXPRESSED IN BT474, SIGNAL = 1.1; EST_HUMAN HIT: AW884259.1, EVALUE 3.00e-18
MKIFPGHMNQFNNDCCQLVARHQTASLLNSVAICYLDSQC

SEQ ID NO: 47955 - protein, 69 aa, Homo sapiens
  MAP TO AC009962.1; EXPRESSED IN HBL100, SIGNAL = 1.1; EXPRESSED IN HELA, SIGNAL = 1.3; EXPRESSED IN LUNG, SIGNAL = 2.2; EST_HUMAN HIT: BE083092.1, EVALUE 3.00e-24; SWISSPROT HIT: Q03638, EVALUE 9.70e+00
VSELLELYEEDPEEILYNLGFGRDEPDIASKIPSRFFNSSSFAKGIDIKVFLSAQMQRMEVENPNYALT

SEQ ID NO: 47956 - protein, 37 aa, Homo sapiens
  MAP TO AC009962.1; EXPRESSED IN HBL100, SIGNAL = 1.1; EXPRESSED IN HELA, SIGNAL = 1.3; EXPRESSED IN LUNG, SIGNAL = 2.2; EST_HUMAN HIT: BE083088.1, EVALUE 2.00e-14
RKILKKFFIILDLDVMNQILLLKFLPDFLIHHPLPKG

SEQ ID NO: 47957 - protein, 55 aa, Homo sapiens; identical to SEQ ID NO: 34134
  MAP TO AP000317.1; EXPRESSED IN PLACENTA, SIGNAL = 0.69; EXPRESSED IN LUNG, SIGNAL = 0.62; SWISSPROT HIT: P32599, EVALUE 4.50e+00; EST_HUMAN HIT: BE080204.1, EVALUE 6.00e-03

SEQ ID NO: 47958 - protein, 135 aa, Homo sapiens
  MAP TO AC004595.1; EXPRESSED IN LUNG, SIGNAL = 1.2; SWISSPROT HIT: Q02446, EVALUE 1.00e-39; EST_HUMAN HIT: BF698532.1, EVALUE 1.00e-38
VQIVGQPILQQIQIQQPQQQIIQAIPPQSFQLQSGQTIQTIQQQPLQNVQLQAVNPTQVLIRAPTLTPSGQISWQTVQVQNIQSLSNLQVQNAGLSQQLTITPVSSSGGTTLAQIAPVAVAGAPITLNTAQLASV

SEQ ID NO: 47959 - protein, 660 aa, Homo sapiens
  MAP TO AJ010770.1; EXPRESSED IN LUNG, SIGNAL =   2; EXPRESSED IN BT474, SIGNAL = 1.1; SWISSPROT HIT: Q99323, EVALUE 3.00e-17; EST_HUMAN HIT: AU132932.1, EVALUE 1.00e-105
EQDKKVENSNKEEIQEKETIIEELNTKIIEEEKKTLELKDKLTTADKLLGELQEQIVQKNQEIKNMKLELTNSKQKERQSSEEIKQLMGTVEELQKRNHKDSQFETDIVQRMEQETQRKLEQLRAELDEMYGQQIVQMKQELIRQHMAQMEEMKTRHKGEMENALRSYSNITVNEDQIKLMNVAINELNIKLQDTNSQKEKLKEELGLILEEKCALQRQLEDLVEELSFSREQIQRARQTIAEQESKLNEAHKSLSTVEDLKAEIVSASESRKELELKHEAEVTNYKIKLEMLEKEKNAVLDRMAESQEAELERLRTQLLFSHEEELSKLKEDLEIEHRINIEKLKDNLGIHYKQQIDGLQNEMSQKIETMQFEKDNLITKQNQLILEISKLKDLQQSLVNSKSEEMTLQINELQKEIEILRQEEKEKGTLEQEVQELQLKTELLEKQMKEKENDLQEKFAQLEAENSILKDEKKTLEDMLKIHTPVSQEERLIFLDSIKSKSKDSVWEKEIEILIEENEDLKQQCIQLNEEIEKQRNTFSFAEKNFEVNYQELQEEYACLLKVKDDLEDSKNKQELEYKSKLKALNEELHLQRINPTTVKMKSSVFDEDKTFVAETLEMGEVVEKDTTELMEKLEVTKREKLELSQRLSDLSEQLKQKH

SEQ ID NO: 47960 - protein, 84 aa, Homo sapiens
  MAP TO AL021579.1; EXPRESSED IN BT474, SIGNAL = 1.1; EXPRESSED IN LUNG, SIGNAL = 1.3; EXPRESSED IN HELA, SIGNAL = 0.95; EST_HUMAN HIT: AW503709.1, EVALUE 3.00e-40; SWISSPROT HIT: O74135, EVALUE 1.50e-01
LPDLSPVENKEHKPGPIGKERSLKNRKVKDAQQVEPEGQEKPSPATVRSTDPVTTKETKAVSEMSTEIGTMISVSSAEYGTNAK

SEQ ID NO: 47961 - protein, 70 aa, Homo sapiens
  MAP TO AC010678.1; EXPRESSED IN LUNG, SIGNAL =   2; EXPRESSED IN HELA, SIGNAL = 6.6; EST_HUMAN HIT: BF356793.1, EVALUE 1.90e+00; SWISSPROT HIT: Q16548, EVALUE 8.60e+00
IKCEFWTLEFQLRFTGQWIKEAQISPQKGLWMALPQMTGCFCAYTHEEEASSSSRQAQRDLKRTGASEGK

SEQ ID NO: 47962 - protein, 36 aa, Homo sapiens
  MAP TO AC010678.1; EXPRESSED IN LUNG, SIGNAL =   2; EXPRESSED IN HELA, SIGNAL = 6.6
SNVNSGLWNSSCVSQASGLRRPKSAHKRGCGWLYHK

SEQ ID NO: 47963 - protein, 192 aa, Homo sapiens
  MAP TO AC008079.7; EXPRESSED IN LUNG, SIGNAL = 0.64; EXPRESSED IN HELA, SIGNAL = 0.74; EXPRESSED IN BT474, SIGNAL = 0.7; SWISSPROT HIT: P18899, EVALUE 6.00e-03; EST_HUMAN HIT: AI904151.1, EVALUE 6.00e-36
MLYTTSLMRTVYKPSLMRTLYMTLLTRTLYKALLTRTLYTTSLMRTPYKTSPMRMLYMTSLMTPTRHANKDAVDDIAYKDTVQDITNEDAVYDIANEDVVYDIANEDALQDIANEVAVYDIANEDIVYDIANEDALYDITNEDAVYNIANEDAVYGIANEDAVYEFANKDAVYDIANEDTVQDICKKEDAAN

SEQ ID NO: 47964 - protein, 47 aa, Homo sapiens
  MAP TO AL049797.8; EXPRESSED IN BONE MARROW, SIGNAL = 0.78; EXPRESSED IN HELA, SIGNAL = 0.89; EXPRESSED IN PLACENTA, SIGNAL = 0.6; EXPRESSED IN LUNG, SIGNAL = 0.63; EST_HUMAN HIT: AI380299.1, EVALUE 3.00e-06; SWISSPROT HIT: O77793, EVALUE 9.00e-22
SKKIHVVDSGLTFNLPYPLILRPQRGVDLIISFDFSARPSDSSPPFK

SEQ ID NO: 47965 - protein, 29 aa, Homo sapiens
  MAP TO AC007881.2; EXPRESSED IN LUNG, SIGNAL =   1; EST_HUMAN HIT: AW957429.1, EVALUE 4.00e-08
DVSIFLLREPQRIQNGSWSLLGCSCPCAW

SEQ ID NO: 47966 - protein, 62 aa, Homo sapiens
  MAP TO AC004832.2; EXPRESSED IN LUNG, SIGNAL = 0.8; SWISSPROT HIT: Q92503, EVALUE 5.80e-02; EST_HUMAN HIT: AV646993.1, EVALUE 1.00e-08
VVRLYNANGICGHDGEGSPVWYHIVGSLDPKGLLLSASKQELLRDSFRSCELLLRECELQSQ

SEQ ID NO: 47967 - protein, 62 aa, Homo sapiens
  MAP TO AC004832.2; EXPRESSED IN LUNG, SIGNAL = 0.8; EST_HUMAN HIT: AV646993.1, EVALUE 2.70e-02; SWISSPROT HIT: Q94890, EVALUE 2.30e-01
RWSGCTTLTAYAATTVRAALSGTTLWEAWTPKASCSQPPNRSCSGTASGAASCSCGSVSCRV

SEQ ID NO: 47968 - protein, 28 aa, Homo sapiens
  MAP TO AP000054.1; EXPRESSED IN LUNG, SIGNAL = 0.66; EXPRESSED IN PLACENTA, SIGNAL = 0.62
VVEGEHFGLGCVFEGFQRVEVEEEELGE

SEQ ID NO: 47969 - protein, 45 aa, Homo sapiens
  MAP TO AL121658.1; EXPRESSED IN HBL100, SIGNAL = 1.2; EXPRESSED IN HELA, SIGNAL = 2.1; EXPRESSED IN LUNG, SIGNAL = 1.7; SWISSPROT HIT: P32833, EVALUE 2.10e+00; EST_HUMAN HIT: BF345159.1, EVALUE 3.10e+00
GTPKTNRTNKPSTPTTATRKKKDLKNFRNVDSNLANLIMNEIVDK

SEQ ID NO: 47970 - protein, 141 aa, Homo sapiens; identical to SEQ ID NO: 36014
  MAP TO AC011242.2; EXPRESSED IN LUNG, SIGNAL = 1.5; EST_HUMAN HIT: AW451832.1, EVALUE 7.00e-54; SWISSPROT HIT: P17290, EVALUE 4.20e-01

SEQ ID NO: 47971 - protein, 58 aa, Homo sapiens
  MAP TO AF042089.1; EXPRESSED IN BT474, SIGNAL =   1; EXPRESSED IN LUNG, SIGNAL =   1; EST_HUMAN HIT: BE893680.1, EVALUE 4.00e-08
CSRSSLGCSCPCAWSRCSGTCSSSWPSALTPTSTPPCTSSSPTCPFLTVVSPPPQSPR

SEQ ID NO: 47972 - protein, 36 aa, Homo sapiens
  MAP TO Z97985.4; EXPRESSED IN LUNG, SIGNAL =   1
IGYIKHLLDLKLLNLMVKKRRYSSSAKRRKGLSLDY

SEQ ID NO: 47973 - protein, 174 aa, Homo sapiens; identical to SEQ ID NO: 34939
  MAP TO AF057177.1; EXPRESSED IN LUNG, SIGNAL = 1.1; EST_HUMAN HIT: AI961098.1, EVALUE 2.00e-85; SWISSPROT HIT: P03979, EVALUE 5.00e-39

SEQ ID NO: 47974 - protein, 53 aa, Homo sapiens
  MAP TO AL020990.1; EXPRESSED IN PLACENTA, SIGNAL = 1.1; EXPRESSED IN BONE MARROW, SIGNAL =   1; EXPRESSED IN LUNG, SIGNAL = 1.4; EST_HUMAN HIT: N57128.1, EVALUE 5.00e-26; SWISSPROT HIT: P21397, EVALUE 6.00e-27
CKYVINAIPPTLTAKIHFRPELPAERNQLIQRLPMGAVIKCMMYYKEAFWKKK

SEQ ID NO: 47975 - protein, 44 aa, Homo sapiens
  MAP TO AC009481.1; EXPRESSED IN LUNG, SIGNAL =   1; SWISSPROT HIT: P02165, EVALUE 6.10e+00
SHIKPEEKARKSNELEKLGNVQISSYGKLSSFLCHLRFNAHNVP

SEQ ID NO: 47976 - protein, 50 aa, Homo sapiens
  MAP TO AC006111.2; EXPRESSED IN HELA, SIGNAL = 0.77; EXPRESSED IN BONE MARROW, SIGNAL = 0.91; EXPRESSED IN LUNG, SIGNAL = 0.6; EST_HUMAN HIT: AA564923.1, EVALUE 3.90e-01; SWISSPROT HIT: P14873, EVALUE 4.60e+00
LRENSISPEGAQAIAHALCANSTLKNLEYVVGACDSTGCSCHDHTHTEPG

SEQ ID NO: 47977 - protein, 29 aa, Homo sapiens
  MAP TO AC006111.2; EXPRESSED IN HELA, SIGNAL = 0.77; EXPRESSED IN BONE MARROW, SIGNAL = 0.91; EXPRESSED IN LUNG, SIGNAL = 0.6; SWISSPROT HIT: Q09602, EVALUE 2.80e+00
FPFFSAFEKTPSVPREPRPSLMPSAPTAP

SEQ ID NO: 47978 - protein, 48 aa, Homo sapiens; identical to SEQ ID NO: 34146
  MAP TO AP000185.1; EXPRESSED IN HELA, SIGNAL = 0.85; EXPRESSED IN LUNG, SIGNAL = 0.7; EST_HUMAN HIT: AA558124.1, EVALUE 2.30e+00; SWISSPROT HIT: O66550, EVALUE 4.60e+00

SEQ ID NO: 47979 - protein, 18 aa, Homo sapiens
  MAP TO AL132778.2; EXPRESSED IN HBL100, SIGNAL = 1.1; EXPRESSED IN BT474, SIGNAL = 0.91; EXPRESSED IN LUNG, SIGNAL = 1.5; EXPRESSED IN PLACENTA, SIGNAL = 1.9; EST_HUMAN HIT: AV730757.1, EVALUE 3.70e+00
MQMKNLLGTTVKITFVMH

SEQ ID NO: 47980 - protein, 46 aa, Homo sapiens
  MAP TO AC010150.2; EXPRESSED IN LUNG, SIGNAL = 1.3; SWISSPROT HIT: Q00335, EVALUE 6.00e+00; EST_HUMAN HIT: AA447511.1, EVALUE 7.00e-14
DIDVETPDSILVNTNLRALINKHTFSVLPGDCQQRLLLLLPEVDRQ

SEQ ID NO: 47981 - protein, 19 aa, Homo sapiens
  MAP TO AC010150.2; EXPRESSED IN LUNG, SIGNAL = 1.3
LTLTLRHRTPFWLIQICEH

SEQ ID NO: 47982 - protein, 20 aa, Homo sapiens
  MAP TO AL049738.4; EXPRESSED IN PLACENTA, SIGNAL = 0.63; EXPRESSED IN LUNG, SIGNAL = 7.7
RVFLEIWKIIHILLLNAFRG

SEQ ID NO: 47983 - protein, 197 aa, Homo sapiens
  MAP TO AL109823.11; EXPRESSED IN HBL100, SIGNAL = 1.3; EXPRESSED IN BT474, SIGNAL = 0.98; EXPRESSED IN LUNG, SIGNAL = 1.1; EXPRESSED IN HELA, SIGNAL = 1.1; EST_HUMAN HIT: BE563657.1, EVALUE 3.00e-46; SWISSPROT HIT: P76558, EVALUE 8.70e-01
SQKPAAVSEELKLAVIQGLSTLMHSAYGDIILTFYEPSILPRLGFAVSLLLGLAEQEKSKQIKIAALKCLQVLLLQCDCQDHPRSLDELEQKQLGDLFASFLPGISTALTRLITGDFKQGHSIVVSSLKIFYKTVSFIMADEQLKRISKVQAKPAVEHRVAELMVYREADWVKKTGDKLTILIKKIIECVSVHPHWK

SEQ ID NO: 47984 - protein, 72 aa, Homo sapiens
  MAP TO AL096701.14; EXPRESSED IN LUNG, SIGNAL = 1.3; EXPRESSED IN BT474, SIGNAL =   1; EXPRESSED IN HELA, SIGNAL = 1.6; SWISSPROT HIT: P33369, EVALUE 1.10e+00; EST_HUMAN HIT: AW294800.1, EVALUE 3.00e-34
HSGVVLSVEEVEAGLKGLKVDQQVKNSTPFMAEHLEETLSAVTNNRQLKKDGDMTAFNKLVSTMKASGTLPS

SEQ ID NO: 47985 - protein, 21 aa, Homo sapiens
  MAP TO AL096701.14; EXPRESSED IN LUNG, SIGNAL = 1.3; EXPRESSED IN BT474, SIGNAL =   1; EXPRESSED IN HELA, SIGNAL = 1.6; EST_HUMAN HIT: AW294800.1, EVALUE 1.00e-06
DLTWTFSTSQHIQGLCFQWRR

SEQ ID NO: 47986 - protein, 54 aa, Homo sapiens
  MAP TO AL049694.9; EXPRESSED IN BONE MARROW, SIGNAL = 0.65; EXPRESSED IN HBL100, SIGNAL = 1.7; EXPRESSED IN LUNG, SIGNAL = 0.9; EXPRESSED IN HELA, SIGNAL = 1.5; EST_HUMAN HIT: BE734169.1, EVALUE 1.00e-18; SWISSPROT HIT: P27653, EVALUE 9.00e-14
PVFGLVQAQFDIAVASEIMAVLALTDSLADMKARLGRMVVASDKSGQPVTADDL

SEQ ID NO: 47987 - protein, 63 aa, Homo sapiens
  MAP TO AC005105.2; EXPRESSED IN LUNG, SIGNAL = 0.71; EXPRESSED IN PLACENTA, SIGNAL = 0.73; EXPRESSED IN HELA, SIGNAL = 0.59; EXPRESSED IN BT474, SIGNAL = 0.6; EST_HUMAN HIT: BF439247.1, EVALUE 4.00e-20
LSDTTNTYEPSPQPPAPEPEHHQSFLTVSVFLPRSILPRPWGRHCPEVGAHHPLAFKRSFITN

SEQ ID NO: 47988 - protein, 48 aa, Homo sapiens
  MAP TO AL078596.8; EXPRESSED IN LUNG, SIGNAL = 3.8; EST_HUMAN HIT: BE799584.1, EVALUE 1.00e-13; SWISSPROT HIT: Q9Y466, EVALUE 5.00e-25
RILDIPCKVCGDRSSGKHYGVYACDGCSGFFKRSIRRNRTYVCKSGNQ

SEQ ID NO: 47989 - protein, 86 aa, Homo sapiens
  MAP TO AC007708.13; EXPRESSED IN BT474, SIGNAL = 4.8; EXPRESSED IN LUNG, SIGNAL = 3.2; EST_HUMAN HIT: AI904151.1, EVALUE 1.00e-25; SWISSPROT HIT: P26404, EVALUE 3.50e-01
NEVAVYDIANEDIVYDIANEDALYDITNEDAVYNIANEDAVYGIANEDAVYEFANKDAVYDIANEDTVQDICKKEDAANVRHFSLS

SEQ ID NO: 47990 - protein, 37 aa, Homo sapiens
  MAP TO AL118512.2; EXPRESSED IN LUNG, SIGNAL = 1.4; EST_HUMAN HIT: T11492.1, EVALUE 3.00e-03; SWISSPROT HIT: Q05695, EVALUE 4.80e-02
GRTLQILNAQEDNAGRYSCVATNEAGEMIKHYEVKVY

SEQ ID NO: 47991 - protein, 34 aa, Homo sapiens
  MAP TO AC010974.2; EXPRESSED IN LUNG, SIGNAL = 0.89
KLHSRLLDLSSGDLLSEVERNRSLTQSRTDAEVH

SEQ ID NO: 47992 - protein, 37 aa, Homo sapiens
  MAP TO AC011003.1; EXPRESSED IN LUNG, SIGNAL = 1.2
AYLWIFYVGASQMKMSMKTLDLAVRSIAKVKAVATDL

SEQ ID NO: 47993 - protein, 24 aa, Homo sapiens
  MAP TO AL109843.5; EXPRESSED IN BT474, SIGNAL =   3; EXPRESSED IN HBL100, SIGNAL = 1.7; EXPRESSED IN BONE MARROW, SIGNAL = 1.5; EXPRESSED IN LUNG, SIGNAL = 1.2
NQSLYDAGLGYCGFDIKIGKRKSK

SEQ ID NO: 47994 - protein, 79 aa, Homo sapiens
  MAP TO AB023057.1; EXPRESSED IN HBL100, SIGNAL = 0.66; EXPRESSED IN BONE MARROW, SIGNAL = 0.68; EXPRESSED IN LUNG, SIGNAL = 0.94; EXPRESSED IN HELA, SIGNAL = 0.67; EST_HUMAN HIT: BE896125.1, EVALUE 1.00e-36; SWISSPROT HIT: P01893, EVALUE 8.00e-42
MSRPGRGEPRFISVGYVDDTQFVRFDSDDASPREEPRAPWMEREGPEYWDRNTQICKAQARTERENLRIALRYYNQSEG

SEQ ID NO: 47995 - protein, 86 aa, Homo sapiens
  MAP TO AB023057.1; EXPRESSED IN HBL100, SIGNAL = 0.66; EXPRESSED IN BONE MARROW, SIGNAL = 0.68; EXPRESSED IN LUNG, SIGNAL = 0.94; EXPRESSED IN HELA, SIGNAL = 0.67; EST_HUMAN HIT: BE888511.1, EVALUE 1.00e-10
GGGSGGSQLLLAPRLPLHEVFLHHHVPARPRGAPLHLRRLRGRYAVRAVRQRRRESERGAAGAVDGAGGAGVLGPEHTDLQGPSTD

SEQ ID NO: 47996 - protein, 24 aa, Homo sapiens
  MAP TO AL109614.4; EXPRESSED IN LUNG, SIGNAL = 1.5
AQVILQPVALILHVRPHTHDHLKT

SEQ ID NO: 47997 - protein, 25 aa, Homo sapiens
  MAP TO AL109614.4; EXPRESSED IN LUNG, SIGNAL = 1.5
DRLEDDLSLRLQWVREGAKPFRRDI

SEQ ID NO: 47998 - protein, 114 aa, Homo sapiens
  MAP TO AC009497.2; EXPRESSED IN LUNG, SIGNAL =   7; EXPRESSED IN BT474, SIGNAL = 1.5; EXPRESSED IN HELA, SIGNAL = 1.6; SWISSPROT HIT: gi127998, EVALUE 2.00e-25; EST_HUMAN HIT: BF576570.1, EVALUE 6.00e-40
YKYKEGYRKQLGHHMGFRTLQDDPKSVWAIHAAKIQSDREYKKAYEKSKGIHNTPLDMMSIVQAKKCQVLVSDIDYRNYLHQWTCLPDQNDVIQAKKAYDLQSDVRILSPDPGE

SEQ ID NO: 47999 - protein, 65 aa, Homo sapiens
  MAP TO AC009497.2; EXPRESSED IN LUNG, SIGNAL =   7; EXPRESSED IN BT474, SIGNAL = 1.5; EXPRESSED IN HELA, SIGNAL = 1.6; EST_HUMAN HIT: BF056716.1, EVALUE 9.00e-05; SWISSPROT HIT: P22219, EVALUE 7.50e+00
NMISYYFSTNTKKVTVSNWATTWVSAPYKMTPSQYGLYMLPRSRVTENIRKLMRSLKEFTTHRWT

SEQ ID NO: 48000 - protein, 32 aa, Homo sapiens
  MAP TO AL049794.13; EXPRESSED IN LUNG, SIGNAL = 8.1
FHFVEKMCIGSVMDSEAALVTGAVAQQACRRV

SEQ ID NO: 48001 - protein, 79 aa, Homo sapiens
  MAP TO AC007738.1; EXPRESSED IN BT474, SIGNAL = 1.2; EXPRESSED IN HELA, SIGNAL = 1.7; EXPRESSED IN LUNG, SIGNAL = 0.98; EST_HUMAN HIT: AA653548.1, EVALUE 4.00e-17
KRSRLETRAGEEDEGEEDSDSDYEISAKARYFGYIKQGLYLVTEMERFAPPRKRPRTITKNYRLVSLRSTTPEELYQRK

SEQ ID NO: 48002 - protein, 34 aa, Homo sapiens
  MAP TO AC007738.1; EXPRESSED IN BT474, SIGNAL = 1.2; EXPRESSED IN HELA, SIGNAL = 1.7; EXPRESSED IN LUNG, SIGNAL = 0.98
NDLVWRLELEKKMKEKRILILIMKYLPRLATLVI

SEQ ID NO: 48003 - protein, 28 aa, Homo sapiens
  MAP TO AB020876.1; EXPRESSED IN LUNG, SIGNAL = 3.7
GHGSGRVSSGAFSAFLSPGSFNPPDKEG

SEQ ID NO: 48004 - protein, 464 aa, Homo sapiens
  MAP TO AC004616.1; EXPRESSED IN BT474, SIGNAL = 2.2; EXPRESSED IN LUNG, SIGNAL = 1.3; EXPRESSED IN PLACENTA, SIGNAL = 0.94; EST_HUMAN HIT: BE007935.1, EVALUE 3.00e-65; SWISSPROT HIT: Q07889, EVALUE 3.00e-04
STPFHQEEAGSSTTLSSIKVEVASSQAETTTLDQDHLETTVAILLSETRPQNHTPTAARMKEPASSSPSTILMSLGQTTTTKPALPSPRISQASRDSKENVFLNYVGNPETEATPVNNEGTQHMSGPNELSTPSSDQDAFNLSTKLELEKQVFGSRSLPRGPDSQRQDGRVHASHQLTRVPAKPILPTATVRLPEMSTQSASRYFVTSQSPRHWTNKPEITTYPSGALPENKQFTTPRLSSTTIPLPLHMSKPSIPSKFTDRRTDQFNGYSKVFGNNNIPEARNPVGKPPSPRIPHYSNGRLPFFTNKTLSFPQLGVTRRPQIPTSPAPVMRERKVIPGSYNRIHSHSTFHLDFGPPAPPLLHTPQTTGSPSTNLQNIPMVSSTQSSISFITSSVQSSGSFHQSSSKFFAGGPPASKFWSLGEKPQILTKSPQTVSVTAETDTVFPCEATGKPKPFVTWTKVST

SEQ ID NO: 48005 - protein, 20 aa, Homo sapiens
  MAP TO AC004616.1; EXPRESSED IN BT474, SIGNAL = 2.2; EXPRESSED IN LUNG, SIGNAL = 1.3; EXPRESSED IN PLACENTA, SIGNAL = 0.94; EST_HUMAN HIT: AW207280.1, EVALUE 3.00e-04
NIETLLLPVQKLYFCLELFL

SEQ ID NO: 48006 - protein, 70 aa, Homo sapiens
  MAP TO AL096763.9; EXPRESSED IN LUNG, SIGNAL = 7.1; EST_HUMAN HIT: BF528413.1, EVALUE 4.20e+00; SWISSPROT HIT: P13813, EVALUE 4.40e-02
FVIITVDDSDDNNDCSIEMVEVSETADNSTNDIADDSTYVTADNPTDDTATQPNFPGGNDGHHRPLQMSY

SEQ ID NO: 48007 - protein, 24 aa, Homo sapiens
  MAP TO AF165147.1; EXPRESSED IN LUNG, SIGNAL = 1.7
FYSPSPRDAEEGATAGTEDYTGMR

SEQ ID NO: 48008 - protein, 43 aa, Homo sapiens
  MAP TO AL109657.7; EXPRESSED IN BT474, SIGNAL = 1.5; EXPRESSED IN LUNG, SIGNAL = 3.1; EST_HUMAN HIT: BF509718.1, EVALUE 3.00e-14
DIHLARRLYDMAAQTSPDAHIPVLFAVMKLETTHLLRDILFFN

SEQ ID NO: 48009 - protein, 29 aa, Homo sapiens
  MAP TO AL109657.7; EXPRESSED IN BT474, SIGNAL = 1.5; EXPRESSED IN LUNG, SIGNAL = 3.1; SWISSPROT HIT: P94461, EVALUE 1.90e-01; EST_HUMAN HIT: BF509718.1, EVALUE 7.00e-09
HSLGQKIVRHGCSNESRCPHTCALCRHET

SEQ ID NO: 48010 - protein, 88 aa, Homo sapiens
  MAP TO AC007038.3; EXPRESSED IN LUNG, SIGNAL = 0.98; EST_HUMAN HIT: T23219.1, EVALUE 2.00e-35; SWISSPROT HIT: P17801, EVALUE 1.10e+00
SENFPTEEGEKEEDTEAQGATAHSPLSAQLSDPDDFTGLETSSLLQHGDTVLHISEENGMENPLLSSQFTFTPTELGKTDAVLDESHV

SEQ ID NO: 48011 - protein, 80 aa, Homo sapiens
  MAP TO AC007038.3; EXPRESSED IN LUNG, SIGNAL = 0.98; EST_HUMAN HIT: BF530735.1, EVALUE 3.00e-30; SWISSPROT HIT: P18809, EVALUE 8.30e+00
RTSPLKKEKRRRTQKHKVLLHTVHSLPNSLTLMTSQASRHPASYSMETLSFISVRKMAWRTRYYLVSSPLLPLSWGKRMQ

SEQ ID NO: 48012 - protein, 32 aa, Homo sapiens
  MAP TO AC007773.1; EXPRESSED IN LUNG, SIGNAL = 1.4; EST_HUMAN HIT: AW847089.1, EVALUE 2.00e-11
REQHSLPDTLSIATSNEPRISSDTADGKCVQE

SEQ ID NO: 48013 - protein, 32 aa, Homo sapiens
  MAP TO AC000052.8; EXPRESSED IN LUNG, SIGNAL = 0.61; EXPRESSED IN BONE MARROW, SIGNAL = 0.64; EST_HUMAN HIT: AV732194.1, EVALUE 4.00e-06; SWISSPROT HIT: P79621, EVALUE 6.30e+00
INCTSGPIPSIKLPVWPCRLLSFDISPTSMRS

SEQ ID NO: 48014 - protein, 33 aa, Homo sapiens
  MAP TO AC007435.12; EXPRESSED IN LUNG, SIGNAL = 0.92; EXPRESSED IN BT474, SIGNAL = 0.66; SWISSPROT HIT: P34641, EVALUE 8.20e+00
IVPTWSKLSLLSVLLMPVAIAMEGRGRSRGPAP

SEQ ID NO: 48015 - protein, 23 aa, Homo sapiens
  MAP TO AC007435.12; EXPRESSED IN LUNG, SIGNAL = 0.92; EXPRESSED IN BT474, SIGNAL = 0.66
RGRTTASSTSFHGYGHRHQQYGK

SEQ ID NO: 48016 - protein, 544 aa, Homo sapiens
  MAP TO AL035660.11; EXPRESSED IN LUNG, SIGNAL = 1.3; EST_HUMAN HIT: BF678746.1, EVALUE 1.00e-108; SWISSPROT HIT: Q02383, EVALUE 0.00e+00
GSKGQLPSGSSQFPHGQKGQHYFGQKDQQHTKSKGSFSIQHTYHVDINDHDWTRKSQQYDLNALHKATKSKQHLGGSQQLLNYKQEGRDHDKSKGHFHMIVIHHKGGQAHHGTQNPSQDQGNSPSGKGLSSQCSNTEKRLWVHGLSKEQASASGAQKGRTQGGSQSSYVLQTEELVVNKQQRETKNSHQNKGHYQNVVDVREEHSSKLQTSLHPAHQDRLQHGPKDIFTTQDELLVYNKNQHQTKNLSQDQEHGRKAHKISYPSSRTEERQLHHGEKSVQKDVSKGSISIQTEEKIHGKSQNQVTIHSQDQEHGHKENKISYQSSSTEERHLNCGEKGIQKGVSKGSISIQTEEQIHGKSQNQVRIPSQAQEYGHKENKISYQSSSTEERRLNSGEKDVQKGVSKGSISIQTEEKIHGKSQNQVTIPSQDQEHGHKENKMSYQSSSTEERRLNYGGKSTQKDVSQSSISFQIEKLVEGKSQIQTPNPNQDQWSGQNAKGKSGQSADSKQDLLSHEQKGRYKQESSESHNIVITEHEVAQDDHLT

SEQ ID NO: 48017 - protein, 35 aa, Homo sapiens
  MAP TO AL035660.11; EXPRESSED IN LUNG, SIGNAL = 1.3; EST_HUMAN HIT: BF678991.1, EVALUE 1.00e-06
IMNAYISIINYQVDQKANCQADLPNFHMDKRASTI

SEQ ID NO: 48018 - protein, 26 aa, Homo sapiens
  MAP TO AC010142.2; EXPRESSED IN LUNG, SIGNAL = 1.2; EXPRESSED IN BT474, SIGNAL = 1.2
LQIRAEFSLEMSNNGMKMLKHVFKDL

SEQ ID NO: 48019 - protein, 63 aa, Homo sapiens
  MAP TO AC007163.2; EXPRESSED IN LUNG, SIGNAL = 3.1; SWISSPROT HIT: Q06278, EVALUE 9.00e-20; EST_HUMAN HIT: AV705711.1, EVALUE 1.00e-18
IEGLFIQGMGLYTTEELKYSPEGVLYSRSPDEYKIPTITDVPEEFNVSLLPSSQTPLTIYSSK

SEQ ID NO: 48020 - protein, 66 aa, Homo sapiens; identical to SEQ ID NO: 36382
  MAP TO AC008015.4; EXPRESSED IN LUNG, SIGNAL =   5; EXPRESSED IN HELA, SIGNAL = 1.1; EST_HUMAN HIT: BF335227.1, EVALUE 7.50e+00

SEQ ID NO: 48021 - protein, 29 aa, Homo sapiens
  MAP TO AP000094.1; EXPRESSED IN LUNG, SIGNAL = 1.1; EXPRESSED IN PLACENTA, SIGNAL = 0.83; EXPRESSED IN BONE MARROW, SIGNAL = 0.63
SMPVIDFSPKYLQPERPKDALVSPRMLIL

SEQ ID NO: 48022 - protein, 39 aa, Homo sapiens
  MAP TO AC008176.1; EXPRESSED IN LUNG, SIGNAL = 4.8; SWISSPROT HIT: P41428, EVALUE 8.10e+00; EST_HUMAN HIT: T09068.1, EVALUE 5.00e-09
VFDLSVEGSLISEDAMDNIDEILEKTESSVCKELEIALV

SEQ ID NO: 48023 - protein, 55 aa, Homo sapiens
  MAP TO AC010876.1; EXPRESSED IN HELA, SIGNAL = 0.95; EXPRESSED IN LUNG, SIGNAL = 1.7; EST_HUMAN HIT: AW580584.1, EVALUE 9.00e-26; SWISSPROT HIT: P20662, EVALUE 1.20e+00
IMEKKMKTKRNIAKHYKNNPSLITFLCKNCSVLACSGEDIHVIEKMHHVNMTPEF

SEQ ID NO: 48024 - protein, 33 aa, Homo sapiens
  MAP TO AC008278.1; EXPRESSED IN PLACENTA, SIGNAL = 0.65; EXPRESSED IN BONE MARROW, SIGNAL = 2.1; EXPRESSED IN LUNG, SIGNAL = 0.59
TNIMASSSSCLAYSTPEACSGMEDGVSLFSVLA

SEQ ID NO: 48025 - protein, 19 aa, Homo sapiens
  MAP TO AL035696.14; EXPRESSED IN BONE MARROW, SIGNAL = 8.5; EXPRESSED IN LUNG, SIGNAL = 0.64; EST_HUMAN HIT: AA412077.1, EVALUE 2.00e-03
NVKMMRMKTFMMIHFHFMN

SEQ ID NO: 48026 - protein, 28 aa, Homo sapiens
  MAP TO AC011308.2; EXPRESSED IN LUNG, SIGNAL = 0.95; SWISSPROT HIT: P43304, EVALUE 2.00e-09
GTSSRSTKLIHGGVRYLQKAIMKLDIEQ

SEQ ID NO: 48027 - protein, 62 aa, Homo sapiens
  MAP TO AC007218.2; EXPRESSED IN LUNG, SIGNAL = 5.6; EST_HUMAN HIT: BE703354.1, EVALUE 1.00e-19; SWISSPROT HIT: P35436, EVALUE 4.00e-31
KLDAFIYDAAVLNYKAGRDEGCKLVTIGSGYIFATTGYGIALQKGSPWKRQIDLALLQFVGD

SEQ ID NO: 48028 - protein, 21 aa, Homo sapiens
  MAP TO AC007218.2; EXPRESSED IN LUNG, SIGNAL = 5.6
MTPWFLVISGSWTLSSTMPQS

SEQ ID NO: 48029 - protein, 124 aa, Homo sapiens
  MAP TO AL009182.12; EXPRESSED IN LUNG, SIGNAL = 1.2; EXPRESSED IN HELA, SIGNAL = 1.4; SWISSPROT HIT: Q59567, EVALUE 4.00e+00; EST_HUMAN HIT: BE869398.1, EVALUE 8.00e-21
MVEGLQVTVPDKKKVAMLFQPTVLRCHFSTSSHQPAVVQWKFKSYCQDRMGESLGMSSTRAQSLSKRNLEWDPYLDCLDSRRTVRVVASKQGSTVTLGDFYRGREITIVHGNNAPILNLGNGRE

SEQ ID NO: 48030 - protein, 86 aa, Homo sapiens
  MAP TO AL009182.12; EXPRESSED IN LUNG, SIGNAL = 1.2; EXPRESSED IN HELA, SIGNAL = 1.4; EST_HUMAN HIT: BE398021.1, EVALUE 2.00e-03; SWISSPROT HIT: P05882, EVALUE 5.20e-01
PWSKAFRSQCPTRRRWPCSSSPLCFAATSQHPPISLQLCSGSSSPTARIAWENPWACPLPGPNLSARETWNGTPTWIVWTAGGLFE

SEQ ID NO: 48031 - protein, 27 aa, Homo sapiens
  MAP TO AC009312.1; EXPRESSED IN LUNG, SIGNAL =   1
ITLYSHQCKLSGYLVPDTVFDIHGKPM

SEQ ID NO: 48032 - protein, 24 aa, Homo sapiens
  MAP TO AC009497.2; EXPRESSED IN LUNG, SIGNAL =  16; EXPRESSED IN BT474, SIGNAL = 1.2; EST_HUMAN HIT: F00239.1, EVALUE 1.00e-05; SWISSPROT HIT: gi127998, EVALUE 2.00e-03
YKYKEGYRKQLGHHMGFRTLQDDP

SEQ ID NO: 48033 - protein, 49 aa, Homo sapiens
  MAP TO AC009497.2; EXPRESSED IN LUNG, SIGNAL =  16; EXPRESSED IN BT474, SIGNAL = 1.2; EST_HUMAN HIT: BE185376.1, EVALUE 8.00e-04
SNWATTWVSAPYKMTPSQYGLYMLPRSRVTENIRKLMRSLKEFTTHRWT

SEQ ID NO: 48034 - protein, 81 aa, Homo sapiens
  MAP TO AC009954.1; EXPRESSED IN LUNG, SIGNAL = 2.5; EST_HUMAN HIT: AV713699.1, EVALUE 3.00e-05; SWISSPROT HIT: P47884, EVALUE 8.00e-11
LIILATAQLAGPMDGENHSVVSEFLFLGLTHSWEIQLLLLVFSSVLYVASITGNILIVFSVTTDPHLHFPMYFLLASLSFI

SEQ ID NO: 48035 - protein, 26 aa, Homo sapiens
  MAP TO AF165176.1; EXPRESSED IN LUNG, SIGNAL = 3.2
VPQHERMNQQHVPFYINFTPQPREAS

SEQ ID NO: 48036 - protein, 61 aa, Homo sapiens
  MAP TO AC007778.1; EXPRESSED IN LUNG, SIGNAL = 0.95; EST_HUMAN HIT: AA506650.1, EVALUE 1.00e+00; SWISSPROT HIT: Q18115, EVALUE 1.10e+00
LSHQMQNSTKNLNMVAVFICFLGGLVMHEFHFLIASPFPLGNLLFLPVSHLRKPISKMLIP

SEQ ID NO: 48037 - protein, 34 aa, Homo sapiens
  MAP TO AC010088.2; EXPRESSED IN LUNG, SIGNAL = 2.5; EST_HUMAN HIT: AI984806.1, EVALUE 2.00e-01
LTGPRQESHIIWIQCLEMIQLPKKIMYRWERTVM

SEQ ID NO: 48038 - protein, 39 aa, Homo sapiens
  MAP TO AC009966.2; EXPRESSED IN LUNG, SIGNAL = 1.9
MCGAAVDVVVEVMLRLRDVFSEPTGLEMIHYSYLWTLDM

SEQ ID NO: 48039 - protein, 53 aa, Homo sapiens
  MAP TO AJ239320.2; EXPRESSED IN BT474, SIGNAL = 1.4; EXPRESSED IN HELA, SIGNAL = 0.94; EXPRESSED IN LUNG, SIGNAL = 2.7; EST_HUMAN HIT: AA247817.1, EVALUE 2.00e-10; SWISSPROT HIT: P18826, EVALUE 3.00e-26
NPVTGLLPASYDQKDAWVRDNVYSILAVWGLGLAYRKNADRDEDKAKAYELEQ

SEQ ID NO: 48040 - protein, 37 aa, Homo sapiens; identical to SEQ ID NO: 43118
  MAP TO AC010127.2; EXPRESSED IN LUNG, SIGNAL =  12; EST_HUMAN HIT: BF347024.1, EVALUE 9.00e-05; SWISSPROT HIT: O29353, EVALUE 8.10e+00

SEQ ID NO: 48041 - protein, 58 aa, Homo sapiens
  MAP TO AC009705.2; EXPRESSED IN LUNG, SIGNAL = 5.8; SWISSPROT HIT: Q03661, EVALUE 2.60e+00; EST_HUMAN HIT: BF380870.1, EVALUE 3.00e-17
  unsure 7
  unsure 47
QILNSRXNESKPQDWETNREAELEVVNWKSPRKDEQRYHKKRKLNIXAPEFKAIRCQQ

SEQ ID NO: 48042 - protein, 71 aa, Homo sapiens
  MAP TO AC009405.2; EXPRESSED IN LUNG, SIGNAL = 1.7; EST_HUMAN HIT: BE091335.1, EVALUE 4.20e-01
LFFIWSIYPLRLKATSSVEHFLIPCNMVLILSCICTHHSCHPYQTLQRALTRCCLHFWTIAPYMLCCHSTQ

SEQ ID NO: 48043 - protein, 25 aa, Homo sapiens
  MAP TO AC009476.2; EXPRESSED IN BONE MARROW, SIGNAL = 0.93; EXPRESSED IN LUNG, SIGNAL = 1.5
NVLQNHLWMVNFMYQLDRARDTQIT

SEQ ID NO: 48044 - protein, 23 aa, Homo sapiens
  MAP TO AC009476.2; EXPRESSED IN BONE MARROW, SIGNAL = 0.93; EXPRESSED IN LUNG, SIGNAL = 1.5
MFFRTTFGWLILCISLTGQGIHR

SEQ ID NO: 48045 - protein, 34 aa, Homo sapiens
  MAP TO AC009971.1; EXPRESSED IN LUNG, SIGNAL = 4.4; EST_HUMAN HIT: H11536.1, EVALUE 3.00e+00
AKDATQQRWRLTSPSGNSKSDECNAATGDWLELQ

SEQ ID NO: 48046 - protein, 33 aa, Homo sapiens
  MAP TO AC009971.1; EXPRESSED IN LUNG, SIGNAL = 4.4; EST_HUMAN HIT: H11536.1, EVALUE 2.00e-04; SWISSPROT HIT: Q11052, EVALUE 8.20e+00
LRMPHSKDGGLPLPLGTPNQMSVMLLLVTGWSS

SEQ ID NO: 48047 - protein, 60 aa, Homo sapiens; identical to SEQ ID NO: 38239
  MAP TO AC010740.2; EXPRESSED IN LUNG, SIGNAL = 4.6; SWISSPROT HIT: P98157, EVALUE 1.00e-15; EST_HUMAN HIT: BF515499.1, EVALUE 1.00e-14

SEQ ID NO: 48048 - protein, 38 aa, Homo sapiens
  MAP TO AC010740.2; EXPRESSED IN LUNG, SIGNAL = 4.6
LPVLQQENLVLWSHNRMVPLQPFSSLPSSQSFSPSQRH

SEQ ID NO: 48049 - protein, 49 aa, Homo sapiens
  MAP TO AL020997.1; EXPRESSED IN LUNG, SIGNAL = 2.2; SWISSPROT HIT: Q28147, EVALUE 3.00e-20; EST_HUMAN HIT: BE562000.1, EVALUE 4.00e-19
FNTAHNKRISTLTIEEGNLDIQRPKRKRKNSRVTFSEDDEIINPGEVSC

SEQ ID NO: 48050 - protein, 28 aa, Homo sapiens
  MAP TO AL035608.11; EXPRESSED IN LUNG, SIGNAL = 1.8
NDQACFGNYSKISAEGAWKSGPCLNDAS

SEQ ID NO: 48051 - protein, 71 aa, Homo sapiens
  MAP TO AP000359.1; EXPRESSED IN LUNG, SIGNAL = 2.1; EST_HUMAN HIT: BF664941.1, EVALUE 1.00e-16; SWISSPROT HIT: O04379, EVALUE 2.90e-02
GMSCLLVFKVICILPNDDKRRYDSIKRYLCTKCPIPSQCVVKKTLEKVQARTIVTKIAQQMNCKMGGALWK

SEQ ID NO: 48052 - protein, 108 aa, Homo sapiens
  MAP TO AL049548.6; EXPRESSED IN BONE MARROW, SIGNAL =   1; EXPRESSED IN LUNG, SIGNAL = 0.65; SWISSPROT HIT: P11532, EVALUE 3.70e-02; EST_HUMAN HIT: BE257342.1, EVALUE 1.10e+00
TLESVISQWNDYVERKNQLEQWMESVDQKIEHPLQPQPGLKEKFVLLDHLQSILSEAEDHTRALHRLIAKSRELYEKTEDESFKDTAQEELKTQFNDIMTVAKVSALY

SEQ ID NO: 48053 - protein, 50 aa, Homo sapiens
  MAP TO AP000547.1; EXPRESSED IN LUNG, SIGNAL = 1.5; EST_HUMAN HIT: AU117898.1, EVALUE 1.00e-03; SWISSPROT HIT: Q03385, EVALUE 8.00e-06
VTTQFFPLDPGIQSKQGGPLLQLAANNYNLEPKQHFGSWFGTMKRLGETE

SEQ ID NO: 48054 - protein, 28 aa, Homo sapiens
  MAP TO AL035407.15; EXPRESSED IN BONE MARROW, SIGNAL = 1.1; EXPRESSED IN LUNG, SIGNAL =   1
MIKCNILHANDFEHKMQSVYDKLPITPR

SEQ ID NO: 48055 - protein, 69 aa, Homo sapiens
  MAP TO AL050335.17; EXPRESSED IN LUNG, SIGNAL = 1.8; EST_HUMAN HIT: AA195197.1, EVALUE 3.60e+00; SWISSPROT HIT: P16070, EVALUE 5.20e+00
CNCIHDAADFNLYGFLHHGAEEDSVTASEKSLSSDNLSDREAITTCLISQAILIHCCLAIGIRKRERGR

SEQ ID NO: 48056 - protein, 58 aa, Homo sapiens
  MAP TO AP000512.1; EXPRESSED IN LUNG, SIGNAL = 1.4; EST_HUMAN HIT: AW449328.1, EVALUE 3.00e-26; SWISSPROT HIT: P40026, EVALUE 2.60e+00
SNKHLWQSIISLQLKSDLLKEMLGSQTGNGNVQDVLRYLVKSETQKAIKVSLDCVRKR

SEQ ID NO: 48057 - protein, 19 aa, Homo sapiens
  MAP TO AP000512.1; EXPRESSED IN LUNG, SIGNAL = 1.4; EST_HUMAN HIT: AW449328.1, EVALUE 3.00e-03
QQQASLAVYHFPSTEIRSS

SEQ ID NO: 48058 - protein, 50 aa, Homo sapiens
  MAP TO AC007867.1; EXPRESSED IN LUNG, SIGNAL = 7.7; EST_HUMAN HIT: AI979276.1, EVALUE 2.00e-20; SWISSPROT HIT: P10587, EVALUE 2.30e-01
IIAELQTTISSLKEENSQQQLAAERRLQDVRQKFEDEKKQLIRDNDQAIK

SEQ ID NO: 48059 - protein, 176 aa, Homo sapiens
  MAP TO AC010826.2; EXPRESSED IN LUNG, SIGNAL =   1; EXPRESSED IN HELA, SIGNAL = 0.95; EXPRESSED IN HBL100, SIGNAL = 0.99; SWISSPROT HIT: P22793, EVALUE 3.00e-05; EST_HUMAN HIT: AV711714.1, EVALUE 2.00e-58
FEIEEEEEMLSSVIPDSRRENELPDFPHIDEFFTLNSTPSRSAYDEPHLLVNIEKQKLELEKRRLDIEAERLQVEKERLQIEKERLRHLDMEHERLQLEKERLQIEREKLRLQIVNSEKPSLENELGQGEKSMLQPQDIETEKLKLERERLQLEKDRLQFLKFESEKLQIEKERLQ

SEQ ID NO: 48060 - protein, 48 aa, Homo sapiens
  MAP TO AC011294.1; EXPRESSED IN LUNG, SIGNAL = 1.1; SWISSPROT HIT: P17388, EVALUE 6.00e+00
PLAGMWSKRRNVCLLLDLLELLQDKRNSDTTFSSINFREVLQKHSRIS

SEQ ID NO: 48061 - protein, 48 aa, Homo sapiens
  MAP TO AC011294.1; EXPRESSED IN LUNG, SIGNAL = 1.1; EST_HUMAN HIT: BE935858.1, EVALUE 5.10e+00
HWLGCGLREETCAFCWIFWNSSKIKGILTPHSAVSTSGRYYRNTHGSQ

SEQ ID NO: 48062 - protein, 33 aa, Homo sapiens
  MAP TO AC005481.2; EXPRESSED IN LUNG, SIGNAL = 0.96; SWISSPROT HIT: P16112, EVALUE 4.80e+00; EST_HUMAN HIT: AW188265.1, EVALUE 3.00e-11
SISLPLSEVTVAVMTDTEETNRSRTVSLPRPFP

SEQ ID NO: 48063 - protein, 76 aa, Homo sapiens
  MAP TO AC007735.2; EXPRESSED IN LUNG, SIGNAL = 0.89; SWISSPROT HIT: O05953, EVALUE 4.50e+00; EST_HUMAN HIT: AL157646.1, EVALUE 3.00e+00
VNGVVICAMTNKAELLVNTVAGICFLVTLHGSDIEVSSEELEEMRVSKERNAGSDLTFKIFFHGEKHDLCEDGSNC

SEQ ID NO: 48064 - protein, 45 aa, Homo sapiens
  MAP TO AC009311.1; EXPRESSED IN BONE MARROW, SIGNAL =   1; EXPRESSED IN LUNG, SIGNAL = 4.6; EST_HUMAN HIT: AW188198.1, EVALUE 5.00e-22; SWISSPROT HIT: P98066, EVALUE 7.00e-24
MAKGRVGYPIVKPGPNCGFGKTGIIDYGIRLNRSERWDAYCYNPH

SEQ ID NO: 48065 - protein, 156 aa, Homo sapiens
  MAP TO AL049794.13; EXPRESSED IN LUNG, SIGNAL = 2.8; EST_HUMAN HIT: BE965762.2, EVALUE 3.30e+00; SWISSPROT HIT: P70842, EVALUE 8.10e+00
DAIQDLGTCHSSAGGVLSPDVRISHSFSLEFLFKCRFFNVGFLSYSIENSAPYCWCFLSPLYFSSFTALIKIWPLRYFPYLLVYSLSPSVSTGTISVLFLDYAPCAWRVPSVQVLNEKWEPVLLKSLNFQILARILAETNNQTRKPCRPNRYSLWV

SEQ ID NO: 48066 - protein, 73 aa, Homo sapiens
  MAP TO AC005674.9; EXPRESSED IN LUNG, SIGNAL = 0.58; EST_HUMAN HIT: BE122658.1, EVALUE 1.00e-37; SWISSPROT HIT: P31334, EVALUE 1.10e+00
RKEKTEMSPREHIKGKETTPSSLAVTQTMATKAPECVEDPDMANQRKTALEFCGETWSSLCTFFLSIVQDTSC

SEQ ID NO: 48067 - protein, 35 aa, Homo sapiens
  MAP TO AL109653.9; EXPRESSED IN LUNG, SIGNAL = 2.1; EST_HUMAN HIT: BE270286.1, EVALUE 3.90e+00; SWISSPROT HIT: P53695, EVALUE 6.20e+00
IQLWDEGTRGRGHQRLSRSGDTSGESWKLSESSHQ

SEQ ID NO: 48068 - protein, 94 aa, Homo sapiens
  MAP TO AC009594.2; EXPRESSED IN LUNG, SIGNAL = 3.3; EST_HUMAN HIT: AI962273.1, EVALUE 5.00e-17; SWISSPROT HIT: Q95155, EVALUE 1.00e-23
  unsure 8
SSRFTPLXGRSKAFSTCSAHLTVVIIFYGTILFMYMKPKSKETLNSDDLDATDKIISMFYGVMTPMMNPLIYSLRNKDVKEAVKHLPNRRFFSK

SEQ ID NO: 48069 - protein, 20 aa, Homo sapiens
  MAP TO AC009613.2; EXPRESSED IN LUNG, SIGNAL = 1.6
IIQLHKQKGYLSCREILMRK

SEQ ID NO: 48070 - protein, 49 aa, Homo sapiens
  MAP TO AC009444.1; EXPRESSED IN LUNG, SIGNAL = 4.2
KVLNADRKSARNGRDNPSAKGHCSTIALSSDGCKRIVRILHFSTNVGMK

SEQ ID NO: 48071 - protein, 25 aa, Homo sapiens
  MAP TO AC009722.1; EXPRESSED IN LUNG, SIGNAL = 2.4; EXPRESSED IN BT474, SIGNAL =   1
KDENVFHDQEEKCTLSANVIHSIAR

SEQ ID NO: 48072 - protein, 19 aa, Homo sapiens
  MAP TO AC009722.1; EXPRESSED IN LUNG, SIGNAL = 2.4; EXPRESSED IN BT474, SIGNAL =   1
IRMKMCSMTKKRNVPSQPM

SEQ ID NO: 48073 - protein, 65 aa, Homo sapiens
  MAP TO AC010740.2; EXPRESSED IN LUNG, SIGNAL = 9.7; EST_HUMAN HIT: BE699802.1, EVALUE 1.00e-24; SWISSPROT HIT: P98157, EVALUE 7.00e-27
PFEAFIIFSIRHEIRRIDLHKRDYSLLVPGLRNTIALDFHFNQSLLYWTDVVEDRIYRGKLSESG

SEQ ID NO: 48074 - protein, 77 aa, Homo sapiens
  MAP TO AC010754.1; EXPRESSED IN BONE MARROW, SIGNAL =   1; EXPRESSED IN LUNG, SIGNAL = 1.6; SWISSPROT HIT: P20659, EVALUE 3.30e+00; EST_HUMAN HIT: BF681562.1, EVALUE 5.10e+00
LYNLTFLSSGENTALTLPCNVNPGQVSMPTTAATSITSPRVLFLQDLEALFVSLTTGKYFKMSLHDDDANVTVLVPG

SEQ ID NO: 48075 - protein, 79 aa, Homo sapiens
  MAP TO AC007363.3; EXPRESSED IN LUNG, SIGNAL = 4.3; EST_HUMAN HIT: AA196735.1, EVALUE 8.00e-15; SWISSPROT HIT: O42163, EVALUE 9.00e-10
GALMEKEEQEDAQVNAVRDHENNRVFFRSADCKIDLSFLIDGSTSIGKRRFRIQKQLLADVAQALDIGPAGPLMGVVQY

SEQ ID NO: 48076 - protein, 52 aa, Homo sapiens
  MAP TO AC010128.1; EXPRESSED IN LUNG, SIGNAL = 6.5
KTDMTLGWIAFNINVVADMLVLIVIKTGAPDAPVYSLIFYCFDNLNKQQQSH

SEQ ID NO: 48077 - protein, 67 aa, Homo sapiens
  MAP TO AL096763.9; EXPRESSED IN LUNG, SIGNAL =   6; EXPRESSED IN BT474, SIGNAL = 1.1; EST_HUMAN HIT: AV686394.1, EVALUE 1.90e+00; SWISSPROT HIT: Q48217, EVALUE 2.90e+00
YFGRPWRNIRMPCSVLTLAKTKSCASLSARYLIQKLFTKDVLVQSNVYGNLKHGLCALDPNKISALR

SEQ ID NO: 48078 - protein, 46 aa, Homo sapiens
  MAP TO AC008079.7; EXPRESSED IN HELA, SIGNAL = 0.6; EXPRESSED IN LUNG, SIGNAL =  11; EST_HUMAN HIT: AA580490.1, EVALUE 2.00e-05; SWISSPROT HIT: P08970, EVALUE 3.50e+00
VIIENDSCMYVIATEDPEDLSLGQDFEMEDSDIDYPDPYRTKLVCV

SEQ ID NO: 48079 - protein, 86 aa, Homo sapiens
  MAP TO AL078583.15; EXPRESSED IN BONE MARROW, SIGNAL =   1; EXPRESSED IN LUNG, SIGNAL = 1.4; EST_HUMAN HIT: AI480167.1, EVALUE 2.30e+00
VWFASDSRIRGRFHQSMEMGFLEVTLAFSSWSRQGALVGSLTKAFIKSQLFSAGAFSETTVRRGTWEDAGSVWRAIPHCFFGVPNL

SEQ ID NO: 48080 - protein, 29 aa, Homo sapiens
  MAP TO AL050403.12; EXPRESSED IN LUNG, SIGNAL = 0.96; EST_HUMAN HIT: BF345563.1, EVALUE 7.80e+00; SWISSPROT HIT: P08123, EVALUE 7.30e-01
LGVTGVSGSCGRNSPDPKSSSQGPPGGIC

SEQ ID NO: 48081 - protein, 63 aa, Homo sapiens
  MAP TO Z97985.4; EXPRESSED IN BT474, SIGNAL =   1; EXPRESSED IN LUNG, SIGNAL = 3.4; EST_HUMAN HIT: AA401549.1, EVALUE 2.00e-30; SWISSPROT HIT: Q9ZPX1, EVALUE 1.00e-10
EYELSIYDLNGDLKGREAWPNYYAQAHGLVFVLDSSDIRRMQEVKIILTHLLSDKRVAGKPIL

SEQ ID NO: 48082 - protein, 32 aa, Homo sapiens
  MAP TO AC005008.2; EXPRESSED IN LUNG, SIGNAL = 2.9
KLKADVRSVEDFYKIVYIRAFLCAHWNDSEEK

SEQ ID NO: 48083 - protein, 36 aa, Homo sapiens
  MAP TO AC005998.3; EXPRESSED IN HBL100, SIGNAL = 2.1; EXPRESSED IN LUNG, SIGNAL = 5.5; EST_HUMAN HIT: BE698671.1, EVALUE 1.00e-04
DSKGAVGSALPPSLHSVGRGTSTTLCWSSSTRHSAA

SEQ ID NO: 48084 - protein, 68 aa, Homo sapiens
  MAP TO AL031602.10; EXPRESSED IN PLACENTA, SIGNAL = 1.1; EXPRESSED IN LUNG, SIGNAL = 0.93; EST_HUMAN HIT: AW403072.1, EVALUE 2.00e-18; SWISSPROT HIT: P50636, EVALUE 1.00e-03
ADAWRALKNPSIGESSIEGLTSVLSTSGSPTDGLSVMQGPYSETASFAALSGGTLSGGILSSGKGKYS

SEQ ID NO: 48085 - protein, 43 aa, Homo sapiens
  MAP TO AC007252.2; EXPRESSED IN LUNG, SIGNAL = 0.91
PKRNRVKHRFNEKFEKWLFDFLFFLLFSAPQGAGNFAEACVEM

SEQ ID NO: 48086 - protein, 222 aa, Homo sapiens
  MAP TO AC005532.1; EXPRESSED IN LUNG, SIGNAL = 1.5; EXPRESSED IN PLACENTA, SIGNAL = 1.5; SWISSPROT HIT: Q50950, EVALUE 4.90e-01; EST_HUMAN HIT: BE336820.1, EVALUE 1.00e-112
ENTDIAENLYQKVRILCWVMTGPQNLEKKAKHVKATWAQRCNKVLFMSSEENKDFPAVGLKTKEGRDQLYWKTIKAFQYVHEHYLEDADWFLKADDDTYVILDNLRWLLSKYDPEEPIYFGRRFKPYVKQGYMSGGAGYVLSKEALKRFVDAFKTDKCTHSSSIEDLALGRCMEIMNVEAGDSRDTIGKETFHPFVPEHHLIKGYLPRTFWYWNYNYYPPVE

SEQ ID NO: 48087 - protein, 358 aa, Homo sapiens
  MAP TO AF117829.1; EXPRESSED IN HELA, SIGNAL = 1.2; EXPRESSED IN BT474, SIGNAL =   1; EXPRESSED IN LUNG, SIGNAL = 1.9; SWISSPROT HIT: Q9Y236, EVALUE 0.00e+00; EST_HUMAN HIT: AW995310.1, EVALUE 3.00e-94
TESSILIGYFSFSFFRSLKGDRVMPEEIARYYKHYVKVMGLQKNFRENTYITSVSRLYRDQDDDDIQDRDISTKHLQIEKSNFIKRNWEIRGYQRIADGSHVPFCLFAENVALATGTLDSPAHLEIEGEDFPFVFHSMPEFGAAINKGKLRGKVDPVLIVGSGLTAADAVLCAYNSNIPVIHVFRRRVTDPSLIFKQLPKKLYPEYHKVYHMMCTQSYSVDSNLLSDYTSFPEHRVLSFKSDMKCVLQSVSGLKKIFKLSAAVVLIGSHPNLSFLKDQGCYLGHKSSQPITCKGNPVEIDTYTYECIKEANLFALGPLVGDNFVRFLKGGALGVTRCLATRQKKKHLFVERGGGDGIA

SEQ ID NO: 48088 - protein, 34 aa, Homo sapiens
  MAP TO AC012111.1; EXPRESSED IN LUNG, SIGNAL = 0.96
IIVFYARCQKDFYQVFLCVFLKKILNNNNNNNNN

SEQ ID NO: 48089 - protein, 60 aa, Homo sapiens
  MAP TO AC006474.3; EXPRESSED IN PLACENTA, SIGNAL = 0.79; EXPRESSED IN BONE MARROW, SIGNAL = 0.93; EXPRESSED IN BT474, SIGNAL = 0.66; EXPRESSED IN LUNG, SIGNAL =  94; EST_HUMAN HIT: BF369194.1, EVALUE 1.00e-14; SWISSPROT HIT: P36044, EVALUE 6.70e-01
EAFFGKDLLDTSRQSKISLDNLSEDGAQLLYKTNMNTGFLDPSLDPLLSSSSAPTKSGTH

SEQ ID NO: 48090 - protein, 53 aa, Homo sapiens
  MAP TO AC007358.2; EXPRESSED IN LUNG, SIGNAL = 2.7; SWISSPROT HIT: Q14106, EVALUE 3.50e+00
KDLADSRQETQKARLITRTAPTTMAAMGHASLEKTVPQKSAWGRQIKDRSWVM

SEQ ID NO: 48091 - protein, 155 aa, Homo sapiens
  MAP TO AP000107.1; EXPRESSED IN HELA, SIGNAL = 0.75; EXPRESSED IN LUNG, SIGNAL = 0.69; EST_HUMAN HIT: H11666.1, EVALUE 2.00e-34; SWISSPROT HIT: Q9ZL42, EVALUE 3.40e+00
LLLISTLGVFALNCFTKGQKNSTLIFTRENTIRNCSCSADIRDCDYSLANLMCNCKTVLPLAVERTSYNGHLTIWFTDTSALGHLLNFTLVQDLKLSLCSTNTLPTEYLAICGLKRLRINMEAKHPFPEQSLLIHSGGDSDSREKPMWLHKGWQP

SEQ ID NO: 48092 - protein, 69 aa, Homo sapiens
  MAP TO AC007271.2; EXPRESSED IN LUNG, SIGNAL = 2.6; EXPRESSED IN PLACENTA, SIGNAL = 1.2; SWISSPROT HIT: P14778, EVALUE 1.00e-37; EST_HUMAN HIT: AU140044.1, EVALUE 1.00e-36
IILVSSANEIDVRPCPLNPNEHKGTITWYKDDSKTPVSTEQASRIHQHKEKLWFVPAKVEDSGHYYCVV

SEQ ID NO: 48093 - protein, 28 aa, Homo sapiens
  MAP TO AC007464.2; EXPRESSED IN LUNG, SIGNAL = 2.4e+02
MSVCQAHLQRVDGHSWFLQHLCSDCGHL

SEQ ID NO: 48094 - protein, 21 aa, Homo sapiens
  MAP TO AC007464.2; EXPRESSED IN LUNG, SIGNAL = 2.4e+02
RWPQSEHKCWRNQECPSTLCR

SEQ ID NO: 48095 - protein, 46 aa, Homo sapiens
  MAP TO AL035425.11; EXPRESSED IN LUNG, SIGNAL = 0.94; EXPRESSED IN HELA, SIGNAL = 1.3; EST_HUMAN HIT: AW893189.1, EVALUE 2.00e-22; SWISSPROT HIT: P29400, EVALUE 2.00e-23
PFMFCNINNVCNFASRNDYSYWLSTPEPMPMSMQPLKGQSIQPFIS

SEQ ID NO: 48096 - protein, 31 aa, Homo sapiens
  MAP TO AL035425.11; EXPRESSED IN LUNG, SIGNAL = 0.94; EXPRESSED IN HELA, SIGNAL = 1.3; EST_HUMAN HIT: T29644.1, EVALUE 1.00e-10
CLSCSATSIMFATLLQEMTILTGSLPQSPCQ

SEQ ID NO: 48097 - protein, 73 aa, Homo sapiens
  MAP TO AF165926.1; EXPRESSED IN HBL100, SIGNAL = 1.2; EXPRESSED IN HELA, SIGNAL = 1.7; EXPRESSED IN LUNG, SIGNAL = 2.1; EST_HUMAN HIT: AL042332.1, EVALUE 3.00e-24; SWISSPROT HIT: O75694, EVALUE 5.00e-25
IKIKRFMGSKIKIKRFVFLMCVQGIQPPAMSTPVCALGNPATQATNMSCVTGPEIVYSGKHNGICIYFSRIMG

SEQ ID NO: 48098 - protein, 139 aa, Homo sapiens
  MAP TO AL132780.1; EXPRESSED IN LUNG, SIGNAL = 1.1; SWISSPROT HIT: O60583, EVALUE 5.60e-01; EST_HUMAN HIT: AI831858.1, EVALUE 6.00e-81
LFANRSSIMRHFGPEDQRLWNDVTEELMSDEEDSLNEPGVWVARPPRFRAQRLTELCYHLDANSKHGTKANRVYGPPSDRLPSAEAQLLPPELYNPNFQEEEDEGGDENAPGSPSFDQPHKTCCPDLNSFIEIKVEKDE

SEQ ID NO: 48099 - protein, 36 aa, Homo sapiens
  MAP TO AC009396.3; EXPRESSED IN HELA, SIGNAL = 1.4; EXPRESSED IN LUNG, SIGNAL = 3.8; SWISSPROT HIT: P95816, EVALUE 6.20e+00
MREKMMECILEMGIDRIWDLLDKKLKEKQMQRPEIQ

SEQ ID NO: 48100 - protein, 55 aa, Homo sapiens
  MAP TO AC007568.1; EXPRESSED IN LUNG, SIGNAL = 1.7; EST_HUMAN HIT: AW499597.1, EVALUE 2.20e+00; SWISSPROT HIT: Q99572, EVALUE 2.00e+00
DFFRKKCESVLEYKHRSKHEKHLGVSINKILNHQAMKWTLPLLQISNSTPDFIIQ

SEQ ID NO: 48101 - protein, 60 aa, Homo sapiens
  MAP TO AC005365.1; EXPRESSED IN LUNG, SIGNAL = 1.4; EST_HUMAN HIT: AI873302.1, EVALUE 2.00e-28; SWISSPROT HIT: O60673, EVALUE 3.00e-29
EIGGRLLMVETRLANDLAEFEGDFSLEGLRLWKTAFSAMTQNPRPGSPLRSGQGVVNKGS

SEQ ID NO: 48102 - protein, 160 aa, Homo sapiens
  MAP TO AC005365.1; EXPRESSED IN LUNG, SIGNAL = 1.4; SWISSPROT HIT: O60673, EVALUE 8.00e-71; EST_HUMAN HIT: BE277813.1, EVALUE 2.30e+00
HTKEDVDNSQIALQAPTTGCSQTASESQMLPPVASASDPEKDEDDDDNYYISYSSPDSPVIPPWQQPISPDSKALNGDDRPSSPVEELPSLAFENFLKPIKDGIQKSPCSEPQEPLVISPINTRARTGKCESLCFHSTPIIQRKLLERLPEAPGLSPLST

SEQ ID NO: 48103 - protein, 263 aa, Homo sapiens
  MAP TO AL096829.12; EXPRESSED IN LUNG, SIGNAL = 0.99; SWISSPROT HIT: Q04446, EVALUE 3.00e+00; EST_HUMAN HIT: BE887580.1, EVALUE 1.00e-71
INPGNYQHFFHHADEDDEEEDDSPPERQIVVGICSMAKKSKSKPMKEILEWVSLFKYITVVVFEEEVILREPVENWPLCDCLFSLHSKGFPLDKVVAYAKLRNPFVINDLNMQYLIQDWREVYSILQAEVILLPCYAILNRDPNNPKECNLIEGEDHVEVNEEVFQKPFVEKPVSAEDHNVYIYYPTSAGSGSQRLFRKIGSRSSAYSPQSNVQKSSSYTHEEFMPGDDTNVKRFLMFCTTNIFGSLKPMDSFLTKVFLNALN

SEQ ID NO: 48104 - protein, 43 aa, Homo sapiens
  MAP TO AC011242.1; EXPRESSED IN LUNG, SIGNAL = 1.3; EST_HUMAN HIT: BF106266.1, EVALUE 3.00e-19; SWISSPROT HIT: P31826, EVALUE 3.60e+00
QLCQRLSTRWMALRGHSAADCVRIYLTVARKWPFFGAKLFLAK

SEQ ID NO: 48105 - protein, 28 aa, Homo sapiens
  MAP TO AC007064.25; EXPRESSED IN LUNG, SIGNAL = 0.96; EST_HUMAN HIT: R53462.1, EVALUE 1.00e-06
VKVFDAMHQLDMLLQHQPFGKSTSGVWA

SEQ ID NO: 48106 - protein, 56 aa, Homo sapiens
  MAP TO AC007064.25; EXPRESSED IN LUNG, SIGNAL = 0.96; SWISSPROT HIT: P15620, EVALUE 1.80e-01; EST_HUMAN HIT: R53462.1, EVALUE 3.00e-23
KPFSSSHRLCWHNRIKHKGIRKVYACSHCPDSRGTFTKGLMLEKHVQLMHGIKDLD

SEQ ID NO: 48107 - protein, 38 aa, Homo sapiens
  MAP TO AC008273.1; EXPRESSED IN LUNG, SIGNAL = 0.62
DGALFIPPVYFLPQSANIRHCILADTAEALIPAAQIPP

SEQ ID NO: 48108 - protein, 22 aa, Homo sapiens
  MAP TO AC008273.1; EXPRESSED IN LUNG, SIGNAL = 0.62
MVHYLFPRFTSCLRVLILGTAS

SEQ ID NO: 48109 - protein, 51 aa, Homo sapiens
  MAP TO AL031053.1; EXPRESSED IN LUNG, SIGNAL = 1.1; EST_HUMAN HIT: U69179.1, EVALUE 7.00e-22; SWISSPROT HIT: O60879, EVALUE 8.00e-23
SIIAVTLACEELKKSESFNRLLELVLLVGNYMNSGSRNAQSLGFKINFLCK

SEQ ID NO: 48110 - protein, 27 aa, Homo sapiens
  MAP TO AC010149.2; EXPRESSED IN LUNG, SIGNAL = 1.1; EST_HUMAN HIT: AI379485.1, EVALUE 8.00e-08; SWISSPROT HIT: P23497, EVALUE 6.00e-09
FSSSDFSDLSNGEELQETCSSSLRRGS

SEQ ID NO: 48111 - protein, 60 aa, Homo sapiens
  MAP TO AL109952.6; EXPRESSED IN HBL100, SIGNAL =   1; EXPRESSED IN HELA, SIGNAL = 1.5; EXPRESSED IN LUNG, SIGNAL =   1; EST_HUMAN HIT: AI825179.1, EVALUE 5.00e-24; SWISSPROT HIT: Q92674, EVALUE 1.00e-29
EFNHYLTSMVGCLWTSKPFGKGIYIDPEILEKTGVAEYKNSLNVVHHPSFLSYAVSFLLQ

SEQ ID NO: 48112 - protein, 56 aa, Homo sapiens
  MAP TO AC007738.1; EXPRESSED IN LUNG, SIGNAL = 2.2; EST_HUMAN HIT: BE070016.1, EVALUE 4.00e-10; SWISSPROT HIT: Q60389, EVALUE 4.50e+00
VDCALSLIRLGMERNIPGLLVLCDNLVTLETLVYEARCDVTLTLKELQQMKDIEKL

SEQ ID NO: 48113 - protein, 47 aa, Homo sapiens
  MAP TO AC007738.1; EXPRESSED IN LUNG, SIGNAL = 2.2; EST_HUMAN HIT: BE070016.1, EVALUE 1.00e-03; SWISSPROT HIT: P52867, EVALUE 7.00e-01
LLLLFNFRWTVHCHLFDLGWSGIFLVCWFSVTIWLLWKHWFMKPGVM

SEQ ID NO: 48114 - protein, 21 aa, Homo sapiens
  MAP TO AC009474.1; EXPRESSED IN LUNG, SIGNAL = 2.6; EST_HUMAN HIT: AW191995.1, EVALUE 1.10e-02
HYFYSLLYWRFNPEQLGKTKK

SEQ ID NO: 48115 - protein, 46 aa, Homo sapiens
  MAP TO AC006323.3; EXPRESSED IN HBL100, SIGNAL = 0.97; EXPRESSED IN LUNG, SIGNAL = 4.1; EXPRESSED IN HELA, SIGNAL = 0.91; EST_HUMAN HIT: AU131123.1, EVALUE 2.00e-17; SWISSPROT HIT: Q61188, EVALUE 2.00e-18
VEDETVLHNIPYMGDEVLDQDGTFIEELIKNYDGKVHGDRGEPYAS

SEQ ID NO: 48116 - protein, 39 aa, Homo sapiens [sequence omitted]

SEQ ID NO: 48117 - protein, 98 aa, Homo sapiens
  MAP TO AC007320.2; EXPRESSED IN LUNG, SIGNAL = 1.5; EXPRESSED IN PLACENTA, SIGNAL = 0.79; SWISSPROT HIT: P38159, EVALUE 4.00e-14; EST_HUMAN HIT: AI220048.1, EVALUE 9.00e-16
TSHGAPPARGPRMSYGGSTCHAYSNTRDRYGRSWESYSSCGDFHYCDREHVCRKDQRNPPSLGRVLPDPREAYGSSSYVASIVDGGESRSEKGDSSRY

SEQ ID NO: 48118 - protein, 42 aa, Homo sapiens
  MAP TO AC010850.2; EXPRESSED IN HBL100, SIGNAL = 1.2; EXPRESSED IN LUNG, SIGNAL = 0.89; EST_HUMAN HIT: BF575401.1, EVALUE 5.40e+00
LQVMLPSEGKALWDGSAPLTWVCSPRAVEQCRILAPLLRLLW

SEQ ID NO: 48119 - protein, 34 aa, Homo sapiens; identical to SEQ ID NO: 36696
  MAP TO AC010130.2; EXPRESSED IN LUNG, SIGNAL =   3

SEQ ID NO: 48120 - protein, 37 aa, Homo sapiens
  MAP TO AC010087.2; EXPRESSED IN LUNG, SIGNAL = 0.89; EST_HUMAN HIT: AI345388.1, EVALUE 1.30e-02; SWISSPROT HIT: P38650, EVALUE 6.00e-03
MVKDAMKSGNWVFLQNCHLAVSWMLAMEELIKTFTDP

SEQ ID NO: 48121 - protein, 86 aa, Homo sapiens
  MAP TO AL031283.15; EXPRESSED IN LUNG, SIGNAL = 2.2; EST_HUMAN HIT: AI285302.1, EVALUE 1.00e-43; SWISSPROT HIT: P35978, EVALUE 4.20e-02
YLDMSKTLGSLMNIKNMSGHVSMKYLSRQEREKVNQLRQRDLDLVFDKITQLKNQLGRKEELLRGYEKDVEQLRYLGTPMSPQKGP

SEQ ID NO: 48122 - protein, 33 aa, Homo sapiens; identical to SEQ ID NO: 37147
  MAP TO AL034344.19; EXPRESSED IN LUNG, SIGNAL = 2.3

SEQ ID NO: 48123 - protein, 63 aa, Homo sapiens
  MAP TO AF179633.1; EXPRESSED IN HBL100, SIGNAL = 1.3; EXPRESSED IN LUNG, SIGNAL = 1.3; SWISSPROT HIT: Q22851, EVALUE 3.30e+00
LGLVLLDFVEGEGLRKYSQLEKGAFCYVLSSLKVVNDEKGWVNDKKSGEDETDKTATHLHGTL

SEQ ID NO: 48124 - protein, 51 aa, Homo sapiens [sequence omitted]

SEQ ID NO: 48125 - protein, 40 aa, Homo sapiens
  MAP TO AL109935.20; EXPRESSED IN LUNG, SIGNAL = 0.96; SWISSPROT HIT: Q10003, EVALUE 2.00e-03; EST_HUMAN HIT: AA620709.1, EVALUE 2.00e-17
SYIQEAKAKGLVIFCWGDDTNDPENRRKLKELGVNGLIYD

SEQ ID NO: 48126 - protein, 34 aa, Homo sapiens
  MAP TO AC005375.4; EXPRESSED IN LUNG, SIGNAL = 1.7
SVNSEERELKNKLYLQNIWVTTFSANLYSAKKEI

SEQ ID NO: 48127 - protein, 618 aa, Homo sapiens
  MAP TO AC005083.1; EXPRESSED IN BT474, SIGNAL = 1.3; EXPRESSED IN LUNG, SIGNAL =   1; EST_HUMAN HIT: BF334738.1, EVALUE 1.00e-54; SWISSPROT HIT: Q13813, EVALUE 6.70e-01
EIENGNSFDSSGDELDVHQLLRQTSSRNSGRSKSVSELLDILDDTAHAHQSIHNSDQILLHDLEWLKNDREAYKMAWLSQRQLARSCLDLNTISQSPGWAQTQLAEVTIACKVNHQGGSVQLPESDITVHVPQGHVAVGEFQEVSLRAFLDPPHMLNHDLSCTVSPLLEIMLGNLNTMEALLLEMKIGAEVRKDPFSQVMTEMVCLHSLGKEGPFKVLSNCYIYKDTIQVKLIDLSQVMYLVVAAQAKALPSPAATIWDYIHKTTSIGIYGPKYIHPSFTVVLTVCGHNYMPGQLTISDIKKGGKNISPVVFQLWGKQSFLLDKPQDLSISIFSCDPDFEVKTEGERKEIKQKQLEAGEVVHQQFLFSLVEHREMHLFDFCVQVEPPNGEPVAQFSITTPDPTPNLKRLSNLPGYLQKKEEIKSAPLSPKILVKYPTFQDKTLNFSNYGVTLKAVLRQSKIDYFLEYFKGDTIALLGEGKVKAIGQSKVKEWYVGVLRGKIGLVHCKNVKVISKEQVMFMSDSVFTTRNLLEQIVLPLKKLTYIYSVVLTLVSEKVYDWKVLADVLGYSHLSLEDFDQIQADKESEKVSYVIKKLKEDCHTERNTRKFLYELIVVSIA

SEQ ID NO: 48128 - protein, 46 aa, Homo sapiens
  MAP TO AL035705.14; EXPRESSED IN LUNG, SIGNAL = 3.2; EST_HUMAN HIT: AW970672.1, EVALUE 2.00e-18; SWISSPROT HIT: Q28948, EVALUE 1.00e-20
GEHQLTGHKVAVKILNRQKIRSLDVVGKIKREIQNLKLFRHPHIIK

SEQ ID NO: 48129 - protein, 25 aa, Homo sapiens
  MAP TO AC007392.3; EXPRESSED IN LUNG, SIGNAL = 0.71; SWISSPROT HIT: P97367, EVALUE 1.00e-08; EST_HUMAN HIT: BE697254.1, EVALUE 2.00e-07
HPYPSEEQKKQLAQDTGLTILQVNN

SEQ ID NO: 48130 - protein, 83 aa, Homo sapiens
  MAP TO AL021068.1; EXPRESSED IN LUNG, SIGNAL = 1.7; EST_HUMAN HIT: BE972461.1, EVALUE 4.00e-32; SWISSPROT HIT: Q09309, EVALUE 4.70e-02
MACEKEENINQDLKENETVMEHTKRHSDPDKSLQDEVSPRRNDIISVPGIQPLDPISDSDSENSFQESKLESQKDLEEEEDEE

SEQ ID NO: 48131 - protein, 27 aa, Homo sapiens
  MAP TO AL080313.13; EXPRESSED IN LUNG, SIGNAL = 2.7; EXPRESSED IN BT474, SIGNAL =   1; EXPRESSED IN HBL100, SIGNAL = 0.95
LKMEMSKLRVWVICILWIKATAFAYLK

SEQ ID NO: 48132 - protein, 34 aa, Homo sapiens; identical to SEQ ID NO: 37860
  MAP TO AL080274.10; EXPRESSED IN LUNG, SIGNAL = 3.2

SEQ ID NO: 48133 - protein, 23 aa, Homo sapiens
  MAP TO AP000428.1; EXPRESSED IN LUNG, SIGNAL = 2.8
MAIGAESRPKVRMQGLIRLLMAC

SEQ ID NO: 48134 - protein, 37 aa, Homo sapiens
  MAP TO X97051.1; EXPRESSED IN HBL100, SIGNAL = 0.98; EXPRESSED IN LUNG, SIGNAL = 4.3; EST_HUMAN HIT: R05859.1, EVALUE 2.20e+00
FVAVSMESGEEEPVKLCSPKAFSFSAVARTNACSRLT

SEQ ID NO: 48135 - protein, 45 aa, Homo sapiens
  MAP TO AC004998.2; EXPRESSED IN LUNG, SIGNAL = 2.6
SMIAFKTSSLANMRAVRTSRLAFTRGARLDLELLKTSHLEAIFTI

SEQ ID NO: 48136 - protein, 137 aa, Homo sapiens
  MAP TO AL078615.2; EXPRESSED IN LUNG, SIGNAL = 9.8; SWISSPROT HIT: P57052, EVALUE 5.00e-67; EST_HUMAN HIT: D61628.1, EVALUE 1.00e-53
QWHVYNPVLQLPYYEMTAPLPNSASVSSSLNHVPDLEAGPSSYKWTHQQPSDSDLYQMTAPLPNSASVSSSLNHVPDLEAGPSSYKWTHQQPSDSDLYQMNKRKRQKQTSDSDSSTDNNRGNECSQKFRKSKKKKRY

SEQ ID NO: 48137 - protein, 46 aa, Homo sapiens
  MAP TO AC010727.1; EXPRESSED IN LUNG, SIGNAL = 1.2; EST_HUMAN HIT: N50107.1, EVALUE 1.00e-03
LALCYLIFPYLLVGREKIDYFKELAHVIVGANKSDICRAVQQTGHS

SEQ ID NO: 48138 - protein, 26 aa, Homo sapiens
  MAP TO AC010727.1; EXPRESSED IN LUNG, SIGNAL = 1.2; SWISSPROT HIT: Q36090, EVALUE 3.70e+00
LPCAILFSPTSWWEERKLIILRNWLM

SEQ ID NO: 48139 - protein, 147 aa, Homo sapiens
  MAP TO AC009396.3; EXPRESSED IN LUNG, SIGNAL = 3.3; EST_HUMAN HIT: BE796798.1, EVALUE 2.00e-53; SWISSPROT HIT: Q21313, EVALUE 1.00e-04
VVYKNNDIRLELSRLARIADTKMKIYGEVVFKCENVATLDPINFETPEAYISLPKWNTKRMGSISFDFRTTEPNGLILFTHGKPQERKDARSQKNTKVDFFAVELLDGNLYLLLDMGSGTIKVKATQKKANDGEWYHVDIQRDGRSG

SEQ ID NO: 48140 - protein, 78 aa, Homo sapiens
  MAP TO AL109798.8; EXPRESSED IN LUNG, SIGNAL = 0.91; EST_HUMAN HIT: AU130923.1, EVALUE 4.00e-31; SWISSPROT HIT: P20831, EVALUE 3.70e-01
SQIPPVNDFKVGMKLEARDPRNATSVCIATVIGITGARLRLRLDGSDNRNDFWRLVDSPDIQPVGTCEKEGDLLQPPL

SEQ ID NO: 48141 - protein, 66 aa, Homo sapiens
  MAP TO AC010134.1; EXPRESSED IN LUNG, SIGNAL = 5.5; EST_HUMAN HIT: BE468088.1, EVALUE 3.80e-02; SWISSPROT HIT: P35531, EVALUE 3.00e+00
HWNTGGSHPEELERPGAHPRLKARPQPPLFHPFISSEPQFTDCVALSEHSIPGDQIALQMNIIMKN

SEQ ID NO: 48142 - protein, 55 aa, Homo sapiens
  MAP TO AC004838.2; EXPRESSED IN LUNG, SIGNAL = 7.7; EST_HUMAN HIT: AA805722.1, EVALUE 2.80e-01; SWISSPROT HIT: Q01277, EVALUE 3.40e+00
TPVFLQNSLCGSLTGRQLKKWKCSLRSPRPTKTRKNTRVCLKLSDNGLKTSTYDK

SEQ ID NO: 48143 - protein, 46 aa, Homo sapiens [sequence omitted]

SEQ ID NO: 48144 - protein, 123 aa, Homo sapiens
  MAP TO AC006042.2; EXPRESSED IN LUNG, SIGNAL =  11; SWISSPROT HIT: Q9ZCW8, EVALUE 3.20e+00
FEEGSPLADAIGATLKINLGSSSLSLSNLSHWQVWLICVGSASVNARDTPSTCSIFVFVKCQSIEIMVFYINEENRMTIGPEFKLFFSLSCTLFTVILDEPHIKNINEKYGAILLEALPKSLL

SEQ ID NO: 48145 - protein, 99 aa, Homo sapiens
  MAP TO AC010722.1; EXPRESSED IN LUNG, SIGNAL = 2.7; SWISSPROT HIT: P57615, EVALUE 1.30e+00; EST_HUMAN HIT: BF359536.1, EVALUE 2.00e-04
CVVFHSGAQEKNYTIREEIPENVLIGNLLKDLNLSLIPNKSLTTTMQFKLVYKTGDVPLIRIEEDTGEIFTTGARIDREKLCAGIPRDEHCFYEVEVAI

SEQ ID NO: 48146 - protein, 19 aa, Homo sapiens
  MAP TO AC010722.1; EXPRESSED IN LUNG, SIGNAL = 2.7
IQQTVTSVCCPGRTFSRSC

SEQ ID NO: 48147 - protein, 41 aa, Homo sapiens
  MAP TO AC009483.2; EXPRESSED IN LUNG, SIGNAL = 1.5
GFFHAAREVVLAPSTSHMSISQPQKIEENSHYLHNNAENNN

SEQ ID NO: 48148 - protein, 26 aa, Homo sapiens
  MAP TO AC009483.2; EXPRESSED IN LUNG, SIGNAL = 1.5; EST_HUMAN HIT: AW901609.1, EVALUE 6.10e+00; SWISSPROT HIT: P24380, EVALUE 3.70e+00
MAFSMLPGRWCWHPQLHTCQFLNPRR

SEQ ID NO: 48149 - protein, 24 aa, Homo sapiens
  MAP TO AC009226.2; EXPRESSED IN LUNG, SIGNAL =   3
MLHGYKILVWTYKVQKKKLKPREV

SEQ ID NO: 48150 - protein, 34 aa, Homo sapiens
  MAP TO AC009957.2; EXPRESSED IN LUNG, SIGNAL = 1.3
FLDKTPKMDLVLKFPVKKVFVSTKFLRIILKQEE

SEQ ID NO: 48151 - protein, 21 aa, Homo sapiens
  MAP TO AC010137.1; EXPRESSED IN LUNG, SIGNAL = 1.7
TFSFYFADHKTGYCFQMYLRK

SEQ ID NO: 48152 - protein, 42 aa, Homo sapiens
  MAP TO NM_006902.1; EXPRESSED IN LUNG, SIGNAL = 0.9
EKIDKYETDDDIVQMNKYFYCLHNHAQNPCLFIGILEDFVVG

SEQ ID NO: 48153 - protein, 58 aa, Homo sapiens
  MAP TO AH007965.1; EXPRESSED IN LUNG, SIGNAL = 0.66; EST_HUMAN HIT: BE932231.1, EVALUE 2.00e-18
VRKILDLVQSKGEEVSEFFLYLLQQLADAYVDLRPWLLEIGFSPSLLTQSKVVVNTDP

SEQ ID NO: 48154 - protein, 58 aa, Homo sapiens
  MAP TO AH007965.1; EXPRESSED IN LUNG, SIGNAL = 0.66; EST_HUMAN HIT: BE932231.1, EVALUE 5.00e-15; SWISSPROT HIT: Q91987, EVALUE 9.70e-01
FWTWYRARARRCPSSSSTCSSNSQMPTWTSGLGCWRSASPLPCSLRAKSWSTLTQVGV

SEQ ID NO: 48155 - protein, 119 aa, Homo sapiens
  MAP TO AL033378.7; EXPRESSED IN LUNG, SIGNAL = 1.1; SWISSPROT HIT: O65992, EVALUE 2.10e+00; EST_HUMAN HIT: AU141284.1, EVALUE 4.00e-25
GEEHVFENSPVLDERSALYSGVHKKPLFFDGSPEKPPEDDSDSLTTSPSSSSLDTWGAGRKLVKTFSKGESRGLIKPPKKMGTFFSYPEEEKAQKVSRSLTEGEMKKGLGSLSHGVSTD

SEQ ID NO: 48156 - protein, 57 aa, Homo sapiens
  MAP TO AC007678.1; EXPRESSED IN LUNG, SIGNAL =   8; EST_HUMAN HIT: T78159.1, EVALUE 5.00e-09; SWISSPROT HIT: Q27152, EVALUE 7.70e+00
PPVFLFCRSEDSTAKIWNLNENGNRASTQLMLRHRIPEGAMTSQVTKMSDVISLDWN

SEQ ID NO: 48157 - protein, 18 aa, Homo sapiens
  MAP TO AC007678.1; EXPRESSED IN LUNG, SIGNAL =   8
LLCFYSADLKTQLQRYGT

SEQ ID NO: 48158 - protein, 27 aa, Homo sapiens
  MAP TO AC009185.2; EXPRESSED IN LUNG, SIGNAL =   5; SWISSPROT HIT: Q08881, EVALUE 8.00e-09; EST_HUMAN HIT: BE378187.1, EVALUE 7.20e-02
GKEGAFMVRDSRTAGTYTVSVFTKAVV

SEQ ID NO: 48159 - protein, 33 aa, Homo sapiens
  MAP TO AC009303.1; EXPRESSED IN LUNG, SIGNAL = 3.7; EST_HUMAN HIT: AI902949.1, EVALUE 6.00e-11
WLVKRAIETKEEMGDYIRSYSVSQFQKTYSLPE

SEQ ID NO: 48160 - protein, 89 aa, Homo sapiens
  MAP TO AC009892.1; EXPRESSED IN LUNG, SIGNAL = 1.1; SWISSPROT HIT: P43629, EVALUE 2.00e-15; EST_HUMAN HIT: AU120189.1, EVALUE 3.00e-14
SLVHAGARVSLRCHSELAFDEFILYKEGHIQHSQQLDQGMEAGIHYVEAVFSMGPVTPAHAGAYRCCGCFSHSRYEWSAPSDPLDIVIT

SEQ ID NO: 48161 - protein, 30 aa, Homo sapiens
  MAP TO AC010170.3; EXPRESSED IN LUNG, SIGNAL = 1.6
TLVNVSSTMTILVDIVSSIMAFLIDITPFK

SEQ ID NO: 48162 - protein, 18 aa, Homo sapiens
  MAP TO AC009925.2; EXPRESSED IN LUNG, SIGNAL = 3.8
PCQHEAVKSSHCPYPNSS

SEQ ID NO: 48163 - protein, 60 aa, Homo sapiens
  MAP TO AC009957.2; EXPRESSED IN LUNG, SIGNAL =  14; SWISSPROT HIT: P39542, EVALUE 5.80e+00
PSPVPETKEFALSMLLSYCVLGFLLDIVSFDDKPSDVDDVKTWENSGYLCSIITCFTGKK

SEQ ID NO: 48164 - protein, 109 aa, Homo sapiens; identical to SEQ ID NO: 45882
  MAP TO AC010731.1; EXPRESSED IN LUNG, SIGNAL =  12; EST_HUMAN HIT: AI221878.1, EVALUE 4.00e-33; SWISSPROT HIT: P14152, EVALUE 8.00e-03

SEQ ID NO: 48165 - protein, 35 aa, Homo sapiens
  MAP TO AC009890.1; EXPRESSED IN LUNG, SIGNAL = 2.4
MATTSLQKELIDPSCGMAQRGYRKHGISEHHLGKE

SEQ ID NO: 48166 - protein, 18 aa, Homo sapiens
  MAP TO AC011229.1; EXPRESSED IN LUNG, SIGNAL = 1.1
SLAHLKLSQPPARSYMNL

SEQ ID NO: 48167 - protein, 24 aa, Homo sapiens
  MAP TO AC011403.1; EXPRESSED IN LUNG, SIGNAL = 1.5
TRKEIPENEVQTSQVKHYKATSKW

SEQ ID NO: 48168 - protein, 58 aa, Homo sapiens
  MAP TO AC011459.1; EXPRESSED IN LUNG, SIGNAL = 5.9; SWISSPROT HIT: P21415, EVALUE 1.20e+00
RMKKISCFSVDLPSLWKTSLELLKVNLQRLLMKKAKNQRETGSWIQSCLKTQPWMYQL

SEQ ID NO: 48169 - protein, 88 aa, Homo sapiens
  MAP TO AL035089.18; EXPRESSED IN LUNG, SIGNAL = 3.4; EST_HUMAN HIT: AA158253.1, EVALUE 5.70e-02; SWISSPROT HIT: P50529, EVALUE 7.20e-01
PELEQATKFTDVIPAGERLCSDRCVDRNGSGGQGVPMGVTQGPQGLGVEAAGGKKGCRKTSRMGTLPNEVSEMTRSRLSKAEFFSQKT

SEQ ID NO: 48170 - protein, 35 aa, Homo sapiens
  MAP TO AF186998.1; EXPRESSED IN LUNG, SIGNAL =  11; EST_HUMAN HIT: BF529612.1, EVALUE 3.00e-07
DGKLSFEEFKAYFADGVLSGEELHELFHTIDTHNT

SEQ ID NO: 48171 - protein, 28 aa, Homo sapiens
  MAP TO AF186997.2; EXPRESSED IN LUNG, SIGNAL = 0.94
GMHSELPVALGPVHTKKLERMRPCQNRG

SEQ ID NO: 48172 - protein, 34 aa, Homo sapiens; identical to SEQ ID NO: 41510
  MAP TO AL118523.9; EXPRESSED IN LUNG, SIGNAL = 1.9

SEQ ID NO: 48173 - protein, 63 aa, Homo sapiens
  MAP TO AC007077.2; EXPRESSED IN LUNG, SIGNAL = 0.68; EXPRESSED IN HELA, SIGNAL = 0.73; SWISSPROT HIT: O53307, EVALUE 2.20e-01; EST_HUMAN HIT: BF697162.1, EVALUE 1.20e+00
GKRKIGIHKSRQHKAGNSWLCQLHLAPIKDWLPSLAMAGGRDRQKPTSPRLASSGGRRWRKER

SEQ ID NO: 48174 - protein, 196 aa, Homo sapiens
  MAP TO AL021997.1; EXPRESSED IN LUNG, SIGNAL = 1.1; EST_HUMAN HIT: AU141046.1, EVALUE 2.00e-57; SWISSPROT HIT: Q15776, EVALUE 2.00e-57
GESIPENQELASKQEILKEMEHLGDSKLQRDVSLDSKYRETCKRDSKAEKQQAHSTGERRHRCNECGKSFTKSSVLIEHQRIHTGEKPYECEECGKAFSRRSSLNEHRRSHTGEKPYQCKECGKAFSASNGLTRHRRIHTGEKPYECKVCGKAFLLSSCLVQHQRIHTGEKRYQCRECGKAFIQNAGLFQHLRVHT

SEQ ID NO: 48175 - protein, 50 aa, Homo sapiens
  MAP TO AL021997.1; EXPRESSED IN LUNG, SIGNAL = 1.1; EST_HUMAN HIT: AA701913.1, EVALUE 2.00e-21; SWISSPROT HIT: Q03460, EVALUE 6.00e+00
IPLERDATGAMNVGKASLRVQYSLSTRESTLGRSHMNVKNVGRPSAGGQA

SEQ ID NO: 48176 - protein, 29 aa, Homo sapiens
  MAP TO AL022238.1; EXPRESSED IN LUNG, SIGNAL = 1.2; EXPRESSED IN HELA, SIGNAL = 1.5
RYSESDLQDTETQWWSLRDKAAFEDDRRD

SEQ ID NO: 48177 - protein, 44 aa, Homo sapiens; identical to SEQ ID NO: 46951
  MAP TO AC006548.19; EXPRESSED IN LUNG, SIGNAL = 6.3; EXPRESSED IN BONE MARROW, SIGNAL =  14; SWISSPROT HIT: P02467, EVALUE 3.70e+00

SEQ ID NO: 48178 - protein, 48 aa, Homo sapiens
  MAP TO AL022312.7; EXPRESSED IN HELA, SIGNAL = 1.4; EXPRESSED IN LUNG, SIGNAL = 1.6; EST_HUMAN HIT: AW608306.1, EVALUE 2.00e-09
MAGAGERKGKKDDNGIGTAIDFVLSNARLVLGVGGAAMLGIATLAVKR

SEQ ID NO: 48179 - protein, 35 aa, Homo sapiens
  MAP TO Z95114.19; EXPRESSED IN HELA, SIGNAL = 1.3; EXPRESSED IN LUNG, SIGNAL = 1.2
MGSSLSSLSLLAPAQVSSSGSLSCCQYRSALGSTQ

SEQ ID NO: 48180 - protein, 73 aa, Homo sapiens
  MAP TO Z95114.19; EXPRESSED IN LUNG, SIGNAL = 1.3; SWISSPROT HIT: Q39190, EVALUE 7.10e+00
ELRPQQPTLDSMKALGFCAKSNRKPLKTWKPVFDEICVFMGQLGPMWRKSWPSGKGCVSAKTILEAFAGVWAK

SEQ ID NO: 48181 - protein, 32 aa, Homo sapiens
  MAP TO AB016897.1; EXPRESSED IN LUNG, SIGNAL = 1.4; EST_HUMAN HIT: BE896526.1, EVALUE 4.50e+00
GFRTKEEHDETDILGGFIWVWCAGWIRRTWDE

SEQ ID NO: 48182 - protein, 104 aa, Homo sapiens
  MAP TO AL031587.3; EXPRESSED IN PLACENTA, SIGNAL = 1.2; EXPRESSED IN LUNG, SIGNAL = 1.3; SWISSPROT HIT: P98167, EVALUE 2.80e+00
MAAAAGQRAGLDAVSLSRPFLCFRLFLLTASFRQYLFSFLVPSVPGAGKGRIVCRDWSKYPVGGKPGLPRLAGSDVTIAATARWNGRWVQVPAWPGPGCGTNAS

SEQ ID NO: 48183 - protein, 36 aa, Homo sapiens
  MAP TO AP000356.1; EXPRESSED IN PLACENTA, SIGNAL = 1.4; EXPRESSED IN LUNG, SIGNAL = 1.6; SWISSPROT HIT: P11274, EVALUE 2.00e-13
IEVKLSVKFNSREFSLKRMPSRKQTGVFGVKIAVVT

SEQ ID NO: 48184 - protein, 18 aa, Homo sapiens
  MAP TO AL022238.1; EXPRESSED IN LUNG, SIGNAL = 1.2; EST_HUMAN HIT: AL121033.1, EVALUE 3.70e-02
PFTEAGATREEWQVCNGE

SEQ ID NO: 48185 - protein, 30 aa, Homo sapiens
  MAP TO Z98884.11; EXPRESSED IN LUNG, SIGNAL = 2.8; SWISSPROT HIT: O70361, EVALUE 2.00e-04
GSSGSQEQLVSIASSSEASGHRVEETKAEQ

SEQ ID NO: 48186 - protein, 62 aa, Homo sapiens
  MAP TO AB016897.1; EXPRESSED IN LUNG, SIGNAL = 1.3; EXPRESSED IN PLACENTA, SIGNAL = 1.3; SWISSPROT HIT: P55196, EVALUE 9.00e-33
RRGSGKPRPKSEGFELYNNSTQNGSPESPQLPWAEYSEPKKLPGDDRLMKNRADHRSSPNVA

SEQ ID NO: 48187 - protein, 31 aa, Homo sapiens
  MAP TO AL021707.2; EXPRESSED IN PLACENTA, SIGNAL = 1.3; EXPRESSED IN HELA, SIGNAL = 1.5; EXPRESSED IN LUNG, SIGNAL = 1.2
AVSHGRFVGVLPGAAPMIQIWPCLLSMAHNS

SEQ ID NO: 48188 - protein, 38 aa, Homo sapiens
  MAP TO AC005668.1; EXPRESSED IN LUNG, SIGNAL = 0.41
EKFSKHKAMGKIVKKKTYRSDENIFKLLYLKRIISKTE

SEQ ID NO: 48189 - protein, 40 aa, Homo sapiens
  MAP TO AC005908.1; EXPRESSED IN LUNG, SIGNAL = 0.49; EXPRESSED IN BONE MARROW, SIGNAL = 0.51
FIECSLSVRDSSINWDYSTEEPDAASIYRAFILWGKQTIS

SEQ ID NO: 48190 - protein, 72 aa, Homo sapiens
  MAP TO AC000059.1; EXPRESSED IN LUNG, SIGNAL = 0.44; EST_HUMAN HIT: BE244210.1, EVALUE 5.00e-36; SWISSPROT HIT: Q9ZDL9, EVALUE 8.70e-01
ICVTKMSTRNCQGMDSVIKPLDTIPEDKKVRVQRTQSTFDPFEKPANQVKRVHSENNACINFKTSSTGKESP

SEQ ID NO: 48191 - protein, 26 aa, Homo sapiens
  MAP TO AC004049.1; EXPRESSED IN LUNG, SIGNAL = 0.48; EXPRESSED IN BONE MARROW, SIGNAL = 0.52; EST_HUMAN HIT: AL049107.1, EVALUE 7.00e-05
SSGQSPSGCPWRPSACPAWLDHLPVQ

SEQ ID NO: 48192 - protein, 63 aa, Homo sapiens
  MAP TO AC003070.1; EXPRESSED IN LUNG, SIGNAL =  70; SWISSPROT HIT: P30337, EVALUE 2.00e-04
HPCHRVIEHGEQNRMSVQSVAIVFGPTLLRPEVEETSMPMTMVFQNQVVELILQQCADIFPPH

SEQ ID NO: 48193 - protein, 30 aa, Homo sapiens
  MAP TO AC006084.1; EXPRESSED IN LUNG, SIGNAL = 0.44
KKWKERLEKKYYSMEIQDDYQPVTQEEFRE

SEQ ID NO: 48194 - protein, 18 aa, Homo sapiens
  MAP TO AC004544.1; EXPRESSED IN LUNG, SIGNAL = 0.51
SSLRLTLLLHKTKMITTP

SEQ ID NO: 48195 - protein, 110 aa, Homo sapiens
  MAP TO AC004527.2; EXPRESSED IN LUNG, SIGNAL = 0.51; SWISSPROT HIT: P46901, EVALUE 3.60e-02
SLSSYTILFMQFDDLTAEKEAVSSKCVDLAKDNQVLQQELLSMKKVQQQCEKLEKDKKMLEEEILNLKTHMEDNMVELSKLQEYKSELDERAMTAVEKLEEIHLQVSFLN

SEQ ID NO: 48196 - protein, 94 aa, Homo sapiens
  MAP TO AC001226.1; EXPRESSED IN LUNG, SIGNAL = 0.41; SWISSPROT HIT: P32790, EVALUE 1.50e+00
VTSLLRRVLPEVTPSRLASIIGVKSLPPADISDIIHSTEKGDWNKLGILDMFLGCIAKALTVQLKAKGTTITGTAGTTVGKGVTTVTLPMIFNS

SEQ ID NO: 48197 - protein, 32 aa, Homo sapiens
  MAP TO AC004027.1; EXPRESSED IN LUNG, SIGNAL = 0.45; SWISSPROT HIT: O17580, EVALUE 8.50e+00
EMTVPCLLLPLKTFQWDKMWKWKILILMTLTL

SEQ ID NO: 48198 - protein, 36 aa, Homo sapiens
  MAP TO AC004027.1; EXPRESSED IN LUNG, SIGNAL = 0.45
HFHILSHWKVFRGNNKHGTVISYENNALGLFTTASP

SEQ ID NO: 48199 - protein, 20 aa, Homo sapiens
  MAP TO AC002980.1; EXPRESSED IN LUNG, SIGNAL = 0.45; EXPRESSED IN BONE MARROW, SIGNAL = 0.64
QEDINSSSIWSKPILRHTTA

SEQ ID NO: 48200 - protein, 31 aa, Homo sapiens
  MAP TO AC003036.1; EXPRESSED IN LUNG, SIGNAL = 0.42; EXPRESSED IN BONE MARROW, SIGNAL = 0.56
ESAMSDFSHCHNFFRYNICKGSFSNTLFRVN

SEQ ID NO: 48201 - protein, 31 aa, Homo sapiens
  MAP TO AC003036.1; EXPRESSED IN LUNG, SIGNAL = 0.42; EXPRESSED IN BONE MARROW, SIGNAL = 0.56
SQPCQISLTVIISSVTIFAKAVSVTPFSGLT

SEQ ID NO: 48202 - protein, 65 aa, Homo sapiens
  MAP TO AC005730.1; EXPRESSED IN BONE MARROW, SIGNAL = 0.56; EXPRESSED IN LUNG, SIGNAL = 0.43; SWISSPROT HIT: P41180, EVALUE 6.80e-01
RTNSTQNHLLLSQECDSAHSLRLEMARAGTHQVSMETQESSSTLTVASRNSPASPLKELSGKLMK

SEQ ID NO: 48203 - protein, 18 aa, Homo sapiens
  MAP TO AC004033.3; EXPRESSED IN LUNG, SIGNAL = 0.44; EST_HUMAN HIT: AW500833.1, EVALUE 2.20e-02
SKSSKDMESHVFLKAKTR

SEQ ID NO: 48204 - protein, 68 aa, Homo sapiens
  MAP TO AC002490.1; EXPRESSED IN LUNG, SIGNAL = 0.48; EST_HUMAN HIT: BF313777.1, EVALUE 8.40e-01; SWISSPROT HIT: P04258, EVALUE 4.40e+00
  unsure 36
  unsure 53
  unsure 55
  unsure 60
  unsure 61
  unsure 62
KSPTSSLQGVPASGTIISGASSWTSGSSAIPQTRRXEVPGIRGAGTPRWPWSXGXPDGPXXXSMTGRK

SEQ ID NO: 48205 - protein, 38 aa, Homo sapiens
  MAP TO AC005589.1; EXPRESSED IN LUNG, SIGNAL = 0.42
TLQLTDQMTFMGINIKAHELSIKEHQENANKTDDGNGV

SEQ ID NO: 48206 - protein, 54 aa, Homo sapiens
  MAP TO AC005191.1; EXPRESSED IN LUNG, SIGNAL = 0.43; SWISSPROT HIT: Q9UL62, EVALUE 2.00e-13
ALLIAIENENLEIMELLLNHSVYVGDALLYAIRKEVVGAVELLLSYRRPSGEKQ

SEQ ID NO: 48207 - protein, 116 aa, Homo sapiens
  MAP TO AC003958.1; EXPRESSED IN LUNG, SIGNAL = 0.49; EXPRESSED IN BONE MARROW, SIGNAL = 0.5; SWISSPROT HIT: O76011, EVALUE 1.00e-54; EST_HUMAN HIT: BF569905.1, EVALUE 1.00e-49
MSYSCCLPSLGCRTSCSSRPCVPPSCHGYTLPGACNIPANVSNCNWFCEGSFNGSEKETMQFLNDRLASYLEKVRQLERDNAELEKLIQERSQQQEPLLCPSYQSYFKTIEELQQK

SEQ ID NO: 48208 - protein, 70 aa, Homo sapiens
  MAP TO AC004041.1; EXPRESSED IN LUNG, SIGNAL = 0.41; EXPRESSED IN BONE MARROW, SIGNAL = 0.52; EST_HUMAN HIT: AW813884.1, EVALUE 1.00e-20; SWISSPROT HIT: P12753, EVALUE 1.10e+00
YSQFITQLTDENQSCCPVCQRVFQTEAELQEVISDLQSKLRLAPDKLKSTESELKKKEKRRDEMLGLVPM

SEQ ID NO: 48209 - protein, 27 aa, Homo sapiens
  MAP TO AC004041.1; EXPRESSED IN LUNG, SIGNAL = 0.41; EXPRESSED IN BONE MARROW, SIGNAL = 0.52; EST_HUMAN HIT: AI587159.1, EVALUE 2.00e-08
LLPVHYSANRRKPVMLPRLSESFSDRG

SEQ ID NO: 48210 - protein, 72 aa, Homo sapiens
  MAP TO AC002093.1; EXPRESSED IN LUNG, SIGNAL = 0.5; EST_HUMAN HIT: BE798126.1, EVALUE 8.00e-16; SWISSPROT HIT: P34369, EVALUE 6.00e-14
SMWIMMRREKRDRRHFKRMRFPPFDDEEPPLDYADNILDVEPLEAIQLELDPEEDAPVLDWFYDHQPLRDSR

SEQ ID NO: 48211 - protein, 17 aa, Homo sapiens
  MAP TO AC002093.1; EXPRESSED IN LUNG, SIGNAL = 0.5
VGRNGCVMSCLPGQCGL

SEQ ID NO: 48212 - protein, 55 aa, Homo sapiens
  MAP TO AC004869.1; EXPRESSED IN LUNG, SIGNAL = 0.53; EST_HUMAN HIT: AV707591.1, EVALUE 4.80e+00
NNHLIKGSVLQIVLSFNEIKFKMIDLVYAFDQLTLKFTYKNNILRIDKTKFKKQS

SEQ ID NO: 48213 - protein, 38 aa, Homo sapiens
  MAP TO AB019437.1; EXPRESSED IN LUNG, SIGNAL = 0.43; EST_HUMAN HIT: AA360289.1, EVALUE 2.00e-05; SWISSPROT HIT: P19181, EVALUE 1.00e-05
LTISRENTKNSLYLQINSFIADTMAVYYCKRHSEEKSV

SEQ ID NO: 48214 - protein, 155 aa, Homo sapiens
  MAP TO AC003071.1; EXPRESSED IN LUNG, SIGNAL = 0.42; EST_HUMAN HIT: T19045.1, EVALUE 1.00e-40; SWISSPROT HIT: P19158, EVALUE 9.60e-02
ECKEGLVCNGAPETENRASEQPPGLSTLQMYPTPNGHCANGEAGRSKDSLSRQLSAMSCSSAHLHSRNLHHKWLHSHSGRPSATSSPDQPSRSHLDDDGMSVYTDTIQQRLRQIESGHQQEVETLKKQVQELKSRLESQYLTSSLHFNGDFGDEV

SEQ ID NO: 48215 - protein, 57 aa, Homo sapiens
  MAP TO AC002466.1; EXPRESSED IN LUNG, SIGNAL = 0.41; SWISSPROT HIT: P77541, EVALUE 1.10e-01
KKMMRVMPREDSSVFNITRSEGAQKQNLEKSFHSMQYRTKIPRKLKYYYYHVSKQES

SEQ ID NO: 48216 - protein, 51 aa, Homo sapiens
  MAP TO AC006151.3; EXPRESSED IN LUNG, SIGNAL = 0.48; EST_HUMAN HIT: AI631520.1, EVALUE 8.00e-22
GLPFIQDDELCSGMQNTALGVGLRTSRFAAGIQKSYLNSLDFSFLTYKYKQ

SEQ ID NO: 48217 - protein, 52 aa, Homo sapiens
  MAP TO AC006151.3; EXPRESSED IN LUNG, SIGNAL = 0.48; EST_HUMAN HIT: AI631520.1, EVALUE 3.00e-24; SWISSPROT HIT: P22272, EVALUE 3.60e+00
WTTIYPRRRIVLWNAEYSTGSWPQDFKICCRHSEELFKFSGLQFSHLQIQTK

SEQ ID NO: 48218 - protein, 80 aa, Homo sapiens
  MAP TO AC005701.1; EXPRESSED IN LUNG, SIGNAL = 0.47; EST_HUMAN HIT: AW205989.1, EVALUE 3.70e+00; SWISSPROT HIT: P23098, EVALUE 1.00e-17
ICDYVTEITSSIHDLEQRIQKTKDNVEEIQNIMKTWVTPIFKTKDGKRESLLSLDDRHDRMEKYYNLIKESGLKIHALVQ

SEQ ID NO: 48219 - protein, 39 aa, Homo sapiens
  MAP TO AC005701.1; EXPRESSED IN LUNG, SIGNAL = 0.47
VSFGEQAFAIMSLKSPVVFMILNKEFRKLKTMWKRSKTS

SEQ ID NO: 48220 - protein, 40 aa, Homo sapiens
  MAP TO AC004468.1; EXPRESSED IN LUNG, SIGNAL = 0.41; EST_HUMAN HIT: AI276756.1, EVALUE 8.30e-01; SWISSPROT HIT: P11532, EVALUE 1.00e-17
QDLLSTLKNKSVTQKTEAWLDNFARCWDNLVQKLEKSTAQ

SEQ ID NO: 48221 - protein, 33 aa, Homo sapiens
  MAP TO AC004820.2; EXPRESSED IN LUNG, SIGNAL = 0.43; EST_HUMAN HIT: W27963.1, EVALUE 2.00e-02; SWISSPROT HIT: Q13563, EVALUE 2.00e-03
NMFLAIINDTYSEVKADYSIGRRPDFELGKMIK

SEQ ID NO: 48222 - protein, 90 aa, Homo sapiens
  MAP TO AB019441.1; EXPRESSED IN BONE MARROW, SIGNAL = 1.8; EXPRESSED IN LUNG, SIGNAL = 0.42; EST_HUMAN HIT: BE295500.1, EVALUE 2.00e-07; SWISSPROT HIT: O93571, EVALUE 2.90e+00
THSVPARWWPVHRWWWLWRSWALPPCAWASLSGSAWAVWLSCFSLEFTDCAILGGIQPCACSTSGPRSCQHVPACPATQCACNLSGDPRE

SEQ ID NO: 48223 - protein, 37 aa, Homo sapiens
  MAP TO AB019441.1; EXPRESSED IN BONE MARROW, SIGNAL = 1.8; EXPRESSED IN LUNG, SIGNAL = 0.42
CSPCLVSLPLLSAPTLCLQGGGPCTGGGGCGGAGLCL

SEQ ID NO: 48224 - protein, 43 aa, Homo sapiens
  MAP TO AC005886.1; EXPRESSED IN LUNG, SIGNAL = 0.44; SWISSPROT HIT: Q06066, EVALUE 4.80e+00; EST_HUMAN HIT: BE785933.1, EVALUE 6.20e-01
KHMEDRSPKREKKHDSDEKKTRSVAGDNQTLPTAASGGFCSMD

SEQ ID NO: 48225 - protein, 53 aa, Homo sapiens
  MAP TO AB001523.1; EXPRESSED IN LUNG, SIGNAL = 0.44; EST_HUMAN HIT: AJ003350.1, EVALUE 1.50e-01
ESGSVFHGAVGGSRRPSSVVMESSGPGPLWLLHESTHVTNAIELDPKNACESC

SEQ ID NO: 48226 - protein, 48 aa, Homo sapiens
  MAP TO AB003151.1; EXPRESSED IN LUNG, SIGNAL = 0.42; EST_HUMAN HIT: BE901934.1, EVALUE 7.80e-01; SWISSPROT HIT: P11474, EVALUE 3.60e+00
RAAAAGSPALPRRFWLPAAPQPCPVSLPQPGGLLRAARERARQQGHCR

SEQ ID NO: 48227 - protein, 48 aa, Homo sapiens
  MAP TO AB003151.1; EXPRESSED IN LUNG, SIGNAL = 0.42; SWISSPROT HIT: P47899, EVALUE 5.50e-01; EST_HUMAN HIT: BE872471.1, EVALUE 2.00e-01
EPLPLVLRLFLGGSGSRPRRSPAQSLSPSPEGSSAPHVSAPANRATAA

SEQ ID NO: 48228 - protein, 79 aa, Homo sapiens
  MAP TO AC006079.1; EXPRESSED IN LUNG, SIGNAL = 0.46; SWISSPROT HIT: P48743, EVALUE 9.70e+00
LTYATFIVLLKEKKYQGKKKCVETLPSPDEEVEKNTISTNLRGRQRKTISAKRVEEGNAIGTVRKYGQVGKRVVERVQK

SEQ ID NO: 48229 - protein, 50 aa, Homo sapiens
  MAP TO AC004547.1; EXPRESSED IN LUNG, SIGNAL = 0.48; EST_HUMAN HIT: AW629172.1, EVALUE 3.00e-17; SWISSPROT HIT: P15433, EVALUE 4.70e+00
DAVNIIYMTTKDLEYYINLIDKAMAGFERIDFSFERSSTVGKMQSNSITC

SEQ ID NO: 48230 - protein, 29 aa, Homo sapiens
  MAP TO AC000389.1; EXPRESSED IN LUNG, SIGNAL = 0.42
CYRVCIMNMKEMFFDDAFMLPTVHHSKYA

SEQ ID NO: 48231 - protein, 44 aa, Homo sapiens
  MAP TO AC006398.1; EXPRESSED IN LUNG, SIGNAL = 0.49; EXPRESSED IN BONE MARROW, SIGNAL = 0.5; EST_HUMAN HIT: AA252623.1, EVALUE 3.00e-04; SWISSPROT HIT: Q9ZD13, EVALUE 4.80e+00
STLIIYDIFKSLLINFLLIMSHIFLLLCMASNCYWMPDIVAFIL

SEQ ID NO: 48232 - protein, 104 aa, Homo sapiens
  MAP TO AC002504.1; EXPRESSED IN LUNG, SIGNAL = 0.42; EST_HUMAN HIT: AW028575.1, EVALUE 6.00e-19; SWISSPROT HIT: O35085, EVALUE 2.00e-29
RRAKWRKREKAGAQTHPPGLPFPGPLSATHPLSPYLDASPFPPHHPALDSAWTAAAAAAAAAFPSLPPPPGSASLPPSGAPLGLSTFLGAAVFRHPAFISPAFG

SEQ ID NO: 48233 - protein, 83 aa, Homo sapiens
  MAP TO AC002504.1; EXPRESSED IN LUNG, SIGNAL = 0.42; EST_HUMAN HIT: AW028575.1, EVALUE 1.00e-03
VGPSGASGRRQARRPTPLGCPSRGRSPPPTRSAPTWTPAPSLRTTRRSTPLGLPLPPPPPPPSRAYLRLRARPACRPAGRRWA

SEQ ID NO: 48234 - protein, 55 aa, Homo sapiens
  MAP TO AC004544.1; EXPRESSED IN LUNG, SIGNAL = 0.46; EST_HUMAN HIT: AW440398.1, EVALUE 3.00e-04
YSHMRNESLSLHFYKNVHSGFSCHSPKLETTHMPINRRVDKQIVVCLYNRMEFIN

SEQ ID NO: 48235 - protein, 88 aa, Homo sapiens
  MAP TO AC006115.1; EXPRESSED IN LUNG, SIGNAL = 0.45; SWISSPROT HIT: P41315, EVALUE 4.00e-05; EST_HUMAN HIT: AW904275.1, EVALUE 2.00e-03
TVGWFPTTAASHHDRTNGAGVSASPNPVSVVIFCLTDSDHGNGNELVPYFFARENIAFIFNTYYLIMVYVFGYTVAMATEEYPDTWMG

SEQ ID NO: 48236 - protein, 34 aa, Homo sapiens
  MAP TO AC005186.1; EXPRESSED IN LUNG, SIGNAL = 0.49; EXPRESSED IN BONE MARROW, SIGNAL = 0.49; EST_HUMAN HIT: AA555305.1, EVALUE 3.90e-01
GSPEKQNQQDVYMEGEKGTDDKECAYAVREPEES

SEQ ID NO: 48237 - protein, 62 aa, Homo sapiens
  MAP TO AC004057.1; EXPRESSED IN LUNG, SIGNAL = 0.54; EXPRESSED IN BONE MARROW, SIGNAL = 0.58; EST_HUMAN HIT: BF677641.1, EVALUE 5.00e-19; SWISSPROT HIT: Q01484, EVALUE 1.00e-29
DGFTPLAVALQQGHNQAVAILLENDTKGKVRLPALHIAARKDDTKSAALLLQNDHNADVQSK

SEQ ID NO: 48238 - protein, 19 aa, Homo sapiens
  MAP TO AC002452.1; EXPRESSED IN BONE MARROW, SIGNAL = 0.53; EXPRESSED IN LUNG, SIGNAL = 0.48
RNLQRVTMCWLCRGSISVQ

SEQ ID NO: 48239 - protein, 22 aa, Homo sapiens
  MAP TO AC005219.1; EXPRESSED IN LUNG, SIGNAL = 0.52
HSSFFVQSQVEQGNPDKEQQKP

SEQ ID NO: 48240 - protein, 61 aa, Homo sapiens
  MAP TO AC005026.1; EXPRESSED IN LUNG, SIGNAL = 0.47; EST_HUMAN HIT: BF204930.1, EVALUE 2.00e-07; SWISSPROT HIT: Q61602, EVALUE 1.00e-17
PRLSARPSRKRTLSISPLSDHSFDLQTMIRTSPNSLVTILNNSRSSSSASGSYGHLSASAI

SEQ ID NO: 48241 - protein, 51 aa, Homo sapiens
  MAP TO AC000120.1; EXPRESSED IN LUNG, SIGNAL = 0.43; EST_HUMAN HIT: AL041469.1, EVALUE 5.00e-23; SWISSPROT HIT: Q06828, EVALUE 2.10e+00
NNLTALPSAIYNIFSLKEINFDDNPLLRPPVEICKGKQLYTIARYLQRADE

SEQ ID NO: 48242 - protein, 56 aa, Homo sapiens
  MAP TO AC000003.1; EXPRESSED IN LUNG, SIGNAL = 0.43; EXPRESSED IN BONE MARROW, SIGNAL = 0.53; EST_HUMAN HIT: AA937006.1, EVALUE 4.90e-02; SWISSPROT HIT: P87115, EVALUE 6.00e+00
CWIAMNQTKMLFSPKFWNSLVICSLLPLTIFQENKNSKLTQEEIENLNRSITFKRI

SEQ ID NO: 48243 - protein, 33 aa, Homo sapiens
  MAP TO AC000003.1; EXPRESSED IN LUNG, SIGNAL = 0.43; EXPRESSED IN BONE MARROW, SIGNAL = 0.53
LDSNESDKDAIFPQVLELPGYLFSPATDNFPGK

SEQ ID NO: 48244 - protein, 28 aa, Homo sapiens
  MAP TO AC004067.1; EXPRESSED IN LUNG, SIGNAL = 0.42; EST_HUMAN HIT: BE910430.1, EVALUE 7.00e-09
STLMDILLMNDFKLVINKIAYDVQCPKR

SEQ ID NO: 48245 - protein, 120 aa, Homo sapiens
  MAP TO AB019439.1; EXPRESSED IN LUNG, SIGNAL = 0.43; EST_HUMAN HIT: AW402332.1, EVALUE 2.00e-38; SWISSPROT HIT: P06331, EVALUE 9.00e-29
VLSQLQLQESGPGLVKPSETLSLTCTVSGGSISSSSYYWGWIRQPPGKGLEWIGSIYYSGSTYYNPSLKSRVTISVDTSKNQFSLKLSSVTAADTAVYYCARHTVRGGECEPRQKPPCRE

SEQ ID NO: 48246 - protein, 54 aa, Homo sapiens
  MAP TO AL137853.3; EXPRESSED IN LUNG, SIGNAL = 0.86; SWISSPROT HIT: Q11102, EVALUE 2.40e-01; EST_HUMAN HIT: BE818331.1, EVALUE 4.00e-17
QQEKESSLKKLLPQAEMFEHLSGKLQQFMENKSRMLASGNQPDQDITHFFQQIQ

SEQ ID NO: 48247 - protein, 114 aa, Homo sapiens
  MAP TO AC023009.3; EXPRESSED IN LUNG, SIGNAL = 8.7; EXPRESSED IN PLACENTA, SIGNAL = 7.3; EST_HUMAN HIT: AU120508.1, EVALUE 1.00e-48; SWISSPROT HIT: P00488, EVALUE 1.00e-49
QEEERLALETALMYGAKKPLNTEGVMKSRSNVDMDFEVENAVLGKDFKLSITFRNNSHNRYTITAYLSANITFYTGVPKAEFKKETFDVTLEPLSCKLTMVWFFLRLAVWPLSC

SEQ ID NO: 48248 - protein, 51 aa, Homo sapiens
  MAP TO AC008850.4; EXPRESSED IN LUNG, SIGNAL = 2.1; EXPRESSED IN PLACENTA, SIGNAL = 4.2; SWISSPROT HIT: Q9X4Q2, EVALUE 8.00e+00
RLQLPRNMIENSMFEEEPDVVDLAKEPCLHPLEPDEVEYEPRGSRLLVRGL

SEQ ID NO: 48249 - protein, 169 aa, Homo sapiens
  MAP TO AC016025.11; EXPRESSED IN PLACENTA, SIGNAL = 1.3; EXPRESSED IN LUNG, SIGNAL = 2.8; SWISSPROT HIT: P34926, EVALUE 1.00e-01; EST_HUMAN HIT: BE790110.1, EVALUE 2.00e-56
GTVFSLESEEEEYPGITAEDSNDIYILPSDNSGQVSPPESPTVTTSWQSESLPVSLSASQSWHTESLPVSLGPESWQQIAMDPEEVKSLDSNGAGEKSENNSSNSDIVHVEKEEVPEGMEEAAVASVVLPARELQEALPEAPAPLLPHITATSLLGTREPDTEVITVEK

SEQ ID NO: 48250 - protein, 107 aa, Homo sapiens
  MAP TO AC024123.1; EXPRESSED IN LUNG, SIGNAL = 5.8; EXPRESSED IN PLACENTA, SIGNAL = 1.7; SWISSPROT HIT: Q07954, EVALUE 8.00e-24; EST_HUMAN HIT: BE872908.1, EVALUE 2.00e-61
QERVVIADDLPHPFGLTQYSDYIYWTDWNLHSIERADKTSGRNRTLIQGHLDFVMDILVFHSSRQDGLNDCMHNNGQCGQLCLAIPGGHRCGCASHYTLDPSSRNCS

SEQ ID NO: 48251 - protein, 26 aa, Homo sapiens
  MAP TO AC024123.1; EXPRESSED IN LUNG, SIGNAL = 5.8; EXPRESSED IN PLACENTA, SIGNAL = 1.7
RRVLCGLAVPLLTPCPCVFMQVRSGS

SEQ ID NO: 48252 - protein, 45 aa, Homo sapiens
  MAP TO AC011375.3; EXPRESSED IN PLACENTA, SIGNAL = 1.5; EXPRESSED IN LUNG, SIGNAL = 1.8; EST_HUMAN HIT: AA355938.1, EVALUE 2.00e-06
RDDNKDIDSEKEAAMEAEIKAARERAIVPLEARMKQFKDMLLERG

SEQ ID NO: 48253 - protein, 33 aa, Homo sapiens
  MAP TO AC011375.3; EXPRESSED IN PLACENTA, SIGNAL = 1.5; EXPRESSED IN LUNG, SIGNAL = 1.8
ETIIKTLTQRKKLPWKLKLKLPEKGPLSLWRLE

SEQ ID NO: 48254 - protein, 71 aa, Homo sapiens
  MAP TO AL121808.2; EXPRESSED IN BONE MARROW, SIGNAL = 3.4; EXPRESSED IN LUNG, SIGNAL = 2.1; EXPRESSED IN PLACENTA, SIGNAL = 1.3; EST_HUMAN HIT: H96240.1, EVALUE 2.00e-33; SWISSPROT HIT: Q64322, EVALUE 2.60e+00
DFCEHGTKSGLNQGAISTLQSSDILNLTKEQPQAKAGNGQNSCGVEDVLQLLRILYIVASDPYSRISQEGL

SEQ ID NO: 48255 - protein, 157 aa, Homo sapiens
  MAP TO AP001224.1; EXPRESSED IN LUNG, SIGNAL =  18; EXPRESSED IN BONE MARROW, SIGNAL =  14; SWISSPROT HIT: P06309, EVALUE 8.00e-55; EST_HUMAN HIT: AW406883.1, EVALUE 3.00e-54
SSGDIVMTQSPLSLPVTPGEPASISCRSSQSLLHSNGYNYLDWYLQKPGQSPQLLIYLGSNRASGVPDRFSGSGSGTDFTLKISRVEAEDVGVYYCMQALQTPPTVVQPLTETSSWGCPVAHMCCLSGEQLSRVSESAEEEAVGDLRAEVAAEDSGS

SEQ ID NO: 48256 - protein, 45 aa, Homo sapiens
  MAP TO AC009989.6; EXPRESSED IN LUNG, SIGNAL = 2.4; SWISSPROT HIT: Q03364, EVALUE 7.00e-23; EST_HUMAN HIT: AA446431.1, EVALUE 5.00e-21
WSFGVLMWEIFTLGGSPYPGIPVEELFKLLKEGHRMDKPANCTNE

SEQ ID NO: 48257 - protein, 136 aa, Homo sapiens
  MAP TO AL136092.7; EXPRESSED IN LUNG, SIGNAL = 3.5; EXPRESSED IN PLACENTA, SIGNAL = 1.4; EST_HUMAN HIT: AA377505.1, EVALUE 2.00e-26; SWISSPROT HIT: P52795, EVALUE 4.00e-40
TVNQEEKSGPGASGGSSGDPDGFFNSKVALFAAVGAGCVIFLLIIIFLTVLLLKLRKRHRKHTQQRAAALSLSTLASPKGGSGTAGTEPSDIIIPLRTTENNYCPHYEKVSGDYGHPVYIVQEMPPQSPANIYYKV

SEQ ID NO: 48258 - protein, 89 aa, Homo sapiens
  MAP TO AC008635.4; EXPRESSED IN LUNG, SIGNAL = 2.4; EXPRESSED IN BONE MARROW, SIGNAL = 1.7; SWISSPROT HIT: Q15139, EVALUE 3.00e-42; EST_HUMAN HIT: BE264995.1, EVALUE 4.00e-47
VKLCDFGFARIIGEKSFRRSVVGTPAYLAPEVLLNQGYNRSLDMWSVGVIMYVSLSGTFPFNEDEDINDQIQNAAFMYPASPWSHISAG

SEQ ID NO: 48259 - protein, 160 aa, Homo sapiens; identical to SEQ ID NO: 44792
  MAP TO AL138828.4; EXPRESSED IN LUNG, SIGNAL =   3; EXPRESSED IN PLACENTA, SIGNAL = 2.1; SWISSPROT HIT: P41695, EVALUE 4.80e-01; EST_HUMAN HIT: AI367350.1, EVALUE 3.00e-64

SEQ ID NO: 48260 - protein, 41 aa, Homo sapiens
  MAP TO AL138828.4; EXPRESSED IN LUNG, SIGNAL =   3; EXPRESSED IN PLACENTA, SIGNAL = 2.1; EST_HUMAN HIT: AI367350.1, EVALUE 2.00e-16
SQMKSLEYSCLIGVIPGIKRLQKRKDQRKGGQRENGKIRKL

SEQ ID NO: 48261 - protein, 59 aa, Homo sapiens
  MAP TO AL138761.3; EXPRESSED IN PLACENTA, SIGNAL = 1.4; EXPRESSED IN LUNG, SIGNAL = 2.6; EST_HUMAN HIT: BE888211.1, EVALUE 1.00e-26; SWISSPROT HIT: Q60291, EVALUE 2.70e+00
MQRYNQRLIEELKNRQTQERARLPKIQRSEAKTRMAMFKKSLRINSTATPDQDRDKIKQ

SEQ ID NO: 48262 - protein, 92 aa, Homo sapiens
  MAP TO AL136092.7; EXPRESSED IN LUNG, SIGNAL = 4.1; EXPRESSED IN PLACENTA, SIGNAL = 1.9; SWISSPROT HIT: P98172, EVALUE 4.00e-51; EST_HUMAN HIT: BE562822.1, EVALUE 3.00e-50
FLSGKGLVIYPKIGDKLDIICPRAEAGRPYEYYKLYLVRPEQAAACSTVLDPNVLVTCNRPEQEIRFTIKFQEFSPNYMGLEFKKHHDYYIT

SEQ ID NO: 48263 - protein, 46 aa, Homo sapiens
  MAP TO AL136418.1; EXPRESSED IN PLACENTA, SIGNAL = 1.4; EXPRESSED IN LUNG, SIGNAL = 1.7; SWISSPROT HIT: P37385, EVALUE 9.40e-01; EST_HUMAN HIT: BE711235.1, EVALUE 2.00e-20
MADVDPDTLLEWLQMGQGDERDMQLIALEQLCMLLLMSDNVDRCFE

SEQ ID NO: 48264 - protein, 24 aa, Homo sapiens
  MAP TO AL136418.1; EXPRESSED IN PLACENTA, SIGNAL = 1.4; EXPRESSED IN LUNG, SIGNAL = 1.7; EST_HUMAN HIT: BE867296.1, EVALUE 6.00e-11
WQMWTQIHCWNGYRWDREMKGTCN

SEQ ID NO: 48265 - protein, 35 aa, Homo sapiens
  MAP TO AC012568.3; EXPRESSED IN PLACENTA, SIGNAL = 1.4; EXPRESSED IN LUNG, SIGNAL = 2.5; EST_HUMAN HIT: BF315914.1, EVALUE 4.40e+00
ASSSLSSSLLYWHRPGQDTRARPQRAGRPTQYMPE

SEQ ID NO: 48266 - protein, 59 aa, Homo sapiens
  MAP TO AL158823.1; EXPRESSED IN LUNG, SIGNAL = 2.7; EST_HUMAN HIT: AU125586.1, EVALUE 2.00e-28; SWISSPROT HIT: Q50634, EVALUE 9.10e-01
KIEKVKPPPSPTTEGPSLQPDLAPEEAAGTQRPKNLMQTLMEDYETHKSKRRERMDDSS

SEQ ID NO: 48267 - protein, 53 aa, Homo sapiens
  MAP TO AC018573.2; EXPRESSED IN LUNG, SIGNAL = 2.6; EXPRESSED IN HELA, SIGNAL = 2.5; SWISSPROT HIT: P10568, EVALUE 3.60e+00
NNILTRCTDDKSIAPGIFIKSTHLCKQTQIKKEHNQKPGGVTQASFSHKLPSQ

SEQ ID NO: 48268 - protein, 64 aa, Homo sapiens
  MAP TO AL157996.1; EXPRESSED IN BONE MARROW, SIGNAL = 1.7; EXPRESSED IN LUNG, SIGNAL = 1.7; EST_HUMAN HIT: AV744220.1, EVALUE 5.00e-05
SCRHRRRYTSLTTTPLTANPRERSRRKSSKVQRKRAFWIIEAQSLPAARAATDSVSAIFDKGKK

SEQ ID NO: 48269 - protein, 98 aa, Homo sapiens
  MAP TO AC002477.1; EXPRESSED IN HELA, SIGNAL =   2; EXPRESSED IN LUNG, SIGNAL =   2; EXPRESSED IN PLACENTA, SIGNAL = 1.3; EST_HUMAN HIT: BF204427.1, EVALUE 1.60e+00
PEDESGRDYREREREYERDQERILRERERLKRQEEERRRQKERYEKEKTFKRKEEEMKKEKDTLRDKGKKAESTESIGSSEKTEKKEEVVKRDRIRNK

SEQ ID NO: 48270 - protein, 65 aa, Homo sapiens
  MAP TO AC008891.4; EXPRESSED IN LUNG, SIGNAL = 1.7; EST_HUMAN HIT: AI460004.1, EVALUE 1.00e-16; SWISSPROT HIT: O94759, EVALUE 2.00e-08
YTFGKVQGNSDLYWKAQRYRLIREFHSRPALAPPFIVISHLRLLLRQLCRRPRSPQPSSPALEHF

SEQ ID NO: 48271 - protein, 47 aa, Homo sapiens
  MAP TO AC008891.4; EXPRESSED IN LUNG, SIGNAL = 1.7; SWISSPROT HIT: P35569, EVALUE 8.10e+00; EST_HUMAN HIT: AI460004.1, EVALUE 8.00e-14
THSAKYRATAISTGRRSVTASSGNSTLGPRWPRPLSSSPTCASCSGN

SEQ ID NO: 48272 - protein, 34 aa, Homo sapiens
  MAP TO AC008752.3; EXPRESSED IN LUNG, SIGNAL = 1.8; EST_HUMAN HIT: BE783069.1, EVALUE 1.00e-11
MEISQLCSSRVLKVLGRLVMGTMLRSATCRQRRF

SEQ ID NO: 48273 - protein, 35 aa, Homo sapiens
  MAP TO AC008752.3; EXPRESSED IN LUNG, SIGNAL = 1.8; SWISSPROT HIT: P15265, EVALUE 2.20e+00; EST_HUMAN HIT: BE783069.1, EVALUE 2.00e-17
CGTSFEGTWHPGSIPCGWVATCSLAPRPPSCPLLC

SEQ ID NO: 48274 - protein, 33 aa, Homo sapiens
  MAP TO AL136039.1; EXPRESSED IN LUNG, SIGNAL = 2.2; EXPRESSED IN BONE MARROW, SIGNAL =   2; EST_HUMAN HIT: BE077907.1, EVALUE 7.60e+00; SWISSPROT HIT: O88569, EVALUE 8.50e+00
SMMNVHQMGGKMADCGVLQPMTTKQMKSGAFVK

SEQ ID NO: 48275 - protein, 117 aa, Homo sapiens
  MAP TO AL158070.2; EXPRESSED IN LUNG, SIGNAL = 1.6; EST_HUMAN HIT: AV691774.1, EVALUE 2.60e+00; SWISSPROT HIT: P87377, EVALUE 1.40e+00
VKELIIKTVLSSARDEPSGPARCVALCSLGIWICEELVHESHHPQIKEALNVICVSLKFTNKTVAHVACNMLHMLVHYVPRLQIYQPDSPLKIIQILIATITHLLPVQTLHLMKWTR

SEQ ID NO: 48276 - protein, 110 aa, Homo sapiens
  MAP TO AP001221.1; EXPRESSED IN BONE MARROW, SIGNAL =  15; EXPRESSED IN LUNG, SIGNAL = 5.8; EST_HUMAN HIT: AW406883.1, EVALUE 8.00e-44; SWISSPROT HIT: P01614, EVALUE 3.00e-52
SSEDIVMTQTPLSLPVTPGEPASISCRSSQSLLDSDDGNTYLDWYLQKPGQSPQLLIYTLSYRASGVPDRFSGSGSGTDFTLKISRVEAEDVGVYYCMQRIEFPSTVVQP

SEQ ID NO: 48277 - protein, 72 aa, Homo sapiens
  MAP TO AL133223.1; EXPRESSED IN LUNG, SIGNAL = 1.7; SWISSPROT HIT: P38650, EVALUE 1.00e-37; EST_HUMAN HIT: AU122332.1, EVALUE 1.00e-36
GRQNISPDKIPWSALKTLMAQSIYGGRVDNEFDQRLLNTFLERLFTTRSFDSEFKLACKVDGHKDIQMPDGI

SEQ ID NO: 48278 - protein, 62 aa, Homo sapiens
  MAP TO AC013533.3; EXPRESSED IN LUNG, SIGNAL = 1.9; SWISSPROT HIT: Q08636, EVALUE 1.50e+00; EST_HUMAN HIT: AA490201.1, EVALUE 1.00e-27
VVEGDLAAIEAYKSSGGDIARQLTADEVRLLNRPSAFDVGYTLVHLAIRFQRQDMLAILLTE

SEQ ID NO: 48279 - protein, 75 aa, Homo sapiens
  MAP TO AC012664.3; EXPRESSED IN LUNG, SIGNAL =  36; EXPRESSED IN PLACENTA, SIGNAL = 2.4; EST_HUMAN HIT: AI754351.1, EVALUE 6.00e-37; SWISSPROT HIT: P07093, EVALUE 7.00e-38
VGKILKKINKAIVSKKNKDIVTVANAVFVKNASEIEVPFVTRNKDVFQCEVRNVNFEDPASACDSINAWVKNETR

SEQ ID NO: 48280 - protein, 17 aa, Homo sapiens
  MAP TO AC024123.1; EXPRESSED IN PLACENTA, SIGNAL = 1.4; EXPRESSED IN LUNG, SIGNAL = 2.1
PLTTMVDSSLTPPASTS

SEQ ID NO: 48281 - protein, 64 aa, Homo sapiens
  MAP TO AC024123.1; EXPRESSED IN PLACENTA, SIGNAL = 1.4; EXPRESSED IN LUNG, SIGNAL = 2.1; EST_HUMAN HIT: AI338633.1, EVALUE 1.00e-31
MALGWSRSCQKSTFRDVPLRLATSMRLVSESVQYSFLPTQSQARPSGETRPEMTTFCTAAPVWF

SEQ ID NO: 48282 - protein, 51 aa, Homo sapiens
  MAP TO AC024123.1; EXPRESSED IN PLACENTA, SIGNAL = 1.4; EXPRESSED IN LUNG, SIGNAL = 2.1; EST_HUMAN HIT: AW969497.1, EVALUE 2.00e-03
PRRSCYLPTAGTYGWWTPAESSWSPPSWSAAWRMRPQWTSSFPREPCTGQT

SEQ ID NO: 48283 - protein, 35 aa, Homo sapiens
  MAP TO AC011475.2; EXPRESSED IN PLACENTA, SIGNAL = 1.6; EXPRESSED IN LUNG, SIGNAL = 1.9; EST_HUMAN HIT: BE733215.1, EVALUE 7.00e-05
LRGKMPDRYLTYLNARSSRDFDTISSSVFLASRTI

SEQ ID NO: 48284 - protein, 66 aa, Homo sapiens
  MAP TO AL096700.14; EXPRESSED IN LUNG, SIGNAL = 1.7; SWISSPROT HIT: P34983, EVALUE 5.90e+00; EST_HUMAN HIT: BE782842.1, EVALUE 2.00e-15
ASLTSFIPVVNDLTSYLFRTKSKSEEIKIELENFEKKSNCNFSIRKMSTRGSQESRVASVYRKGQS

SEQ ID NO: 48285 - protein, 27 aa, Homo sapiens
  MAP TO AL109628.2; EXPRESSED IN LUNG, SIGNAL = 1.9; EST_HUMAN HIT: BF371196.1, EVALUE 1.00e-07
MADEALFLLLHNEMVSGVYKSAEQGEV

SEQ ID NO: 48286 - protein, 35 aa, Homo sapiens
  MAP TO AL136384.2; EXPRESSED IN LUNG, SIGNAL = 2.7; SWISSPROT HIT: Q07139, EVALUE 1.70e+00; EST_HUMAN HIT: AA534974.1, EVALUE 7.00e-13
LIHIRQIPRLNNLICDESDVKDLAFKLKRKLFTIE

SEQ ID NO: 48287 - protein, 63 aa, Homo sapiens
  MAP TO AC012568.3; EXPRESSED IN BONE MARROW, SIGNAL =   6; EXPRESSED IN LUNG, SIGNAL = 6.3; EST_HUMAN HIT: BF671464.1, EVALUE 3.00e-30; SWISSPROT HIT: P53973, EVALUE 1.20e+00
ILGTEDLIVEVTSNDAVRFYPWTIDNKYYSADINLCVVPNKFLVTAEIAESVQAFVVYFDSTQ

SEQ ID NO: 48288 - protein, 43 aa, Homo sapiens
  MAP TO AC022035.2; EXPRESSED IN LUNG, SIGNAL = 5.8; SWISSPROT HIT: P54576, EVALUE 3.70e+00; EST_HUMAN HIT: AA348111.1, EVALUE 3.00e-17
ELTVPTVVVLNTSNQQYFLLDRQIKNVEDMVQFINNILDGTVE

SEQ ID NO: 48289 - protein, 38 aa, Homo sapiens
  MAP TO AC019248.3; EXPRESSED IN LUNG, SIGNAL = 3.4; SWISSPROT HIT: Q15404, EVALUE 2.00e-15; EST_HUMAN HIT: BF665928.1, EVALUE 3.00e-14
LSLRDNDLISLPKEIGELTQLKELHIQGNRLTVLPPEL

SEQ ID NO: 48290 - protein, 67 aa, Homo sapiens
  MAP TO AL136170.2; EXPRESSED IN LUNG, SIGNAL =   2; SWISSPROT HIT: Q01970, EVALUE 2.60e+00; EST_HUMAN HIT: AW962574.1, EVALUE 4.00e-32
VTKRDEDSSLMQLKEEFRTYEALRREHDSQIVQIAMEAGLRIAPDQWSSLLYGDQSHKSHMQSIIDK

SEQ ID NO: 48291 - protein, 88 aa, Homo sapiens
  MAP TO AC008569.3; EXPRESSED IN BONE MARROW, SIGNAL = 3.2; EXPRESSED IN LUNG, SIGNAL =   9; SWISSPROT HIT: P48960, EVALUE 7.00e-44; EST_HUMAN HIT: BE017960.1, EVALUE 6.00e-43
PAVAGILSIQNMTTLLANASLNLHSKKQAELEEIYESSIRGVQLRRLSAVNSIFLSHNNTKELNSPILFAFSHLESSDGEAGRDPPAK

SEQ ID NO: 48292 - protein, 158 aa, Homo sapiens
  MAP TO AL034380.25; EXPRESSED IN LUNG, SIGNAL = 4.7; EST_HUMAN HIT: AI813708.1, EVALUE 4.00e-42; SWISSPROT HIT: Q09712, EVALUE 5.00e-08
LSVFTLGLPFALFQYYAYTQFCLPGSARPIPEPLVQLAVDKGYRIAEGNEPPWCFWDVPLIYSYIQDVYWNVGFLKYYELKQVPNFLLAAPVAILVAWATWTYVTTHPWLCLTLGLQRSKNNKTLEKPDLGFLSPQVFVYVVHAAVLLLFGGLCMHVQ

SEQ ID NO: 48293 - protein, 31 aa, Homo sapiens
  MAP TO AL034380.25; EXPRESSED IN LUNG, SIGNAL = 4.7; EST_HUMAN HIT: BF374609.1, EVALUE 2.60e+00
SVGVHTWPSLCPLSVLCLHPILSARLSPPHS

SEQ ID NO: 48294 - protein, 60 aa, Homo sapiens
  MAP TO AC021993.2; EXPRESSED IN BONE MARROW, SIGNAL =   3; EXPRESSED IN LUNG, SIGNAL = 3.3; EST_HUMAN HIT: AW799442.1, EVALUE 7.00e-01
GCDRHDCTHQHSVLSECYTPTGMCFTPSVMWDAGLSHCICYQKAEGASHLQAAYPGCINK

SEQ ID NO: 48295 - protein, 46 aa, Homo sapiens; identical to SEQ ID NO: 37494
  MAP TO AL122020.2; EXPRESSED IN BONE MARROW, SIGNAL = 2.6; EXPRESSED IN LUNG, SIGNAL = 2.9; EST_HUMAN HIT: BF346741.1, EVALUE 1.80e+00; SWISSPROT HIT: P32957, EVALUE 2.10e+00

SEQ ID NO: 48296 - protein, 47 aa, Homo sapiens
  MAP TO AL158070.2; EXPRESSED IN LUNG, SIGNAL = 2.5; EST_HUMAN HIT: AI813328.1, EVALUE 4.00e-20; SWISSPROT HIT: P19447, EVALUE 2.10e+00
VEDSLELSFQGKDDVKLDVFFFYEETDHMWNGGTQAKTGKKFKYESN

SEQ ID NO: 48297 - protein, 47 aa, Homo sapiens
  MAP TO AC008686.3; EXPRESSED IN PLACENTA, SIGNAL = 1.4; EXPRESSED IN LUNG, SIGNAL = 1.9; EST_HUMAN HIT: BE791831.1, EVALUE 2.00e-22; SWISSPROT HIT: Q09651, EVALUE 1.00e-08
FRMKCHLCVNYIEMQTDPANCDYVIVSGAQRKEERWDMADNEQVLTT

SEQ ID NO: 48298 - protein, 59 aa, Homo sapiens
  MAP TO AL136170.2; EXPRESSED IN LUNG, SIGNAL = 1.9; EST_HUMAN HIT: BE005992.1, EVALUE 3.00e-27
DLQRRAAETSDDDLIPFGDRPTVSRFGAISRTSKTIYQGAGPMQAMAPQGAPTKSINIS

SEQ ID NO: 48299 - protein, 41 aa, Homo sapiens
  MAP TO AC011450.3; EXPRESSED IN BONE MARROW, SIGNAL = 1.9; EXPRESSED IN LUNG, SIGNAL = 3.3; EST_HUMAN HIT: BE513739.1, EVALUE 4.00e-16; SWISSPROT HIT: P11049, EVALUE 3.00e-17
LAFVPLQIWSKVLAISGIFTMGIALLGCVGALKELRCLLGL

SEQ ID NO: 48300 - protein, 33 aa, Homo sapiens
  MAP TO AC011450.3; EXPRESSED IN BONE MARROW, SIGNAL = 1.9; EXPRESSED IN LUNG, SIGNAL = 3.3; EST_HUMAN HIT: AW406181.1, EVALUE 7.70e-02
SGPKSWPSQESSPWASPSWVVWGPSRSSAASWA

SEQ ID NO: 48301 - protein, 50 aa, Homo sapiens
  MAP TO AC009181.5; EXPRESSED IN BONE MARROW, SIGNAL = 1.6; EXPRESSED IN LUNG, SIGNAL =   2; EXPRESSED IN PLACENTA, SIGNAL = 1.4; EST_HUMAN HIT: AU142410.1, EVALUE 1.00e-11
VLSGCAIIVRGQPRGGPPPERQINLSNIRAGNLARRAAATQPDAKDTPDE

SEQ ID NO: 48302 - protein, 23 aa, Homo sapiens
  MAP TO AL136039.1; EXPRESSED IN LUNG, SIGNAL = 1.8
AGRAAARRRWWLSPWWQRRRRQL

SEQ ID NO: 48303 - protein, 132 aa, Homo sapiens
  MAP TO AC024123.1; EXPRESSED IN BONE MARROW, SIGNAL = 1.5; EXPRESSED IN LUNG, SIGNAL = 4.6; EST_HUMAN HIT: AL043705.1, EVALUE 1.00e-40; SWISSPROT HIT: Q07954, EVALUE 2.00e-25
AEEVLLLARRTDLRRISLDTPDFTDIVLQVDDIRHAIAIDYDPLEGYVYWTDDEVRAIRRAYLDGSGAQTLVNTEINDPDGIAVDWVARNLYWTDTGTDRIEVTRLNGTSRKILVSEDLDEPRAIALHPVMG

SEQ ID NO: 48304 - protein, 44 aa, Homo sapiens
  MAP TO AC024123.1; EXPRESSED IN BONE MARROW, SIGNAL = 1.5; EXPRESSED IN LUNG, SIGNAL = 4.6; EST_HUMAN HIT: AL043705.1, EVALUE 8.00e-16; SWISSPROT HIT: P22105, EVALUE 1.20e+00
EPRRCCCWPGGRTYGGSRWTRRTSPTSCCRWTTSGTPLPSTTTR

SEQ ID NO: 48305 - protein, 20 aa, Homo sapiens
  MAP TO AL136298.1; EXPRESSED IN LUNG, SIGNAL = 2.2; EST_HUMAN HIT: BF669207.1, EVALUE 2.00e-05
PSRRFWPASRNGSATGRDPP

SEQ ID NO: 48306 - protein, 19 aa, Homo sapiens
  MAP TO AC011450.3; EXPRESSED IN BONE MARROW, SIGNAL = 3.2; EXPRESSED IN LUNG, SIGNAL = 7.9; SWISSPROT HIT: P11049, EVALUE 3.00e-07; EST_HUMAN HIT: BE269453.1, EVALUE 4.00e-06
LRCCGWHYPQDWFQVLILR

SEQ ID NO: 48307 - protein, 17 aa, Homo sapiens
  MAP TO AC011450.3; EXPRESSED IN BONE MARROW, SIGNAL = 3.2; EXPRESSED IN LUNG, SIGNAL = 7.9
CAAAAGTTRRTGSKSSS

SEQ ID NO: 48308 - protein, 94 aa, Homo sapiens
  MAP TO AL133444.1; EXPRESSED IN LUNG, SIGNAL =   3; EST_HUMAN HIT: AA813276.1, EVALUE 5.00e-46; SWISSPROT HIT: P39967, EVALUE 3.50e+00
MWLNHLEDRTSTSFGGQNRGRSDSVDYGQTHYYHQRQNSDDKLNGWQNSRDSGICINASNWQDKSMGCENGHVPLYSSSSVPTTINTIGTSTST

SEQ ID NO: 48309 - protein, 27 aa, Homo sapiens
  MAP TO AP001207.1; EXPRESSED IN LUNG, SIGNAL = 2.2; EST_HUMAN HIT: AA633972.1, EVALUE 7.00e-09
GPHGGPGRGMALHVERGKAKAKISVDI

SEQ ID NO: 48310 - protein, 27 aa, Homo sapiens
  MAP TO AP001207.1; EXPRESSED IN LUNG, SIGNAL = 2.2; EST_HUMAN HIT: AA633972.1, EVALUE 4.00e-10; SWISSPROT HIT: O70228, EVALUE 3.80e+00
GHMVGLGEEWLCMLREGRPRPRSVWIS

SEQ ID NO: 48311 - protein, 31 aa, Homo sapiens
  MAP TO AC012566.3; EXPRESSED IN LUNG, SIGNAL = 2.2
TTEKSSFKIRNEEKKRKKKERKQSQLFIRQA

SEQ ID NO: 48312 - protein, 32 aa, Homo sapiens
  MAP TO AC012566.3; EXPRESSED IN LUNG, SIGNAL = 2.2
EPQRSHHSRSEMKKKKGRKRKENRANYLFAKL

SEQ ID NO: 48313 - protein, 74 aa, Homo sapiens; identical to SEQ ID NO: 47476
  MAP TO AL133249.1; EXPRESSED IN LUNG, SIGNAL = 1.8; SWISSPROT HIT: P54819, EVALUE 2.00e-32; EST_HUMAN HIT: AU128506.1, EVALUE 4.00e-32

SEQ ID NO: 48314 - protein, 19 aa, Homo sapiens
  MAP TO AL133249.1; EXPRESSED IN LUNG, SIGNAL = 1.8; EST_HUMAN HIT: BF241381.1, EVALUE 4.90e-02
YKDFSGHGSQRASGRTRVS

SEQ ID NO: 48315 - protein, 31 aa, Homo sapiens
  MAP TO AL138828.4; EXPRESSED IN PLACENTA, SIGNAL = 1.4; EXPRESSED IN LUNG, SIGNAL = 1.6
IAQTSTQTSTQFPPARLGLQPQAVTMPSARN

SEQ ID NO: 48316 - protein, 28 aa, Homo sapiens
  MAP TO AC021887.2; EXPRESSED IN LUNG, SIGNAL =   2
VNHEQTEIMKNIKVKEKAIIFRDEHLRK

SEQ ID NO: 48317 - protein, 60 aa, Homo sapiens
  MAP TO AL138761.3; EXPRESSED IN BONE MARROW, SIGNAL = 1.6; EXPRESSED IN LUNG, SIGNAL = 1.8; SWISSPROT HIT: O26541, EVALUE 3.00e-03; EST_HUMAN HIT: AW402772.1, EVALUE 1.00e-27
SKKRQYDQEIENLEKQQKQTIERLEQEHTNRLRDEAKRIKGEQEKELSKFQNMLKNRKKE

SEQ ID NO: 48318 - protein, 59 aa, Homo sapiens
  MAP TO AC015971.2; EXPRESSED IN LUNG, SIGNAL = 1.9; SWISSPROT HIT: P36095, EVALUE 8.00e-02; EST_HUMAN HIT: AI300090.1, EVALUE 1.00e-25
IQREEEKVKRSVKDAAKKGQKDVCIVLAKEMIRSRKAVSKLYASKAHMNSVLMGMKNQL

SEQ ID NO: 48319 - protein, 23 aa, Homo sapiens
  MAP TO AL121787.22; EXPRESSED IN LUNG, SIGNAL = 4.5; EST_HUMAN HIT: BF304049.1, EVALUE 4.80e+00
PVSSPEGSLPTCSLVKSCPSCGC

SEQ ID NO: 48320 - protein, 62 aa, Homo sapiens
  MAP TO AL139120.3; EXPRESSED IN PLACENTA, SIGNAL = 1.3; EXPRESSED IN LUNG, SIGNAL = 2.7; SWISSPROT HIT: P29467, EVALUE 2.00e+00; EST_HUMAN HIT: AV731476.1, EVALUE 6.00e-04
ALFLLKPMTIMIITNTSMFPGTLLCARHCCVHFTCIYTFIKISIVKTIVIPILQMRKLRYGE

SEQ ID NO: 48321 - protein, 58 aa, Homo sapiens
  MAP TO AC008635.4; EXPRESSED IN LUNG, SIGNAL = 2.1; EXPRESSED IN PLACENTA, SIGNAL = 1.3; EST_HUMAN HIT: BE383956.1, EVALUE 1.00e-27; SWISSPROT HIT: P70483, EVALUE 5.00e-19
LSDSKDAFKKTWNPKFTLRSHYDGIRSLAFHHSQSALLTASEDGTLKLWNLQKAVTAK

SEQ ID NO: 48322 - protein, 58 aa, Homo sapiens
  MAP TO AC008635.4; EXPRESSED IN LUNG, SIGNAL = 2.1; EXPRESSED IN PLACENTA, SIGNAL = 1.3; EST_HUMAN HIT: BE409842.1, EVALUE 1.00e-18; SWISSPROT HIT: P42128, EVALUE 1.20e+00
CLTAKMLLRRRGTPSSPCARTTTAFVPWPSTTASRLCSPPPRTARSSSGTCRRRSRPR

SEQ ID NO: 48323 - protein, 69 aa, Homo sapiens
  MAP TO AL157885.2; EXPRESSED IN LUNG, SIGNAL = 2.2; SWISSPROT HIT: P22897, EVALUE 2.00e-36; EST_HUMAN HIT: AV712567.1, EVALUE 2.00e-35
TIQTDGFVKYGKSSYSLMRQKFQWHEAETYCKLHNSLIASILDPYSNAFAWLQMETSNERVWIALNSNL

SEQ ID NO: 48324 - protein, 18 aa, Homo sapiens
  MAP TO AL157885.2; EXPRESSED IN LUNG, SIGNAL = 2.2; EST_HUMAN HIT: BF574757.1, EVALUE 2.90e-02
QRFKQMALLNMAKAAIHS

SEQ ID NO: 48325 - protein, 36 aa, Homo sapiens
  MAP TO AC020714.2; EXPRESSED IN LUNG, SIGNAL = 1.9; EST_HUMAN HIT: AU131774.1, EVALUE 6.00e-15
IFMILFNQGLWITDHKHHWFLRLLLMKKSAKLNLQQ

SEQ ID NO: 48326 - protein, 73 aa, Homo sapiens
  MAP TO AC024123.1; EXPRESSED IN LUNG, SIGNAL = 3.6; SWISSPROT HIT: P14347, EVALUE 7.40e-01; EST_HUMAN HIT: BF528303.1, EVALUE 5.00e-32
GQRPRVVQVPPHEDLPELPVQPRHFDSVGPSVGPVEVLAHPVNGHALGVVKAKLHHVLHRAPVHEGAADGLAA

SEQ ID NO: 48327 - protein, 39 aa, Homo sapiens
  MAP TO AC013359.4; EXPRESSED IN LUNG, SIGNAL = 3.1; EST_HUMAN HIT: H02086.1, EVALUE 5.00e-16
PSQNQQTSNPTHSSEDVKPKTLPLDKSINHQIESPSERR

SEQ ID NO: 48328 - protein, 17 aa, Homo sapiens
  MAP TO AC013359.4; EXPRESSED IN LUNG, SIGNAL = 3.1; EST_HUMAN HIT: AW959136.1, EVALUE 2.20e-02
IHPRISRHQIQRTVQKM

SEQ ID NO: 48329 - protein, 77 aa, Homo sapiens
  MAP TO AC010582.6; EXPRESSED IN LUNG, SIGNAL = 1.8; EXPRESSED IN PLACENTA, SIGNAL = 1.3
VIPTTVAAPTPAQAQITATGQQQPQAQPAQTQAPLVLQVDGTGDTSSEEDEDEEEDYDDDEEEDKEKDGAEDGQVEE

SEQ ID NO: 48330 - protein, 39 aa, Homo sapiens
  MAP TO AC010582.6; EXPRESSED IN LUNG, SIGNAL = 1.8; EXPRESSED IN PLACENTA, SIGNAL = 1.3; EST_HUMAN HIT: BE255107.1, EVALUE 8.00e-08
SYTYDSGSTYTSPSTDNCNWPAATAGPACSNTSSIGLTS

SEQ ID NO: 48331 - protein, 46 aa, Homo sapiens
  MAP TO AL121975.3; EXPRESSED IN LUNG, SIGNAL =  13; SWISSPROT HIT: P49643, EVALUE 7.00e-20; EST_HUMAN HIT: AA255550.1, EVALUE 9.00e-19
IPFADALDLFRGRKVYLEDGFAYVPLKDIVAIILNEFRAKLSKALA

SEQ ID NO: 48332 - protein, 33 aa, Homo sapiens
  MAP TO AL121975.3; EXPRESSED IN LUNG, SIGNAL =  13; EST_HUMAN HIT: AV757142.1, EVALUE 4.00e-13
SLLLMLWICFEEGKSIWKMALLTYHLRTLWQSS

SEQ ID NO: 48333 - protein, 34 aa, Homo sapiens
  MAP TO AC008045.5; EXPRESSED IN PLACENTA, SIGNAL = 1.4; EXPRESSED IN LUNG, SIGNAL = 1.9
KQQQQQQQQQQQQKTSNNGANAYSCQSQDSIYGD

SEQ ID NO: 48334 - protein, 27 aa, Homo sapiens
  MAP TO AC010745.2; EXPRESSED IN LUNG, SIGNAL = 1.7; SWISSPROT HIT: P54547, EVALUE 8.60e+00; EST_HUMAN HIT: AV731167.1, EVALUE 1.20e+00
KVSVSPSYQWGSLGPERASNLLTITQL

SEQ ID NO: 48335 - protein, 33 aa, Homo sapiens
  MAP TO AC008860.5; EXPRESSED IN PLACENTA, SIGNAL = 1.8; EXPRESSED IN LUNG, SIGNAL =   2; SWISSPROT HIT: P10463, EVALUE 1.00e-05; EST_HUMAN HIT: AA885514.1, EVALUE 2.00e-12
VTPEEFMNYYAGVSASIDTDVYFIIMMRTAWKL

SEQ ID NO: 48336 - protein, 50 aa, Homo sapiens
  MAP TO AC022211.2; EXPRESSED IN LUNG, SIGNAL = 2.7; SWISSPROT HIT: Q9SCW5, EVALUE 1.60e+00; EST_HUMAN HIT: BE253522.1, EVALUE 3.00e-23
LWQLGVDYFDYCPELGRVSLELHIERIPLNTEQKALKVLRICEQRQMTEQ

SEQ ID NO: 48337 - protein, 28 aa, Homo sapiens
  MAP TO AC022211.2; EXPRESSED IN LUNG, SIGNAL = 2.7; EST_HUMAN HIT: BE544704.1, EVALUE 4.00e-11
CGSWGSITLITAPSWAESPWSCTLSGYL

SEQ ID NO: 48338 - protein, 31 aa, Homo sapiens
  MAP TO AL121923.7; EXPRESSED IN LUNG, SIGNAL = 2.3; EST_HUMAN HIT: AI298543.1, EVALUE 4.00e-01
TQSPGARRLAPALCVIKTAEAEESWPEDTYP

SEQ ID NO: 48339 - protein, 17 aa, Homo sapiens
  MAP TO AC022034.3; EXPRESSED IN BONE MARROW, SIGNAL = 2.9; EXPRESSED IN LUNG, SIGNAL = 1.7
ARRRAAGELVVSFLTMT

SEQ ID NO: 48340 - protein, 54 aa, Homo sapiens
  MAP TO AC012596.2; EXPRESSED IN LUNG, SIGNAL = 2.5
MKKGKILGKEEEIKGLRGDKEEKKKEEKAKQEEGEKKEASKGRKKGREEEEEEG

SEQ ID NO: 48341 - protein, 77 aa, Homo sapiens
  MAP TO AC010322.4; EXPRESSED IN BONE MARROW, SIGNAL = 5.7; EXPRESSED IN LUNG, SIGNAL = 3.8; SWISSPROT HIT: P34092, EVALUE 4.00e-14; EST_HUMAN HIT: BE513695.1, EVALUE 5.00e-16
DTGVLTWFSRIQGKYFEIQFSRGGEPDGGKISNFLLEKSRVVMQNENERNFHIYYQVQGRGRGRGSTTWSPAGWTMG

SEQ ID NO: 48342 - protein, 46 aa, Homo sapiens [sequence omitted]

SEQ ID NO: 48343 - protein, 21 aa, Homo sapiens
  MAP TO AC011338.2; EXPRESSED IN LUNG, SIGNAL = 2.8
VNPAGKLAPFWLFLLYHRWAG

SEQ ID NO: 48344 - protein, 52 aa, Homo sapiens
  MAP TO AC011465.4; EXPRESSED IN LUNG, SIGNAL =   2; EST_HUMAN HIT: AW577926.1, EVALUE 8.00e-24; SWISSPROT HIT: Q09708, EVALUE 6.10e+00
ATPTATKHGTGRGLPLKDALEYVIPELNIHCLRLALNTPKVTEQLLKLDEQG

SEQ ID NO: 48345 - protein, 20 aa, Homo sapiens
  MAP TO AC011465.4; EXPRESSED IN LUNG, SIGNAL =   2; EST_HUMAN HIT: AA584764.1, EVALUE 3.00e-06
PSWKMLRPQPPSMGPGGACP

SEQ ID NO: 48346 - protein, 38 aa, Homo sapiens
  MAP TO AL138970.2; EXPRESSED IN LUNG, SIGNAL = 2.2
EKTEDKECKQFAQESSQEVVDLDGTMPALKHTLGSTDS

SEQ ID NO: 48347 - protein, 22 aa, Homo sapiens
  MAP TO AL138970.2; EXPRESSED IN LUNG, SIGNAL = 2.2
MRKQKTKNVNSLPKNLAKKWWT

SEQ ID NO: 48348 - protein, 52 aa, Homo sapiens
  MAP TO AC018897.2; EXPRESSED IN LUNG, SIGNAL = 1.8; EST_HUMAN HIT: AA664181.1, EVALUE 2.00e-07
MQHRSAKLSLCPLKASRNEANQLNPTYIAVKPSGALKNIKTKILIHKTAMPK

SEQ ID NO: 48349 - protein, 74 aa, Homo sapiens
  MAP TO AL121716.16; EXPRESSED IN LUNG, SIGNAL = 1.9; EST_HUMAN HIT: BE002805.1, EVALUE 8.00e-39; SWISSPROT HIT: Q9ZKD2, EVALUE 3.60e+00
KNPEEDNSGRTLGWEPGHLLLTICTVRSMEQLLPFFNVLSQVFNSKVTSRCGGHSGSPILYSNAFPNKDMKLEN

SEQ ID NO: 48350 - protein, 69 aa, Homo sapiens
  MAP TO AL121716.16; EXPRESSED IN LUNG, SIGNAL = 1.9; EST_HUMAN HIT: AA884440.1, EVALUE 7.00e-26
KIQRKTTQGEHWVGSQGTCCSPSAPCAVWSSSCRSSMCSVKSSTAKSQADVEDTQGVLSSTQMPSLIRT

SEQ ID NO: 48351 - protein, 56 aa, Homo sapiens
  MAP TO AC016939.8; EXPRESSED IN LUNG, SIGNAL = 1.6; EST_HUMAN HIT: AW797342.1, EVALUE 6.00e-20
TQPIPEMKKMTLQDPQPQTILLPRMTQAPDITWGMLKKTTQEAERILLRTQTPFTP

SEQ ID NO: 48352 - protein, 37 aa, Homo sapiens
  MAP TO AC019248.3; EXPRESSED IN PLACENTA, SIGNAL = 1.5; EXPRESSED IN BONE MARROW, SIGNAL = 1.7; EXPRESSED IN LUNG, SIGNAL = 3.8; EST_HUMAN HIT: BE873682.1, EVALUE 2.00e-13; SWISSPROT HIT: Q15404, EVALUE 5.00e-14
TMSKSLKKLVEESREKNQPEVDMSDRGISNMLDVNGL

SEQ ID NO: 48353 - protein, 56 aa, Homo sapiens
  MAP TO AC022211.2; EXPRESSED IN LUNG, SIGNAL = 2.8; EST_HUMAN HIT: BE563443.1, EVALUE 1.00e-25; SWISSPROT HIT: O43747, EVALUE 5.00e-04
SALPVTAYDKNGFRILFHFAKECPPGRPDVLVVVVSMLNTAPLPVKSIVLQAAVPK

SEQ ID NO: 48354 - protein, 78 aa, Homo sapiens
  MAP TO AC022211.2; EXPRESSED IN LUNG, SIGNAL = 1.8; EST_HUMAN HIT: BE393689.1, EVALUE 8.00e-22
WISAAVGPRSSAVGYPGQSAPAGCGPRPPGGGSRSPPGRSVPGSGAWRWPRGRSEACTAPRAWRSALGESCGPAGSGA

SEQ ID NO: 48355 - protein, 59 aa, Homo sapiens
  MAP TO AL121808.2; EXPRESSED IN BONE MARROW, SIGNAL = 1.9; EXPRESSED IN LUNG, SIGNAL = 1.7; EST_HUMAN HIT: AW751191.1, EVALUE 4.00e-18; SWISSPROT HIT: Q9KVL8, EVALUE 3.50e+00
QSFSRELGCETTMVKDILAEEGLHFDELNKLWVLDSEVTQQTTELKEECKNFADKTGQF

SEQ ID NO: 48356 - protein, 19 aa, Homo sapiens
  MAP TO AL121808.2; EXPRESSED IN BONE MARROW, SIGNAL = 1.9; EXPRESSED IN LUNG, SIGNAL = 1.7; EST_HUMAN HIT: AW751181.1, EVALUE 4.00e-04
SYDTPPPDCHRHSFRAELL

SEQ ID NO: 48357 - protein, 68 aa, Homo sapiens
  MAP TO AC006548.20; EXPRESSED IN BONE MARROW, SIGNAL = 6.6; EXPRESSED IN LUNG, SIGNAL = 1.9; EST_HUMAN HIT: AW404683.1, EVALUE 7.00e-26; SWISSPROT HIT: P01614, EVALUE 1.00e-26
SSGDIVMTQTPLSLPVTPGEPASISCRSSESLLDTDDEYTYLNWYLQKPGQSPQLLIYEVSNRASGVP

SEQ ID NO: 48358 - protein, 69 aa, Homo sapiens
  MAP TO AC008655.3; EXPRESSED IN LUNG, SIGNAL =   3; EST_HUMAN HIT: BE538338.1, EVALUE 1.00e-32; SWISSPROT HIT: P55055, EVALUE 1.00e-33
LQVEFINPIFEFSRAMRRLGLDDAEYALLIAINIFSADRPNVQEPGRVEALQQPYVEALLSYTRIKRPQ

SEQ ID NO: 48359 - protein, 66 aa, Homo sapiens
  MAP TO AC008655.3; EXPRESSED IN LUNG, SIGNAL =   3; EST_HUMAN HIT: BE878950.1, EVALUE 1.00e-08
WSSSTPSSSSRGPCGGWAWTTLSTPCSSPSTSSRPTGPTCRSRAAWRRCSSPTWRRCCPTRASRGR

SEQ ID NO: 48360 - protein, 174 aa, Homo sapiens
  MAP TO AC022035.2; EXPRESSED IN LUNG, SIGNAL = 2.5; SWISSPROT HIT: Q07283, EVALUE 3.00e-02; EST_HUMAN HIT: AI858300.1, EVALUE 4.00e-19
MVAPASPPRDTCNTCFPLHGLQSHAAHNFCAHSYNTNKWDICEELRLRELEEVKARAAQMEKTMRWWSDCTANWREKWSKVRAERNSAREEGRQLRIKLEMAMKELSTLKKKQSLPPQKEALEAKVTQDLKLPGFVEESCEHTDQFQLSSQMHESIREYLVKRQFSTKEDTNNK

SEQ ID NO: 48361 - protein, 96 aa, Homo sapiens
  MAP TO AC022035.2; EXPRESSED IN LUNG, SIGNAL = 2.5; EST_HUMAN HIT: AI858300.1, EVALUE 8.00e-06; SWISSPROT HIT: Q29608, EVALUE 4.00e+00
WWHLPHPPGIPVIPASHFMGYNLMLLTISVLTHITPTNGIFVKNFACGSLKKSRPELLRWKRPCGGGRTALPTGEKNGVKFELKGTVPGRKEDNSE

SEQ ID NO: 48362 - protein, 65 aa, Homo sapiens
  MAP TO AC008635.4; EXPRESSED IN LUNG, SIGNAL = 1.7; SWISSPROT HIT: Q13033, EVALUE 9.00e-07; EST_HUMAN HIT: BE798869.1, EVALUE 2.00e-13
YLEEVGYTDTILDMRSKRVRSLLGRSLELNGAVEPSEGAPRAPPGPAGLSGGESLLVKQIEEQIK

SEQ ID NO: 48363 - protein, 56 aa, Homo sapiens
  MAP TO AC008635.4; EXPRESSED IN LUNG, SIGNAL = 1.7; SWISSPROT HIT: P23009, EVALUE 2.10e+00; EST_HUMAN HIT: BF340073.1, EVALUE 2.00e-30
TWKRWATQTPSSTCGPSASVPCWAARWSSTGQWSRVKGPPGLHQALQGSVVGSRCW

SEQ ID NO: 48364 - protein, 64 aa, Homo sapiens
  MAP TO AL132773.14; EXPRESSED IN PLACENTA, SIGNAL = 1.3; EXPRESSED IN LUNG, SIGNAL = 1.9; SWISSPROT HIT: Q19981, EVALUE 1.00e-05; EST_HUMAN HIT: BF313142.1, EVALUE 4.00e-32
NVTNELRVFHIHNESWVLLTPKAKEQYAVVGHSAHIVTLKNGRVVMLVIFGHCPLYGYISNVQE

SEQ ID NO: 48365 - protein, 47 aa, Homo sapiens
  MAP TO AC008655.3; EXPRESSED IN LUNG, SIGNAL = 3.1; EST_HUMAN HIT: BE796623.1, EVALUE 4.00e-08; SWISSPROT HIT: P35579, EVALUE 5.00e-06
LKRQLEEAEEEASRAQAGRRRLQRELEDVTESAESMNREVTTLRNRL

SEQ ID NO: 48366 - protein, 59 aa, Homo sapiens
  MAP TO AL137858.1; EXPRESSED IN LUNG, SIGNAL = 1.8; EST_HUMAN HIT: AW238170.1, EVALUE 5.40e-01; SWISSPROT HIT: P09087, EVALUE 5.30e-01
LIEETKLEVIPELLWLTLSADEARHFIPHRTIQNMQLYYHTSPHHHFPHPRAQLLRQQQ

SEQ ID NO: 48367 - protein, 151 aa, Homo sapiens; identical to SEQ ID NO: 46352
  MAP TO AC010358.5; EXPRESSED IN LUNG, SIGNAL = 2.7; EST_HUMAN HIT: BE257612.1, EVALUE 3.00e-53; SWISSPROT HIT: Q13402, EVALUE 7.20e-02

SEQ ID NO: 48368 - protein, 38 aa, Homo sapiens
  MAP TO AL133374.1; EXPRESSED IN LUNG, SIGNAL = 1.6; EST_HUMAN HIT: F05701.1, EVALUE 2.00e-15; SWISSPROT HIT: P54644, EVALUE 3.00e-08
YINGGELFTHLSQRERFTEHEVQIYVGEIVLALEHLHK

SEQ ID NO: 48369 - protein, 36 aa, Homo sapiens
  MAP TO AC008154.6; EXPRESSED IN LUNG, SIGNAL =   5
PLTSGLHYYTTLEELWKSFDLCEDYFKPPFGPYPEK

SEQ ID NO: 48370 - protein, 94 aa, Homo sapiens
  MAP TO AC006111.2; EXPRESSED IN LUNG, SIGNAL = 1.8; EST_HUMAN HIT: BE693272.1, EVALUE 2.00e-46; SWISSPROT HIT: Q92793, EVALUE 3.00e-55
VFFVIHLHAGPVINTLPPIVDPDPLLSCDLMDGRDAFLTLARDKHWEFSSLRRSKWSTLCMLVELHTQGQDRFVYTCNECKHHVETRWHCTVCE

SEQ ID NO: 48371 - protein, 40 aa, Homo sapiens
  MAP TO AC023000.2; EXPRESSED IN LUNG, SIGNAL =   6
EEEEEEEQKKEEEEEEEEEEYKHIEILFYLGLNSGAADPR

SEQ ID NO: 48372 - protein, 152 aa, Homo sapiens
  MAP TO AL121787.22; EXPRESSED IN LUNG, SIGNAL = 2.1; SWISSPROT HIT: P97303, EVALUE 1.00e-37; EST_HUMAN HIT: AV723599.1, EVALUE 4.30e-01
PVPKGLWVGAGQSLPSSQAYSHGGLMADHLPGRMRPNTSCPVPIKVCPRSPPLETRTRTSSSCSSYSYAEDGSGGSPCSLPLCEFSSSPCSQGARFLATEHQEPGLMGDGMYNQVRPQIKCEQSYGTNSSDESGSFSEADSESCPVQDRGQE

SEQ ID NO: 48373 - protein, 48 aa, Homo sapiens
  MAP TO AF236876.1; EXPRESSED IN LUNG, SIGNAL = 1.7; EST_HUMAN HIT: AI902599.1, EVALUE 6.00e-20
LLSSGSRYLIRSDDMIETVYNDRGEIVKTKERRVFMLNDVLMCATVSS

SEQ ID NO: 48374 - protein, 48 aa, Homo sapiens
  MAP TO AC008403.3; EXPRESSED IN LUNG, SIGNAL = 2.8; EST_HUMAN HIT: AW248143.1, EVALUE 8.00e-20; SWISSPROT HIT: Q99418, EVALUE 6.00e-21
PPDLTPEERMELENIRRRKQELLVEIQRLREELSEAMSEVEGLEANEG

SEQ ID NO: 48375 - protein, 79 aa, Homo sapiens
  MAP TO AL158801.1; EXPRESSED IN LUNG, SIGNAL = 1.9; SWISSPROT HIT: P54073, EVALUE 1.70e+00; EST_HUMAN HIT: AA626160.1, EVALUE 4.00e-31
SGPFEVRADLEESMEFVDPGVAGESDESGDERVSDEETDLGTDWENLPSPRFCDIPSQSVEVSQSQSTQASPPIASSSA

SEQ ID NO: 48376 - protein, 79 aa, Homo sapiens
  MAP TO AL158801.1; EXPRESSED IN LUNG, SIGNAL = 1.9; SWISSPROT HIT: P98192, EVALUE 4.50e+00; EST_HUMAN HIT: AA626160.1, EVALUE 5.00e-31
QGPLKYEQTLRSPWNLWIPELLENQMRAEMSASAMKKPTWAQTGRTCLVPGFVISLPSLWKSPRVRAPRRPHPSRAAVQ

SEQ ID NO: 48377 - protein, 67 aa, Homo sapiens
  MAP TO AL158017.2; EXPRESSED IN PLACENTA, SIGNAL = 2.3; EXPRESSED IN LUNG, SIGNAL = 8.2; SWISSPROT HIT: P51805, EVALUE 6.00e-23; EST_HUMAN HIT: AW024079.1, EVALUE 3.00e-23
DCPQLVPTEEILIPVGEVKPITLKARNLPQPQSGQRGYECVLNIQGAIHRVPALRFNSSSVQCQNSS

SEQ ID NO: 48378 - protein, 46 aa, Homo sapiens
  MAP TO AC023302.2; EXPRESSED IN LUNG, SIGNAL = 3.2
TCHSVIHASIRSSTLGSFKGLVATLIKDATEPDEQSAYRVILAQKQ

SEQ ID NO: 48379 - protein, 48 aa, Homo sapiens
  MAP TO AC008655.3; EXPRESSED IN LUNG, SIGNAL =  59; SWISSPROT HIT: O96009, EVALUE 7.00e-22; EST_HUMAN HIT: AI924523.1, EVALUE 9.00e-21
VKVGPGLTLCAKGCAAILDTGTSLITGPTEEIRALHAAIGGIPLLAGE

SEQ ID NO: 48380 - protein, 46 aa, Homo sapiens
  MAP TO AC008569.3; EXPRESSED IN LUNG, SIGNAL = 4.8; SWISSPROT HIT: Q16512, EVALUE 8.00e-21; EST_HUMAN HIT: BE561842.1, EVALUE 1.00e-19
KAFQRARQMNIDVATWVRLLRRLIPNATGTGTFSPGASPGSEARTT

SEQ ID NO: 48381 - protein, 63 aa, Homo sapiens
  MAP TO AL133445.2; EXPRESSED IN LUNG, SIGNAL = 1.9; SWISSPROT HIT: P05719, EVALUE 1.20e+00
TVIKTVIFDDEMIQIMMTVVSTTRDDADKLSPEDAQLPMSSGILRVMNVPVHTHIARVYYSPL

SEQ ID NO: 48382 - protein, 43 aa, Homo sapiens
  MAP TO AC013528.3; EXPRESSED IN LUNG, SIGNAL = 2.4; EST_HUMAN HIT: AI658561.1, EVALUE 3.00e-03; SWISSPROT HIT: P32301, EVALUE 4.80e+00
TCVDLCYYHYNHETEQFCYPLNFLALSLYCNNTFPPPPSPDCH

SEQ ID NO: 48383 - protein, 27 aa, Homo sapiens
  MAP TO AC011836.3; EXPRESSED IN LUNG, SIGNAL = 2.9
ATYCPTASYKTMLAHYVDYDMTTTTYN

SEQ ID NO: 48384 - protein, 101 aa, Homo sapiens
  MAP TO AL135744.2; EXPRESSED IN LUNG, SIGNAL = 1.8; EXPRESSED IN PLACENTA, SIGNAL = 1.4; SWISSPROT HIT: P46635, EVALUE 5.20e+00; EST_HUMAN HIT: BE263885.1, EVALUE 3.00e-41
DRVLINRIDLVCQAVLSGKWPSSRRSQEMVTGGILGPGNHLLDSPSLTPGEYGDSPVPTPRSSSAASMAEEEASAVSTAAAQFTKLRRGMDEKEFTVQIKD

SEQ ID NO: 48385 - protein, 73 aa, Homo sapiens
  MAP TO AC018633.2; EXPRESSED IN LUNG, SIGNAL = 2.8; EST_HUMAN HIT: AA243589.1, EVALUE 8.00e-13; SWISSPROT HIT: P54418, EVALUE 1.30e+00
VEEALIQIHDPELRKLLNPTTADLRFADYLVRHVTENRDDVFLDGTGWEGGDEWIRAQFAVYIHALLAATLQL

SEQ ID NO: 48386 - protein, 97 aa, Homo sapiens
  MAP TO AC010582.6; EXPRESSED IN LUNG, SIGNAL = 1.8; EST_HUMAN HIT: AA984839.1, EVALUE 5.00e-49; SWISSPROT HIT: P52976, EVALUE 4.60e-01
KRDRPKSTLMNFSKVQKLDISSLNRTPSVTEASPWRATNPFLNETLQDVQPSPINPFSAFFEEQERRSQNSSISSTTGKSQRDSLIVIYQDAISFDD

SEQ ID NO: 48387 - protein, 80 aa, Homo sapiens
  MAP TO AL139392.1; EXPRESSED IN LUNG, SIGNAL = 1.9; EXPRESSED IN BONE MARROW, SIGNAL = 6.5; SWISSPROT HIT: P20749, EVALUE 3.00e-12; EST_HUMAN HIT: F07238.1, EVALUE 2.00e-33
EGTSGKTALHLAVETQERGLVQFLLQAGAQVDARMLNGCTPLHLAAGRGLMGISSTLCKAGADSLLRNVEDETPQDLTEE

SEQ ID NO: 48388 - protein, 30 aa, Homo sapiens
  MAP TO AL139392.1; EXPRESSED IN LUNG, SIGNAL = 1.9; EXPRESSED IN BONE MARROW, SIGNAL = 6.5; EST_HUMAN HIT: AW407696.1, EVALUE 3.00e-11
RAPVVRQRCTWLWKPKSGAWYSSCSRLVPR

SEQ ID NO: 48389 - protein, 40 aa, Homo sapiens
  MAP TO AC008655.3; EXPRESSED IN LUNG, SIGNAL =  22; EST_HUMAN HIT: W19120.1, EVALUE 7.00e-17; SWISSPROT HIT: O96009, EVALUE 6.00e-18
DPEVADGGELVLGGSDPAHYIPPLTFVPVTVPAYWQIHME

SEQ ID NO: 48390 - protein, 40 aa, Homo sapiens
  MAP TO AC008655.3; EXPRESSED IN LUNG, SIGNAL =  22; EST_HUMAN HIT: W19120.1, EVALUE 3.00e-04
TLKWLMEESWSWGAQTRHTTSHPSPSCQSQSPPTGRSTWS

SEQ ID NO: 48391 - protein, 70 aa, Homo sapiens
  MAP TO AL158047.2; EXPRESSED IN LUNG, SIGNAL = 4.4; EST_HUMAN HIT: AU160252.1, EVALUE 2.00e-11
SKGQSTDWLMILVMKNRRKRKIMKKKWKRNWQKQKDLKLHLFLTPVKQRRSRKFLCSSWTEMRRKKMLIS

SEQ ID NO: 48392 - protein, 78 aa, Homo sapiens
  MAP TO AC020754.2; EXPRESSED IN LUNG, SIGNAL = 2.5; EST_HUMAN HIT: BF062785.1, EVALUE 2.00e-11; SWISSPROT HIT: P17193, EVALUE 8.10e-01
WERGSSCRRSSLGSWRSSWPARWPEGGVTCLRRPSTRPESKPGRECQELSKPPKSSREYRSGNRASSATTWPASRTTG

SEQ ID NO: 48393 - protein, 94 aa, Homo sapiens
  MAP TO AC010473.3; EXPRESSED IN LUNG, SIGNAL =   2; EST_HUMAN HIT: AU132394.1, EVALUE 5.00e-49; SWISSPROT HIT: P47808, EVALUE 1.00e-04
LKDKGYTTLQDEAIKIFNSLQQLESMSDPIPIIQVILQTGHDLRPLRDELYCQLIKQTNKVPHPGSVGNLYSWQILTCLSCTFLPSRGILKYLK

SEQ ID NO: 48394 - protein, 32 aa, Homo sapiens
  MAP TO AC010473.3; EXPRESSED IN LUNG, SIGNAL =   2; EST_HUMAN HIT: BE170077.1, EVALUE 1.00e-13
CSKTKAIPPFRMRPSRYSIPCSNWSPCLTQFQ

SEQ ID NO: 48395 - protein, 30 aa, Homo sapiens
  MAP TO AL139104.2; EXPRESSED IN LUNG, SIGNAL = 1.6
ISLRTSYVALLKYLSSHVFSLTAGIGVPGH

SEQ ID NO: 48396 - protein, 129 aa, Homo sapiens
  MAP TO AC008543.4; EXPRESSED IN LUNG, SIGNAL = 3.2; SWISSPROT HIT: P16415, EVALUE 2.00e-78; EST_HUMAN HIT: BE883574.1, EVALUE 2.00e-77
SHTCEIKDDSQCGETFGQIPDSIVNKNTPRVNPCDSGECGEVVLGHSSLNCNIRVDTGHKSCEHQEYGEKPYTHKQRGKAISHQHSFQTHERPPTGKKPFDCKECAKTFSSLGNLRRHMAAHHGDGPYK

SEQ ID NO: 48397 - protein, 23 aa, Homo sapiens
  MAP TO AC008543.4; EXPRESSED IN LUNG, SIGNAL = 3.2; EST_HUMAN HIT: BF685894.1, EVALUE 1.00e-04
VIHVKLKMTVNVEKLLARFQIVL

SEQ ID NO: 48398 - protein, 28 aa, Homo sapiens
  MAP TO AL049871.3; EXPRESSED IN LUNG, SIGNAL = 2.1; EST_HUMAN HIT: AA434363.1, EVALUE 4.00e-10
GGRCRGENLPADELRQRRLPRGIRAHCV

SEQ ID NO: 48399 - protein, 43 aa, Homo sapiens
  MAP TO AC008723.3; EXPRESSED IN LUNG, SIGNAL = 1.8; EST_HUMAN HIT: BE564346.1, EVALUE 2.00e-18; SWISSPROT HIT: P46219, EVALUE 2.80e+00
WYQTLEEVFIEVQVPPGTRAQDIQCGLQSRHVALSVGGREILK

SEQ ID NO: 48400 - protein, 42 aa, Homo sapiens
  MAP TO AC008723.3; EXPRESSED IN LUNG, SIGNAL = 1.8; EST_HUMAN HIT: BE564346.1, EVALUE 1.00e-11
GTRPWRRCSLKFRCRQARAPRISSAASRAGMWRCRWAAARSS

SEQ ID NO: 48401 - protein, 18 aa, Homo sapiens
  MAP TO AL049775.2; EXPRESSED IN BONE MARROW, SIGNAL = 4.5
LLQLSEIFLICFVCAFDV

SEQ ID NO: 48402 - protein, 39 aa, Homo sapiens
  MAP TO AC007239.2; EXPRESSED IN BT474, SIGNAL = 2.4; EXPRESSED IN BONE MARROW, SIGNAL = 0.64; EXPRESSED IN HBL100, SIGNAL =   1; EST_HUMAN HIT: BE905509.1, EVALUE 8.00e-12; SWISSPROT HIT: P50482, EVALUE 4.00e-15
LISAVDPVAVLAVFENIHVNEQLYILVFGESLLNDAVTV

SEQ ID NO: 48403 - protein, 38 aa, Homo sapiens
  MAP TO AC006449.13; EXPRESSED IN PLACENTA, SIGNAL = 0.61; EXPRESSED IN BONE MARROW, SIGNAL = 0.75; EXPRESSED IN HBL100, SIGNAL = 0.67; EXPRESSED IN BT474, SIGNAL = 5.9; SWISSPROT HIT: P53807, EVALUE 8.00e-11; EST_HUMAN HIT: AL046507.1, EVALUE 2.00e-15
AKDLPTFKDNDFLNEGQKLHVGEESKKNFLEKLKRDVE

SEQ ID NO: 48404 - protein, 22 aa, Homo sapiens
  MAP TO AC006449.13; EXPRESSED IN PLACENTA, SIGNAL = 0.61; EXPRESSED IN BONE MARROW, SIGNAL = 0.75; EXPRESSED IN HBL100, SIGNAL = 0.67; EXPRESSED IN BT474, SIGNAL = 5.9
SGLPSLTAVALLGQGLANIQRQ

SEQ ID NO: 48405 - protein, 45 aa, Homo sapiens
  MAP TO AL049868.10; EXPRESSED IN HBL100, SIGNAL = 1.2; EXPRESSED IN HELA, SIGNAL = 0.93; EXPRESSED IN PLACENTA, SIGNAL = 1.1; EXPRESSED IN BONE MARROW, SIGNAL = 1.5; EST_HUMAN HIT: AA180093.1, EVALUE 5.00e-22; SWISSPROT HIT: P39312, EVALUE 7.90e+00
VCTYIVYQCSRPAPLHSRDLHSMIVAAFQCLCVWLTEHPDMLDEK

SEQ ID NO: 48406 - protein, 22 aa, Homo sapiens
  MAP TO AL049868.10; EXPRESSED IN HBL100, SIGNAL = 1.2; EXPRESSED IN HELA, SIGNAL = 0.93; EXPRESSED IN PLACENTA, SIGNAL = 1.1; EXPRESSED IN BONE MARROW, SIGNAL = 1.5; EST_HUMAN HIT: AA180093.1, EVALUE 3.00e-06
CAPTLFISVVGQLLYTPGICTP

SEQ ID NO: 48407 - protein, 20 aa, Homo sapiens
  MAP TO AC005948.6; EXPRESSED IN HBL100, SIGNAL = 0.96; EXPRESSED IN BONE MARROW, SIGNAL = 0.93; EXPRESSED IN BT474, SIGNAL =   1; EXPRESSED IN PLACENTA, SIGNAL = 0.99
ELSPPPLAKGSDGYHGEPPE

SEQ ID NO: 48408 - protein, 29 aa, Homo sapiens
  MAP TO AC005948.6; EXPRESSED IN HBL100, SIGNAL = 0.96; EXPRESSED IN BONE MARROW, SIGNAL = 0.93; EXPRESSED IN BT474, SIGNAL =   1; EXPRESSED IN PLACENTA, SIGNAL = 0.99
ESPQRCEVVFQILELEIEGRQEKTNELDL

SEQ ID NO: 48409 - protein, 27 aa, Homo sapiens
  MAP TO AC010143.2; EXPRESSED IN BONE MARROW, SIGNAL = 1.6
MRVHGEDQGIIRREARDERKLEGSEHQ

SEQ ID NO: 48410 - protein, 23 aa, Homo sapiens
  MAP TO AC010143.2; EXPRESSED IN BONE MARROW, SIGNAL = 1.6
WCSEPSSFLSSRASRLMIPWSSP

SEQ ID NO: 48411 - protein, 56 aa, Homo sapiens
  MAP TO AC010970.1; EXPRESSED IN PLACENTA, SIGNAL = 1.4; EXPRESSED IN HBL100, SIGNAL = 1.1; EXPRESSED IN BONE MARROW, SIGNAL = 1.1; EST_HUMAN HIT: AA211295.1, EVALUE 1.00e-18; SWISSPROT HIT: P10643, EVALUE 8.90e-01
PRPQASPGYVQALDQNISITLGWGLQGGSPILWSPEMQNSRFIWKILLKGKATFRR

SEQ ID NO: 48412 - protein, 25 aa, Homo sapiens
  MAP TO AL109935.13; EXPRESSED IN PLACENTA, SIGNAL = 1.1; EXPRESSED IN BONE MARROW, SIGNAL = 1.2
PKEPSIFVANQFTNASPLTGMKLVP

SEQ ID NO: 48413 - protein, 64 aa, Homo sapiens
  MAP TO AC008013.8; EXPRESSED IN BONE MARROW, SIGNAL = 1.6; EXPRESSED IN BT474, SIGNAL =  17; EST_HUMAN HIT: BF183689.1, EVALUE 1.20e+00
ANDAEALQVPVPLQPALAPVQAPMEAPAAVPAQYPELPHLCPLHQRIIQIIQTYRVWWPLLILK

SEQ ID NO: 48414 - protein, 82 aa, Homo sapiens
  MAP TO AL049539.19; EXPRESSED IN BONE MARROW, SIGNAL = 0.94; SWISSPROT HIT: P28573, EVALUE 4.50e+00; EST_HUMAN HIT: AV746655.1, EVALUE 1.00e-02
MSLVQLSQLSEMGHVGNFSRFNKSCSMRPVNPTLLLPGSCHTPSSSNQASLAPDWDRVAERGSGASCLDLNPSCATYQLCDC

SEQ ID NO: 48415 - protein, 32 aa, Homo sapiens
  MAP TO AL096704.6; EXPRESSED IN PLACENTA, SIGNAL = 6.1; EXPRESSED IN BONE MARROW, SIGNAL = 0.92; EST_HUMAN HIT: AA250859.1, EVALUE 7.80e-02
IQTVKNSMAQKAWILQQINSKEKKQMKEESAY

SEQ ID NO: 48416 - protein, 55 aa, Homo sapiens
  MAP TO AL109758.1; EXPRESSED IN PLACENTA, SIGNAL = 0.69; EXPRESSED IN BT474, SIGNAL = 0.81; EXPRESSED IN BONE MARROW, SIGNAL = 0.9; EXPRESSED IN HBL100, SIGNAL = 0.8; EST_HUMAN HIT: AW293918.1, EVALUE 1.00e-24; SWISSPROT HIT: Q07890, EVALUE 4.00e-26
EVLGYKVDYHVSLYIVAVLEYISADILKLAGNYVFNIRHYEISQQDIKVSMCADK

SEQ ID NO: 48417 - protein, 55 aa, Homo sapiens
  MAP TO AC009297.2; EXPRESSED IN BONE MARROW, SIGNAL = 3.8; SWISSPROT HIT: Q07537, EVALUE 2.00e-22; EST_HUMAN HIT: AW160441.1, EVALUE 5.00e-21
CKTKVYPDELPNTSVVIVFHNEAWSTLLRTVYSVINRSPHYLLSEVILVDDASER

SEQ ID NO: 48418 - protein, 42 aa, Homo sapiens
  MAP TO AP000244.1; EXPRESSED IN PLACENTA, SIGNAL = 0.61; EXPRESSED IN BONE MARROW, SIGNAL = 0.81; SWISSPROT HIT: P49367, EVALUE 3.60e+00
ETETDKELEREKAVDRERQALNKTAEVLEGFLESDPGELILK

SEQ ID NO: 48419 - protein, 57 aa, Homo sapiens
  MAP TO AC009299.1; EXPRESSED IN BONE MARROW, SIGNAL = 0.77; EXPRESSED IN HELA, SIGNAL = 0.96; EST_HUMAN HIT: AA642080.1, EVALUE 1.80e+00; SWISSPROT HIT: P03133, EVALUE 8.80e-01
PHMPFSYFLPHDSREQLYYHLHRAVCKCERQFDFAQPQGEWIRKTTDIQKLARWLLL

SEQ ID NO: 48420 - protein, 44 aa, Homo sapiens
  MAP TO AC009299.1; EXPRESSED IN BONE MARROW, SIGNAL = 0.77; EXPRESSED IN HELA, SIGNAL = 0.96; SWISSPROT HIT: P28742, EVALUE 4.60e+00
PICHFPISCLMTAGSSSIITFTELSANVRGNSILLNHRESGLEK

SEQ ID NO: 48421 - protein, 64 aa, Homo sapiens
  MAP TO AL035703.19; EXPRESSED IN BT474, SIGNAL = 0.96; EXPRESSED IN BONE MARROW, SIGNAL = 2.3; EXPRESSED IN HBL100, SIGNAL = 1.7; EST_HUMAN HIT: AW821707.1, EVALUE 9.00e-08; SWISSPROT HIT: Q60390, EVALUE 2.50e+00
MIVKCFEGEGGHSAFQRILGKVREESLDVQTVVSLLRLYQYSNPAVKTALLDRKPEDVDTVQPK

SEQ ID NO: 48422 - protein, 34 aa, Homo sapiens
  MAP TO AL049633.3; EXPRESSED IN BONE MARROW, SIGNAL = 0.97
TMETACLKMKLAPRKAKQRHGEPGTDGPVGAICS

SEQ ID NO: 48423 - protein, 51 aa, Homo sapiens; identical to SEQ ID NO: 37343
  MAP TO AP000095.1; EXPRESSED IN BONE MARROW, SIGNAL = 0.62; EXPRESSED IN PLACENTA, SIGNAL = 0.74; SWISSPROT HIT: P39086, EVALUE 7.00e-26; EST_HUMAN HIT: W26913.1, EVALUE 7.00e-17

SEQ ID NO: 48424 - protein, 43 aa, Homo sapiens
  MAP TO AL049796.19; EXPRESSED IN BONE MARROW, SIGNAL =   1; EXPRESSED IN PLACENTA, SIGNAL = 0.89; EST_HUMAN HIT: N27707.1, EVALUE 4.00e-18; SWISSPROT HIT: P48507, EVALUE 3.00e-19
ESIPDIQAHEWVPLWLLRYSVIVKSRGIIKSKGYILQAKRRGS

SEQ ID NO: 48425 - protein, 27 aa, Homo sapiens
  MAP TO AC007327.1; EXPRESSED IN BONE MARROW, SIGNAL = 1.4; EST_HUMAN HIT: AI280645.1, EVALUE 8.10e-02
MFPEDYNGTGKFLLPGDIFMILIPCKP

SEQ ID NO: 48426 - protein, 45 aa, Homo sapiens
  MAP TO L78810.1; EXPRESSED IN HBL100, SIGNAL =   1; EXPRESSED IN BT474, SIGNAL = 0.9; EXPRESSED IN BONE MARROW, SIGNAL = 0.96; EST_HUMAN HIT: BE621144.1, EVALUE 1.00e-17; SWISSPROT HIT: Q01888, EVALUE 7.00e-01
MNLEKIWNGPRDQFSLPQNFANVCLAAAVTQTLSFPFETVKRKMQ

SEQ ID NO: 48427 - protein, 20 aa, Homo sapiens
  MAP TO L78810.1; EXPRESSED IN HBL100, SIGNAL =   1; EXPRESSED IN BT474, SIGNAL = 0.9; EXPRESSED IN BONE MARROW, SIGNAL = 0.96; EST_HUMAN HIT: BE621144.1, EVALUE 2.00e-03
EPGENLERTPRSVLSPTELC

SEQ ID NO: 48428 - protein, 46 aa, Homo sapiens
  MAP TO AC007564.9; EXPRESSED IN BONE MARROW, SIGNAL = 0.99
VIAIHEKLSNLAQIAELSLPAAPEITSNENIYEVEVEEESVDNEME

SEQ ID NO: 48429 - protein, 40 aa, Homo sapiens
  MAP TO AC006474.3; EXPRESSED IN HELA, SIGNAL = 0.62; EXPRESSED IN BT474, SIGNAL = 0.84; EXPRESSED IN BONE MARROW, SIGNAL = 0.72; EXPRESSED IN PLACENTA, SIGNAL = 0.91; EST_HUMAN HIT: AA904457.1, EVALUE 6.00e-17; SWISSPROT HIT: O58667, EVALUE 6.20e+00
MKRQQQQDSIDPSSRIDSELFKDPLKQRESEHEQEWKFRQ

SEQ ID NO: 48430 - protein, 116 aa, Homo sapiens
  MAP TO L78810.1; EXPRESSED IN BT474, SIGNAL = 0.91; EXPRESSED IN BONE MARROW, SIGNAL =   1; EXPRESSED IN HBL100, SIGNAL = 0.94; EXPRESSED IN HELA, SIGNAL =   1; SWISSPROT HIT: O66439, EVALUE 8.00e-06; EST_HUMAN HIT: BE744730.1, EVALUE 8.00e-54
MSIVRLSVHAKWIMGKVTGTKMQKTAKVRVIRLVLDPHLLKYYNKQKTYFAHNALQQCTIGDIVLLKALPVPRTKHVKHELAEIVFKVGKLVDPVTGKPRAGTTYLESPLSSETTQ

SEQ ID NO: 48431 - protein, 20 aa, Homo sapiens
  MAP TO L78810.1; EXPRESSED IN BT474, SIGNAL = 0.91; EXPRESSED IN BONE MARROW, SIGNAL =   1; EXPRESSED IN HBL100, SIGNAL = 0.94; EXPRESSED IN HELA, SIGNAL =   1; EST_HUMAN HIT: BE827799.1, EVALUE 2.00e-05
IRPCQMDYGEGDWDKNAKDC

SEQ ID NO: 48432 - protein, 17 aa, Homo sapiens
  MAP TO L78810.1; EXPRESSED IN BT474, SIGNAL = 0.91; EXPRESSED IN BONE MARROW, SIGNAL =   1; EXPRESSED IN HBL100, SIGNAL = 0.94; EXPRESSED IN HELA, SIGNAL =   1; EST_HUMAN HIT: AI189259.1, EVALUE 2.50e-01
YRASQSFTCSTNKACET

SEQ ID NO: 48433 - protein, 48 aa, Homo sapiens
  MAP TO AL031297.4; EXPRESSED IN PLACENTA, SIGNAL = 0.61; EXPRESSED IN BT474, SIGNAL = 1.6; EXPRESSED IN BONE MARROW, SIGNAL = 0.72; EXPRESSED IN HELA, SIGNAL =   1; EXPRESSED IN HBL100, SIGNAL = 0.74; EST_HUMAN HIT: AI273014.1, EVALUE 1.00e-23; SWISSPROT HIT: P36180, EVALUE 6.00e+00
SPMCVVCSHHSQISPILENPFSSIFPKCFFSGSTPINSKKHIQRDYYN

SEQ ID NO: 48434 - protein, 111 aa, Homo sapiens
  MAP TO AC010888.2; EXPRESSED IN BONE MARROW, SIGNAL = 0.99; EST_HUMAN HIT: AA608733.1, EVALUE 9.00e-34; SWISSPROT HIT: O59742, EVALUE 3.20e+00
SCNNISMDVELLFMDEQRKWFIEMESTSGEDAMNIVEMTITDINLYINLVKKAMAEFERIDFNFKRSSTVSQMLSNSITCYGDTFCEKRSPLMQQTSFLSYFMKLPQPPQL

SEQ ID NO: 48435 - protein, 121 aa, Homo sapiens
  MAP TO AC007773.1; EXPRESSED IN HELA, SIGNAL = 0.61; EXPRESSED IN PLACENTA, SIGNAL =   1; EXPRESSED IN BT474, SIGNAL = 0.73; EXPRESSED IN HBL100, SIGNAL = 0.68; EXPRESSED IN BONE MARROW, SIGNAL =  25; SWISSPROT HIT: Q57722, EVALUE 1.30e-01
MLVPDIGEQEAILTAESIISPSLEIDEQRKTKPDPLIHVIQKLSKIVENEKSQKCLLIGKKRPRSSAATHSLETQELCEIPAKVIQSPAADTRRAEMSQTNFTPDTLAQNEGKAMSYQCSL

SEQ ID NO: 48436 - protein, 42 aa, Homo sapiens; identical to SEQ ID NO: 35946
  MAP TO AL121759.5; EXPRESSED IN BONE MARROW, SIGNAL = 3.7

SEQ ID NO: 48437 - protein, 31 aa, Homo sapiens
  MAP TO AP000083.1; EXPRESSED IN BONE MARROW, SIGNAL = 1.1; EST_HUMAN HIT: AW299272.1, EVALUE 9.00e-05
QELPHHLWRGNGSRPPEVSCQIPRLCAAPVH

SEQ ID NO: 48438 - protein, 140 aa, Homo sapiens
  MAP TO AL132708.1; EXPRESSED IN BONE MARROW, SIGNAL = 1.1; SWISSPROT HIT: P50447, EVALUE 8.00e-28; EST_HUMAN HIT: AV649144.1, EVALUE 3.00e-27
FSMLCLGAQDSTLDEIKQGFNFRKMPEKDLHEGFHYIIHELTQKTQDLKLSIGNTLFIDQRLQPQRKFLEDAKNFYSAETILTNFQNLEMAQKQINDFISQKTHGKINNLIENIDPGTVMLLANYIFFRGKAFGMLVWKE

SEQ ID NO: 48439 - protein, 53 aa, Homo sapiens
  MAP TO AC011561.2; EXPRESSED IN BONE MARROW, SIGNAL = 0.99; SWISSPROT HIT: P50190, EVALUE 5.90e+00
VKREDKEFSLLVIGLLGEETGLSIFPEDVHGPVTILWGLNGYLFQNLLTSVLS

SEQ ID NO: 48440 - protein, 78 aa, Homo sapiens
  MAP TO AC012545.1; EXPRESSED IN BONE MARROW, SIGNAL = 0.98; SWISSPROT HIT: P30371, EVALUE 4.30e+00
ILFTEGQVLSTITLTILADNIPELSEVVIVTLTRITTEGVEDSYKGATIDQDRSKSVITTLPNDSPFGLVGWRAASVF

SEQ ID NO: 48441 - protein, 78 aa, Homo sapiens
  MAP TO AC007786.1; EXPRESSED IN HELA, SIGNAL = 0.65; EXPRESSED IN BT474, SIGNAL = 0.63; EXPRESSED IN BONE MARROW, SIGNAL = 0.66; SWISSPROT HIT: Q59468, EVALUE 2.30e+00; EST_HUMAN HIT: AV751685.1, EVALUE 7.30e-02
NASVHPAHQGGDVLVNDTALSVTRPRCGKGASGAEQDKELCVAGTHCGGEGSMYEAEEGLGCMVMWAMEGNLNLIPEE

SEQ ID NO: 48442 - protein, 195 aa, Homo sapiens
  MAP TO AC003029.1; EXPRESSED IN BONE MARROW, SIGNAL = 1.3; EXPRESSED IN BT474, SIGNAL = 0.9; EST_HUMAN HIT: AU140094.1, EVALUE 3.00e-32; SWISSPROT HIT: P20164, EVALUE 5.00e-34
MAHELGHNLGIQHDHSACFCKDKHFCLMHENITKESGFSSCSSDYFYQFLREHKGACLFNKPRPRGRKRRDSACGNGVVEDTEQCDCGSLCQHHACCDENCILKAKAECSDGPCCHKCKFHRKGYPCCPSSRSCDLPEFCNGTSALCPNNRHKQDGSKCHTIYECLKVHCMDPNNQCLQLYGYGAKSASQECYNS

SEQ ID NO: 48443 - protein, 65 aa, Homo sapiens
  MAP TO AC008417.2; EXPRESSED IN BONE MARROW, SIGNAL = 0.92; EXPRESSED IN HBL100, SIGNAL = 1.4; EXPRESSED IN HELA, SIGNAL = 1.5; EST_HUMAN HIT: AA883564.1, EVALUE 1.00e-28; SWISSPROT HIT: Q16706, EVALUE 6.00e-32; EST_HUMAN HIT: AA883564.1, EVALUE 1.00e-28
EEEKKSVSYPSLLSHITSSLMNHPVIPMANKFSSPTLELQGEFSPLQSSLPCDIHLVNLRTIQSK

SEQ ID NO: 48444 - protein, 27 aa, Homo sapiens
  MAP TO AL117353.2; EXPRESSED IN HELA, SIGNAL = 0.91; EXPRESSED IN BONE MARROW, SIGNAL =   1; EST_HUMAN HIT: W87839.1, EVALUE 1.00e-04
NQKAGLTIYQICQHLDLGFPSFQNCEK

SEQ ID NO: 48445 - protein, 50 aa, Homo sapiens
  MAP TO AL034347.15; EXPRESSED IN BONE MARROW, SIGNAL = 0.94; SWISSPROT HIT: P57210, EVALUE 2.70e+00; EST_HUMAN HIT: BE566615.1, EVALUE 1.00e-22
TEIVKPYTPVSGSLLSEFKEPVLPNNKYIYFLIKIYPTGLFTPELDRLQI

SEQ ID NO: 48446 - protein, 26 aa, Homo sapiens
  MAP TO AL034347.15; EXPRESSED IN BONE MARROW, SIGNAL = 0.94; EST_HUMAN HIT: BE566615.1, EVALUE 4.00e-08
YRNSKAIYTCIWFLTLRVQGTSSSQQ

SEQ ID NO: 48447 - protein, 29 aa, Homo sapiens
  MAP TO AC012460.2; EXPRESSED IN BONE MARROW, SIGNAL = 0.98; EST_HUMAN HIT: AU134546.1, EVALUE 1.00e-09
FVGDYSGQITLLKLEQNTCSVITTLKGHE

SEQ ID NO: 48448 - protein, 30 aa, Homo sapiens
  MAP TO AC006459.2; EXPRESSED IN BT474, SIGNAL = 0.7; EXPRESSED IN BONE MARROW, SIGNAL = 0.94; EXPRESSED IN PLACENTA, SIGNAL = 0.64; EST_HUMAN HIT: BE011883.1, EVALUE 5.30e+00
YSIDPAPFIEKAILLLKCSKVVVLNQVIKH

SEQ ID NO: 48449 - protein, 17 aa, Homo sapiens
  MAP TO AL031585.1; EXPRESSED IN BONE MARROW, SIGNAL = 1.2
ENVHSHHSYSCSAGSSS

SEQ ID NO: 48450 - protein, 37 aa, Homo sapiens
  MAP TO AF130358.1; EXPRESSED IN BONE MARROW, SIGNAL = 1.7; SWISSPROT HIT: Q92887, EVALUE 1.00e-04; EST_HUMAN HIT: BF094599.1, EVALUE 9.00e-03
LAASRTMYVQLLNNVLHLPIQFFETNSTGQIISRFTK

SEQ ID NO: 48451 - protein, 63 aa, Homo sapiens
  MAP TO AC004859.2; EXPRESSED IN BONE MARROW, SIGNAL = 0.77; EST_HUMAN HIT: AA077526.1, EVALUE 8.00e-09; SWISSPROT HIT: Q13751, EVALUE 4.40e+00
HSPRYQAEHRCAPYHHRPYSLVQGQGAHRQCHEVGVGGVLQDTGLVSRQVTEDLTFKWKLQGQ

SEQ ID NO: 48452 - protein, 59 aa, Homo sapiens
  MAP TO AC007021.2; EXPRESSED IN PLACENTA, SIGNAL =   3; EXPRESSED IN BONE MARROW, SIGNAL = 1.6; EST_HUMAN HIT: W23667.1, EVALUE 4.00e-10; SWISSPROT HIT: P24720, EVALUE 5.10e-01
CPKMRRHAFELKMLDKYSHYLAAETEQEMEEWLITLKKIIQINTDSLVQEKKETVETAQ

SEQ ID NO: 48453 - protein, 34 aa, Homo sapiens
  MAP TO AC007043.3; EXPRESSED IN BONE MARROW, SIGNAL = 0.84; EXPRESSED IN BT474, SIGNAL =  11; SWISSPROT HIT: Q93591, EVALUE 1.60e+00; EST_HUMAN HIT: T60216.1, EVALUE 2.00e-04
FTDETAKQIPPLLPSQFGDDEDEDLYDNPVPLNE

SEQ ID NO: 48454 - protein, 53 aa, Homo sapiens
  MAP TO AL031430.1; EXPRESSED IN BONE MARROW, SIGNAL = 0.97; EST_HUMAN HIT: AW134890.1, EVALUE 4.90e-01; SWISSPROT HIT: O34570, EVALUE 4.50e+00
TPAGPQRHSQHYYLKRAQTVSPCLPPLQCLHRHLGVPDPEGLALPLFHAPLLQ

SEQ ID NO: 48455 - protein, 52 aa, Homo sapiens
  MAP TO AL031599.1; EXPRESSED IN BONE MARROW, SIGNAL = 1.2; EST_HUMAN HIT: BE270854.1, EVALUE 6.50e-01; SWISSPROT HIT: P25003, EVALUE 1.20e+00
MCLSHLENMPLSHSRTQGAQRSSWKLWLFCSIVMLLFLCSFSWLIFIFLQLE

SEQ ID NO: 48456 - protein, 43 aa, Homo sapiens
  MAP TO AF111168.2; EXPRESSED IN BT474, SIGNAL = 0.81; EXPRESSED IN BONE MARROW, SIGNAL =   1; EST_HUMAN HIT: AI564317.1, EVALUE 2.00e-17; SWISSPROT HIT: P97363, EVALUE 1.00e-18
AFGREMLKRNIGVVVVGFPATPIIESRARFCLSAAHTKEILDT

SEQ ID NO: 48457 - protein, 89 aa, Homo sapiens
  MAP TO AP000106.1; EXPRESSED IN BONE MARROW, SIGNAL = 0.93; SWISSPROT HIT: O43426, EVALUE 1.00e-35; EST_HUMAN HIT: AI827156.1, EVALUE 2.00e-14
LENVGIFHPVKSLGFAGDTMLHYLVLVTGCMSVGKIQESEVFRVTSTEFISLRIDSSDEDRISEVRKVLNSGNFYFAWSASGISLDLSL

SEQ ID NO: 48458 - protein, 55 aa, Homo sapiens
  MAP TO AC008277.1; EXPRESSED IN PLACENTA, SIGNAL = 0.65; EXPRESSED IN BONE MARROW, SIGNAL = 0.81; EST_HUMAN HIT: BF670714.1, EVALUE 2.00e-15
AEWWRTTDAHTRTGATFFPPLLGIPPLFAPPAQNHDSSSFHSRTSGKSNRNGPEK

SEQ ID NO: 48459 - protein, 76 aa, Homo sapiens
  MAP TO AC007910.1; EXPRESSED IN BONE MARROW, SIGNAL = 1.2; EST_HUMAN HIT: BE146928.1, EVALUE 2.00e-01
  unsure 57
QSQRSPHHKQIYLQSTQMGPSLFFSVQCLSTSTLGVGAVDLCSTIPLNLLPNSLPLXCPHRGHWPFTSRFGEPGVR

SEQ ID NO: 48460 - protein, 67 aa, Homo sapiens
  MAP TO AC007564.9; EXPRESSED IN BT474, SIGNAL = 0.67; EXPRESSED IN BONE MARROW, SIGNAL = 1.1; EXPRESSED IN HBL100, SIGNAL = 0.94; SWISSPROT HIT: P33215, EVALUE 9.00e-32; EST_HUMAN HIT: AW131603.1, EVALUE 1.10e+00
LVKTLVADTPLTAVDFMPDGATLAIGSSRGKIYQYDLRMLKSPVKTISAHKTSVQCIAFQYSTVLTK

SEQ ID NO: 48461 - protein, 61 aa, Homo sapiens
  MAP TO Z83851.17; EXPRESSED IN BT474, SIGNAL = 0.78; EXPRESSED IN HBL100, SIGNAL = 0.77; EXPRESSED IN HELA, SIGNAL = 0.65; EXPRESSED IN PLACENTA, SIGNAL = 0.62; EXPRESSED IN BONE MARROW, SIGNAL = 1.2; EST_HUMAN HIT: BE974520.1, EVALUE 5.30e-01; SWISSPROT HIT: P48631, EVALUE 7.60e+00
QRIFSAQRVLLTFLPHAQPASHPHTSARTSALLWEKDILTTQRQSQGITLGSEFPRNVLNP

SEQ ID NO: 48462 - protein, 39 aa, Homo sapiens
  MAP TO Z83851.17; EXPRESSED IN BT474, SIGNAL = 0.78; EXPRESSED IN HBL100, SIGNAL = 0.77; EXPRESSED IN HELA, SIGNAL = 0.65; EXPRESSED IN PLACENTA, SIGNAL = 0.62; EXPRESSED IN BONE MARROW, SIGNAL = 1.2; EST_HUMAN HIT: AA912959.1, EVALUE 3.70e+00
GLRTFLGNSEPSVIPCDWRWVVRISFSHRRAEVRAEVCG

SEQ ID NO: 48463 - protein, 93 aa, Homo sapiens
  MAP TO AL096819.2; EXPRESSED IN BONE MARROW, SIGNAL = 0.93; SWISSPROT HIT: P38935, EVALUE 9.70e+00; EST_HUMAN HIT: BF311088.1, EVALUE 7.90e+00
RWNMPSLQKIPEFYHILQEVHVSRKKAQNKCEKTRFREKHWGSLTFKKWKKSDKQDHKVWKQNREKSRRSQRRDIFKEKVANSVLCYSEVKQD

SEQ ID NO: 48464 - protein, 32 aa, Homo sapiens
  MAP TO AC005487.2; EXPRESSED IN BONE MARROW, SIGNAL = 2.6; EST_HUMAN HIT: AV712991.1, EVALUE 7.60e+00
PLEAEGSRGLGELLQYHCSSISDNSKHPSDLT

SEQ ID NO: 48465 - protein, 27 aa, Homo sapiens
  MAP TO AC011192.1; EXPRESSED IN BONE MARROW, SIGNAL =  11
ESFYISPKIIHKNSQEEAHFSTKAWFV

SEQ ID NO: 48466 - protein, 67 aa, Homo sapiens
  MAP TO AC007554.1; EXPRESSED IN BONE MARROW, SIGNAL = 1.1; EXPRESSED IN HELA, SIGNAL =   2; EST_HUMAN HIT: AW380628.1, EVALUE 4.00e-18; SWISSPROT HIT: P13611, EVALUE 3.00e-19
  unsure 22
MLRIHGMVSWKINKHKNRLHRXEQIEVGPLVTSMEILKHIPSKEFPVTETPLVTARMILESKTEKKM

SEQ ID NO: 48467 - protein, 95 aa, Homo sapiens
  MAP TO AP000012.2; EXPRESSED IN BT474, SIGNAL = 0.95; EXPRESSED IN BONE MARROW, SIGNAL =   1; EXPRESSED IN HBL100, SIGNAL = 1.1; EST_HUMAN HIT: AU119258.1, EVALUE 2.00e-29; SWISSPROT HIT: Q63470, EVALUE 2.00e-30
RKLHNILGVETGGPGGRRAGESGHTVADYLKFKDLILRMLDYDPKTRIQPYYALQHSFFKKTADEGTNTSNSVSTSPAMEQSQSSGTTSSTSSSS

SEQ ID NO: 48468 - protein, 29 aa, Homo sapiens
  MAP TO AP000012.2; EXPRESSED IN BT474, SIGNAL = 0.95; EXPRESSED IN BONE MARROW, SIGNAL =   1; EXPRESSED IN HBL100, SIGNAL = 1.1; EST_HUMAN HIT: AI002722.1, EVALUE 3.00e-09
VNFITFLEWKQEDLVGDVLGSQVIRSLTT

SEQ ID NO: 48469 - protein, 60 aa, Homo sapiens; identical to SEQ ID NO: 36935
  MAP TO AC008168.2; EXPRESSED IN BONE MARROW, SIGNAL = 1.7; EST_HUMAN HIT: BF528425.1, EVALUE 7.90e+00; SWISSPROT HIT: P06126, EVALUE 4.40e+00

SEQ ID NO: 48470 - protein, 80 aa, Homo sapiens
  MAP TO AC008069.2; EXPRESSED IN BONE MARROW, SIGNAL = 0.64; SWISSPROT HIT: P26673, EVALUE 4.70e+00; EST_HUMAN HIT: AW886252.1, EVALUE 2.00e-15
DRLSLLSKLNMSHKSGSFVTHSVSLKCAASDDRFSKRNLWSSCDSKSLASDIPLESHFTSVYKRRCMCSATISSQSCANR

SEQ ID NO: 48471 - protein, 44 aa, Homo sapiens
  MAP TO AC007364.2; EXPRESSED IN BONE MARROW, SIGNAL = 1.4; EST_HUMAN HIT: F34819.1, EVALUE 6.10e+00; EST_HUMAN HIT: F34819.1, EVALUE 6.10e+00; SWISSPROT HIT: P36381, EVALUE 4.90e-02
SSAEEEKPAKDTEHDQPVKQKKQPEDCGVIEAEEESVSKEVCSG

SEQ ID NO: 48472 - protein, 18 aa, Homo sapiens
  MAP TO AC007364.2; EXPRESSED IN BONE MARROW, SIGNAL = 1.4
EVQQRKRSQQKTLSMTNQ

SEQ ID NO: 48473 - protein, 47 aa, Homo sapiens
  MAP TO AC007381.2; EXPRESSED IN BONE MARROW, SIGNAL = 0.81
KHGNHTNNKARSNNDNSNHNSDHVWNAPVCPVLYIADFMSLSQHTFE

SEQ ID NO: 48474 - protein, 52 aa, Homo sapiens
  MAP TO AC004480.7; EXPRESSED IN BONE MARROW, SIGNAL = 0.79; EST_HUMAN HIT: AA496526.1, EVALUE 8.50e-01; SWISSPROT HIT: P52189, EVALUE 3.50e+00
PGALAVSWSLALPTVGTQGQGGSDSPLFPQPCQALNMPLGIILEDFFLHWTI

SEQ ID NO: 48475 - protein, 35 aa, Homo sapiens
  MAP TO AC009363.3; EXPRESSED IN BT474, SIGNAL = 0.99; EXPRESSED IN HBL100, SIGNAL =   1; EXPRESSED IN BONE MARROW, SIGNAL = 0.99; EST_HUMAN HIT: BE385111.1, EVALUE 2.00e-05; EST_HUMAN HIT: BE385111.1, EVALUE 2.00e-05
DSSDDVRRVQRREKNRIAAQKSRQRQTQKADTLHL

SEQ ID NO: 48476 - protein, 31 aa, Homo sapiens
  MAP TO AC009363.3; EXPRESSED IN BT474, SIGNAL = 0.99; EXPRESSED IN HBL100, SIGNAL =   1; EXPRESSED IN BONE MARROW, SIGNAL = 0.99; EST_HUMAN HIT: BE890655.1, EVALUE 4.00e-07; SWISSPROT HIT: P43681, EVALUE 2.10e+00
KSYCRPEEPTEADTEGRHPAPGKCSDQSSSS

SEQ ID NO: 48477 - protein, 35 aa, Homo sapiens
  MAP TO AC009640.2; EXPRESSED IN BONE MARROW, SIGNAL =   1; EXPRESSED IN BT474, SIGNAL = 1.3
GELSLEAVEPGTMTNIMQQKYSRKISMPLPIGTDT

SEQ ID NO: 48478 - protein, 51 aa, Homo sapiens
  MAP TO AC005018.2; EXPRESSED IN BONE MARROW, SIGNAL = 0.93; EST_HUMAN HIT: AW500032.1, EVALUE 1.00e-22; SWISSPROT HIT: P48736, EVALUE 2.00e-23
ICVKAYLALRHHTNLLIILFSMMLMTGMPQLTSKEDIEYIRDALTVGKNEE

SEQ ID NO: 48479 - protein, 73 aa, Homo sapiens
  MAP TO AC010104.1; EXPRESSED IN BONE MARROW, SIGNAL = 0.92; EST_HUMAN HIT: T56571.1, EVALUE 5.20e+00
VSGIFLKHCMLIQILSWCFDCHKPEGPRRSRIITEENLGNPIRSAFQRSSGQRHVSPPDFGVSQSDVFIAFDY

SEQ ID NO: 48480 - protein, 92 aa, Homo sapiens
  MAP TO AC011363.1; EXPRESSED IN BONE MARROW, SIGNAL = 0.99; EST_HUMAN HIT: AW024552.1, EVALUE 8.00e-25; SWISSPROT HIT: O54827, EVALUE 2.00e-29
HHRGNQIKTSKYTVLSFVPKNIFEQLHRFANLYFVGIAVLNFIPVVNAFQPEVSMIPICVILAVTAIKDAWEDLRRYKSDKVINNRECLIYS

SEQ ID NO: 48481 - protein, 63 aa, Homo sapiens
  MAP TO AC007460.1; EXPRESSED IN BONE MARROW, SIGNAL =   1; EST_HUMAN HIT: BF357949.1, EVALUE 6.00e-19
VRQFIEMVNGTDSEVRCLGGRSPKSQDSYPVSPRPFSSPSMSPSHGMNIHNLASGKGSTAHFS

SEQ ID NO: 48482 - protein, 19 aa, Homo sapiens
  MAP TO AC007544.4; EXPRESSED IN BONE MARROW, SIGNAL = 1.1; EXPRESSED IN PLACENTA, SIGNAL = 0.91
SSEFTVCNQVCNLKFLYAI

SEQ ID NO: 48483 - protein, 34 aa, Homo sapiens
  MAP TO AL023583.13; EXPRESSED IN BONE MARROW, SIGNAL =   1; EXPRESSED IN HBL100, SIGNAL = 1.3; EST_HUMAN HIT: AW893124.1, EVALUE 7.70e-01
KASQRNNSKMGAKKPLILTPSPVIFPLYHTTNYF

SEQ ID NO: 48484 - protein, 86 aa, Homo sapiens
  MAP TO AL109627.8; EXPRESSED IN BONE MARROW, SIGNAL = 0.95; EXPRESSED IN HBL100, SIGNAL = 0.98; SWISSPROT HIT: O88307, EVALUE 1.10e+00; EST_HUMAN HIT: AU120578.1, EVALUE 2.00e-03
LSCLFDHPGTVFFSIFMSFWGHGLPGALEAGSATLAHHWDCSDFQDQEAMPSSAPHHWDCSDFQDQEVMPSSALHHWDCSDFQDQE

SEQ ID NO: 48485 - protein, 23 aa, Homo sapiens
  MAP TO AC012513.2; EXPRESSED IN BONE MARROW, SIGNAL = 1.7; EXPRESSED IN HELA, SIGNAL = 1.3; EST_HUMAN HIT: AW954545.1, EVALUE 3.00e-06
MAAPRPSLPDLLRDVWLHGRGVH

SEQ ID NO: 48486 - protein, 55 aa, Homo sapiens
  MAP TO AC012513.2; EXPRESSED IN BONE MARROW, SIGNAL = 1.7; EXPRESSED IN HELA, SIGNAL = 1.3; EST_HUMAN HIT: AW954545.1, EVALUE 1.00e-05
LRRFRLQPPSWAPSSSSPVFLGSSGQLSAPRQDGSAKTFSSRSATGCMASWTWCA

SEQ ID NO: 48487 - protein, 60 aa, Homo sapiens
  MAP TO AC012528.1; EXPRESSED IN BONE MARROW, SIGNAL = 0.91; SWISSPROT HIT: P22897, EVALUE 7.60e+00
VMINHNFTKIAILIFTVLFFSCFDDSSFCDNPPINFLSKNTGQQISTAGDCSKSKTSSGN

SEQ ID NO: 48488 - protein, 23 aa, Homo sapiens
  MAP TO AC012528.1; EXPRESSED IN BONE MARROW, SIGNAL = 0.91
VATGGLAFATVPSSRDLLSCVLG

SEQ ID NO: 48489 - protein, 49 aa, Homo sapiens
  MAP TO AL021328.1; EXPRESSED IN BONE MARROW, SIGNAL = 3.3
LLIGNTEVQRRRIRTVMMIIKLMTIIIIIKLTFIHRREWKLLEKIRLFT

SEQ ID NO: 48490 - protein, 38 aa, Homo sapiens
  MAP TO AC010812.2; EXPRESSED IN BONE MARROW, SIGNAL = 1.1
SPRLCSVNDYEGNDSEAEDLNFREALPSSSQENTPRSK

SEQ ID NO: 48491 - protein, 35 aa, Homo sapiens
  MAP TO AC011299.1; EXPRESSED IN HBL100, SIGNAL = 0.92; EXPRESSED IN BONE MARROW, SIGNAL = 1.1; EST_HUMAN HIT: AW504489.1, EVALUE 1.00e-14; SWISSPROT HIT: Q9Y3T9, EVALUE 4.80e+00
DAEDGEEYDDPFAGPPDTISLASERYDKDDEAPSD

SEQ ID NO: 48492 - protein, 20 aa, Homo sapiens
  MAP TO AP000169.1; EXPRESSED IN BONE MARROW, SIGNAL = 0.76
LGCVFEGFQRVEVEEEELGE

SEQ ID NO: 48493 - protein, 27 aa, Homo sapiens
  MAP TO AF130342.1; EXPRESSED IN BONE MARROW, SIGNAL = 2.3; SWISSPROT HIT: Q01826, EVALUE 6.40e+00
PDEEVIKTIVLDLDKPGFVTLDKLFDN

SEQ ID NO: 48494 - protein, 31 aa, Homo sapiens
  MAP TO AB020872.1; EXPRESSED IN BONE MARROW, SIGNAL = 0.95
VMEENTRGTSAMVLGNVRVEIGGILGVEAGQ

SEQ ID NO: 48495 - protein, 27 aa, Homo sapiens
  MAP TO AB020872.1; EXPRESSED IN BONE MARROW, SIGNAL = 0.95
CNGREHQRNFSYGFRKCQSGNRGNTGS

SEQ ID NO: 48496 - protein, 67 aa, Homo sapiens
  MAP TO AF176315.1; EXPRESSED IN BONE MARROW, SIGNAL = 0.9; SWISSPROT HIT: P77868, EVALUE 6.10e+00; EST_HUMAN HIT: BF330701.1, EVALUE 3.80e-01
TLNYAGSEELGTDSQFPAAWGLIWMLVVSIPSLDTLGSCLWGLHNAQLPLGQRGPWHCKPSLRGQVK

SEQ ID NO: 48497 - protein, 30 aa, Homo sapiens
  MAP TO AC007951.1; EXPRESSED IN BONE MARROW, SIGNAL = 0.63
NSVVILFTDTTGSVCSIVHKRTGHRPNGLK

SEQ ID NO: 48498 - protein, 49 aa, Homo sapiens
  MAP TO AC008041.5; EXPRESSED IN BONE MARROW, SIGNAL = 0.68; SWISSPROT HIT: P32926, EVALUE 4.60e+00
RHFYCTVIIIILTISSNQKMEIPKNMQRSTTLETDLVDEANHCNDDYGT

SEQ ID NO: 48499 - protein, 34 aa, Homo sapiens
  MAP TO AL049911.2; EXPRESSED IN BONE MARROW, SIGNAL =   1; SWISSPROT HIT: P21781, EVALUE 5.00e-12; EST_HUMAN HIT: AA009608.1, EVALUE 4.00e-05
IMEIRTVAVGIVAIKGVESEFYLAMNEEGKLYAK

SEQ ID NO: 48500 - protein, 19 aa, Homo sapiens
  MAP TO AL049911.2; EXPRESSED IN BONE MARROW, SIGNAL =   1; EST_HUMAN HIT: AA009608.1, EVALUE 2.00e-05
YHGNQDSGSWDCGNQRGGK

SEQ ID NO: 48501 - protein, 51 aa, Homo sapiens
  MAP TO AC012354.2; EXPRESSED IN BONE MARROW, SIGNAL = 1.2; SWISSPROT HIT: P35901, EVALUE 7.80e+00
IKSDHSYFKNGQKNYMTQLKVQPKAMNGLSQEGAAPHFPLHAVPTRGYYGQ

SEQ ID NO: 48502 - protein, 60 aa, Homo sapiens
  MAP TO AF053356.1; EXPRESSED IN BONE MARROW, SIGNAL = 0.93; SWISSPROT HIT: P01588, EVALUE 9.00e-28; EST_HUMAN HIT: AA662379.1, EVALUE 3.00e-10
VGQQAVEVWQGLALLSEAVLRGQALLVNSSQPWEPLQLHVDKAVSGLRSLTTLLRALGAQ

SEQ ID NO: 48503 - protein, 44 aa, Homo sapiens
  MAP TO AF053356.1; EXPRESSED IN BONE MARROW, SIGNAL = 0.93; EST_HUMAN HIT: AA662379.1, EVALUE 1.00e-04; SWISSPROT HIT: P46804, EVALUE 3.10e-01
LPVGRAAGRRSLAGPGPAVGSCPAGPGPVGQLFPAVGAPAAACG

SEQ ID NO: 48504 - protein, 53 aa, Homo sapiens
  MAP TO AC007461.8; EXPRESSED IN BONE MARROW, SIGNAL = 2.6; SWISSPROT HIT: P22086, EVALUE 5.90e+00; EST_HUMAN HIT: AA148039.1, EVALUE 2.20e-01
GGHGPNAKDERPAPCSSVSFYFATEIICRLYDSCQCPQPLTSMFTWPFCYLPL

SEQ ID NO: 48505 - protein, 29 aa, Homo sapiens
  MAP TO AL117672.1; EXPRESSED IN BONE MARROW, SIGNAL = 0.93
SSRKKDQKDLQNATSECCNGYKRSQKNIC

SEQ ID NO: 48506 - protein, 123 aa, Homo sapiens; identical to SEQ ID NO: 36840
  MAP TO AL121757.2; EXPRESSED IN BONE MARROW, SIGNAL = 0.93; EST_HUMAN HIT: BE279525.1, EVALUE 3.00e-04; SWISSPROT HIT: P97295, EVALUE 5.00e-09

SEQ ID NO: 48507 - protein, 74 aa, Homo sapiens
  MAP TO Z86090.10; EXPRESSED IN BONE MARROW, SIGNAL = 0.68; EST_HUMAN HIT: AV702981.1, EVALUE 4.00e-30
GPFYIKPKPVTLRLIVSKKLDLHVLLQKTPKTPNVTYAVLLLKSSHLPGVRWYSQLAHSPMTAGWGTFGWKLLN

SEQ ID NO: 48508 - protein, 182 aa, Homo sapiens
  MAP TO AL049836.2; EXPRESSED IN BONE MARROW, SIGNAL = 0.62; EST_HUMAN HIT: BE873060.1, EVALUE 1.20e-01; SWISSPROT HIT: P08575, EVALUE 2.50e+00
FLPVKGDNREATLEKECDVLFADPGSSERTKLENGEKGAGGLFLALVRGARAQPAGLLQRPWLYNLSLGDRAQEQRVSPAPGEAGTLSWVPVAASVPSCLPTALTHPRKGGACLHFGASLPARSSETLGSPQGWVDWPHSGSAYAHVWHGRLCSSWFVIYSRASLNISQPWPEWSWQSTGVR

SEQ ID NO: 48509 - protein, 54 aa, Homo sapiens
  MAP TO AF088219.1; EXPRESSED IN BONE MARROW, SIGNAL = 0.98; EST_HUMAN HIT: AW827147.1, EVALUE 4.00e-08; SWISSPROT HIT: O15467, EVALUE 5.00e-27
FVTKRNREVCTNPNDDWVQEYIKDPNLPLLPTRNLSTVKIITAKNGQPQLLNSQ

SEQ ID NO: 48510 - protein, 36 aa, Homo sapiens
  MAP TO AF088219.1; EXPRESSED IN BONE MARROW, SIGNAL = 0.98; EST_HUMAN HIT: T58847.1, EVALUE 1.10e-01; SWISSPROT HIT: P21411, EVALUE 8.20e+00
GTEKSAPTPMTTGSKSTSRIPTYLCCLPGTCPRLKL

SEQ ID NO: 48511 - protein, 34 aa, Homo sapiens
  MAP TO AB016897.1; EXPRESSED IN BONE MARROW, SIGNAL = 1.3
FKSTKRIAVSVDWLRKSLNIALVLGRVDKCHTGS

SEQ ID NO: 48512 - protein, 22 aa, Homo sapiens
  MAP TO AL022319.2; EXPRESSED IN BONE MARROW, SIGNAL = 1.6
EGEGVGEEVRKTVDSQIKDVLV

SEQ ID NO: 48513 - protein, 33 aa, Homo sapiens
  MAP TO AC004032.7; EXPRESSED IN BONE MARROW, SIGNAL = 1.6; SWISSPROT HIT: Q03696, EVALUE 9.80e-01
MKEQLPGWHGKTKGTAVPQPSGSLATQSWKVWK

SEQ ID NO: 48514 - protein, 32 aa, Homo sapiens
  MAP TO AP000041.1; EXPRESSED IN BONE MARROW, SIGNAL = 1.4
IETLKHSLISPFRICGSPPWRVLALRKLTPTI

SEQ ID NO: 48515 - protein, 51 aa, Homo sapiens
  MAP TO AP000352.2; EXPRESSED IN BONE MARROW, SIGNAL = 1.4; EST_HUMAN HIT: BE274822.1, EVALUE 1.00e-19
WTLRRKMIPLITMKSSQKPNWKASQALGLKGCHLTQPHSWNLVGIEQCDHS

SEQ ID NO: 48516 - protein, 29 aa, Homo sapiens
  MAP TO AC007286.18; EXPRESSED IN BONE MARROW, SIGNAL = 3.7
KNNGYYKQGTVKVSGRKYNRKVVLAPFGE

SEQ ID NO: 48517 - protein, 27 aa, Homo sapiens
  MAP TO AC006992.2; EXPRESSED IN BONE MARROW, SIGNAL = 1.3; EXPRESSED IN HELA, SIGNAL = 1.3
MFWNQREDQCGWNTGGRGRLGGHEAGE

SEQ ID NO: 48518 - protein, 29 aa, Homo sapiens
  MAP TO AP000346.1; EXPRESSED IN BONE MARROW, SIGNAL = 1.3
MDGVHWPIIKRQKLCKKLFQRATRPASYC

SEQ ID NO: 48519 - protein, 29 aa, Homo sapiens
  MAP TO AP000346.1; EXPRESSED IN BONE MARROW, SIGNAL = 1.3
WMVSIGQSLRDKNSARSYSREQLAQPPTA

SEQ ID NO: 48520 - protein, 48 aa, Homo sapiens
  MAP TO AC007463.3; EXPRESSED IN BONE MARROW, SIGNAL = 1.4
PPLHGRAMRLSLKILQKLKNNVRVNNVSCWLQTSMEINHSHFEHCYQI

SEQ ID NO: 48521 - protein, 28 aa, Homo sapiens
  MAP TO AL022329.9; EXPRESSED IN BONE MARROW, SIGNAL = 1.4
YAGCPVPEIPDYSGFGTSHLSIFSCFPL

SEQ ID NO: 48522 - protein, 42 aa, Homo sapiens
  MAP TO AC004624.6; EXPRESSED IN BONE MARROW, SIGNAL = 1.4; SWISSPROT HIT: P13605, EVALUE 2.80e+00; EST_HUMAN HIT: AV740543.1, EVALUE 9.30e+00
LRLRFPWRRTASDQHACLAQSRSPQQTLPMDCVGECECPALW

SEQ ID NO: 48523 - protein, 34 aa, Homo sapiens
  MAP TO AC005832.1; EXPRESSED IN BONE MARROW, SIGNAL = 0.56; EST_HUMAN HIT: AA356154.1, EVALUE 1.00e-12; SWISSPROT HIT: P13611, EVALUE 6.50e+00
SLPKKVSLSSDTTRKPLEIRSPSAESKKPKWVPP

SEQ ID NO: 48524 - protein, 25 aa, Homo sapiens
  MAP TO AC005195.1; EXPRESSED IN BONE MARROW, SIGNAL = 0.55
ECVLLAEVKNECEWPAGLRSSLNHR

SEQ ID NO: 48525 - protein, 47 aa, Homo sapiens
  MAP TO AC004067.1; EXPRESSED IN BONE MARROW, SIGNAL = 0.9; EST_HUMAN HIT: BF686554.1, EVALUE 8.90e+00; SWISSPROT HIT: P34885, EVALUE 2.80e+00
WTIVSDILSATHRYWQNESPVVSSSHLSNALTLALFPSCIMPPILFL

SEQ ID NO: 48526 - protein, 122 aa, Homo sapiens
  MAP TO AC004974.1; EXPRESSED IN BONE MARROW, SIGNAL = 0.5; SWISSPROT HIT: P97608, EVALUE 3.40e+00
SWVVFQNLLREICLLLISIMINNSLDIMFTHCSYAPFYFFPQLNLNVFFQVQFLKFFLEHKYSNKKTALSLIKPFVVFLPTEPLPVSYILVFFFQLDNRDLRIEMAPCVTDSDCLKSPMLAA

SEQ ID NO: 48527 - protein, 77 aa, Homo sapiens
  MAP TO AC005828.1; EXPRESSED IN BONE MARROW, SIGNAL = 0.49; EST_HUMAN HIT: BE009356.1, EVALUE 1.00e-38; SWISSPROT HIT: O15027, EVALUE 2.40e+00
VVAYHYCQADNAYTCLVPEFVHNVAALLCRSPQLTAYREQLLREPHLQSMLSLRSCVQDPMASFRRGVLEPLENLHK

SEQ ID NO: 48528 - protein, 27 aa, Homo sapiens
  MAP TO AC005828.1; EXPRESSED IN BONE MARROW, SIGNAL = 0.49; EST_HUMAN HIT: BE009356.1, EVALUE 1.00e-07
VKQIMPTLAWCQNLSTMLLPCSAAHLS

SEQ ID NO: 48529 - protein, 57 aa, Homo sapiens
  MAP TO AC006345.2; EXPRESSED IN BONE MARROW, SIGNAL = 1.2; SWISSPROT HIT: P55937, EVALUE 2.70e+00; EST_HUMAN HIT: AW277011.1, EVALUE 1.00e-25
TDGFLKDNNNAAQRLLDGMNFMAQSVSELSLGPTKAVTSWLTDQIAPAYWRPNSQIL

SEQ ID NO: 48530 - protein, 57 aa, Homo sapiens
  MAP TO AL050320.19; EXPRESSED IN PLACENTA, SIGNAL = 2.2; EXPRESSED IN BONE MARROW, SIGNAL = 0.45; EST_HUMAN HIT: BF573245.1, EVALUE 2.80e+00
HLLLMGQNCVIWSHSDEVDAGKCSFCQVHSHLKQTPSKKKRGLDIGQAIAMSATVLP

SEQ ID NO: 48531 - protein, 31 aa, Homo sapiens
  MAP TO AL050320.19; EXPRESSED IN PLACENTA, SIGNAL = 2.2; EXPRESSED IN BONE MARROW, SIGNAL = 0.45
TYSSWGRIVSYGRTQMKWMLGNVVFARSTAT

SEQ ID NO: 48532 - protein, 35 aa, Homo sapiens; identical to SEQ ID NO: 48491
  MAP TO AC011299.3; EXPRESSED IN BONE MARROW, SIGNAL = 0.49; EXPRESSED IN PLACENTA, SIGNAL = 0.49; SWISSPROT HIT: Q9Y3T9, EVALUE 4.90e+00; EST_HUMAN HIT: AW504489.1, EVALUE 2.00e-14

SEQ ID NO: 48533 - protein, 51 aa, Homo sapiens
  MAP TO AC007595.3; EXPRESSED IN BONE MARROW, SIGNAL = 0.48; EST_HUMAN HIT: BE250861.1, EVALUE 2.00e-23; SWISSPROT HIT: P53384, EVALUE 1.00e-24
MIKQFLRDVDWGEVDYLIVDTPPGTSDEHLSVVRYLATAHIDGAVIITTPQ

SEQ ID NO: 48534 - protein, 60 aa, Homo sapiens; identical to SEQ ID NO: 34723
  MAP TO AC018731.3; EXPRESSED IN PLACENTA, SIGNAL = 0.51; EXPRESSED IN BONE MARROW, SIGNAL = 0.49; EST_HUMAN HIT: AI862910.1, EVALUE 2.00e-28; SWISSPROT HIT: P80217, EVALUE 7.00e-03

SEQ ID NO: 48535 - protein, 68 aa, Homo sapiens
  MAP TO AL161747.1; EXPRESSED IN BONE MARROW, SIGNAL = 0.42; SWISSPROT HIT: O08811, EVALUE 2.00e+00; EST_HUMAN HIT: BE208526.1, EVALUE 4.00e-22
QVTQQPGHLFWPPGSALTARLRRLVTAYQRSYKREQMKIEAAERGDRRRRRCEAAFKLKEIARREKQQ

SEQ ID NO: 48536 - protein, 101 aa, Homo sapiens
  MAP TO AL121827.9; EXPRESSED IN PLACENTA, SIGNAL = 0.53; EXPRESSED IN BONE MARROW, SIGNAL = 0.5; EST_HUMAN HIT: AU127096.1, EVALUE 3.00e-39; SWISSPROT HIT: P87498, EVALUE 2.40e-01
PSEGHSYQNSGLDHFQNSNIDQSFWETFGSAEPTKTRKSPSSDSWTCADTSTERRSSDSWEVWGSASTNRNSNSDGGEGGEGTKKAVPPAVPTDDGWDNQN

SEQ ID NO: 48537 - protein, 49 aa, Homo sapiens
  MAP TO AC025226.2; EXPRESSED IN BONE MARROW, SIGNAL = 0.47; SWISSPROT HIT: P37196, EVALUE 2.10e+00
HIPNPFESLKVPIGGQLYPYSIEVSRSSLEVPDKKLICGHPDSAVVTPA

SEQ ID NO: 48538 - protein, 128 aa, Homo sapiens; identical to SEQ ID NO: 45953
  MAP TO AP001440.1; EXPRESSED IN PLACENTA, SIGNAL = 0.58; EXPRESSED IN BONE MARROW, SIGNAL = 0.44; SWISSPROT HIT: P23004, EVALUE 1.10e+00; EST_HUMAN HIT: BE165330.1, EVALUE 3.00e-29

SEQ ID NO: 48539 - protein, 34 aa, Homo sapiens [sequence omitted]

SEQ ID NO: 48540 - protein, 53 aa, Homo sapiens
  MAP TO AL121586.28; EXPRESSED IN BONE MARROW, SIGNAL = 0.53; EXPRESSED IN PLACENTA, SIGNAL = 0.76; EST_HUMAN HIT: AW813525.1, EVALUE 2.00e-26; SWISSPROT HIT: Q15647, EVALUE 2.10e+00
TVAVFDHDLVGSDDLIGETHIDLENRFYSHHRANCGLASQYEVWVQQGPQEPF

SEQ ID NO: 48541 - protein, 86 aa, Homo sapiens
  MAP TO AL133344.19; EXPRESSED IN BONE MARROW, SIGNAL = 0.44; EST_HUMAN HIT: BE697125.1, EVALUE 4.00e-35; SWISSPROT HIT: Q93075, EVALUE 3.00e-37
TFTKFRKIYSNTFPKEFQGCISCFCNPQNLSDNLWEDQLKDDLVWGVFGCRPHFAHYYNNYQERSILKALRHPKAVAFGEMGLDYS

SEQ ID NO: 48542 - protein, 30 aa, Homo sapiens
  MAP TO AL133344.19; EXPRESSED IN BONE MARROW, SIGNAL = 0.44; EST_HUMAN HIT: BE697125.1, EVALUE 4.00e-01
APLPNSEKFIATPSPRSFRAAFLASAILKT

SEQ ID NO: 48543 - protein, 42 aa, Homo sapiens
  MAP TO AC010486.5; EXPRESSED IN PLACENTA, SIGNAL = 0.47; EXPRESSED IN BONE MARROW, SIGNAL = 0.46; EST_HUMAN HIT: R25993.1, EVALUE 1.00e-06; SWISSPROT HIT: Q62177, EVALUE 6.30e+00
QGQQEQYHHNGNGIRAVNCLWDFHPRETQSHCQWECSAKGEA

SEQ ID NO: 48544 - protein, 42 aa, Homo sapiens
  MAP TO AC010486.5; EXPRESSED IN PLACENTA, SIGNAL = 0.47; EXPRESSED IN BONE MARROW, SIGNAL = 0.46; EST_HUMAN HIT: AA135164.1, EVALUE 8.00e-03
SKGSKSNTITMAMAYGLSIAYGTSTPERHRATANGNVQPRVK

SEQ ID NO: 48545 - protein, 18 aa, Homo sapiens
  MAP TO AC012571.3; EXPRESSED IN BONE MARROW, SIGNAL = 0.45; EXPRESSED IN PLACENTA, SIGNAL = 0.49
IVAIIGIAIGIVTHFVVE

SEQ ID NO: 48546 - protein, 37 aa, Homo sapiens
  MAP TO AL161781.2; EXPRESSED IN BONE MARROW, SIGNAL = 0.44; EST_HUMAN HIT: AI745249.1, EVALUE 7.40e+00; SWISSPROT HIT: Q02548, EVALUE 3.00e-15
MASLAGGLDDMKANLASPTPADIGSSVPGPQSYPIVT

SEQ ID NO: 48547 - protein, 35 aa, Homo sapiens
  MAP TO AC018421.3; EXPRESSED IN BONE MARROW, SIGNAL = 0.49
MAGMGVEKAKKVEGRWEVRSACRRKPRRAQQCRSW

SEQ ID NO: 48548 - protein, 34 aa, Homo sapiens
  MAP TO AC021846.3; EXPRESSED IN PLACENTA, SIGNAL = 0.54; EXPRESSED IN BONE MARROW, SIGNAL = 0.45; EST_HUMAN HIT: BE169208.1, EVALUE 2.00e-04
IVVRPSAPSISRKFSSSPAATLYPLNTNSPFLTC

SEQ ID NO: 48549 - protein, 34 aa, Homo sapiens
  MAP TO AC021846.3; EXPRESSED IN PLACENTA, SIGNAL = 0.54; EXPRESSED IN BONE MARROW, SIGNAL = 0.45; EST_HUMAN HIT: AA335028.1, EVALUE 1.00e-06
GKLGMGSWYLMGTMLQLVKMKTFWRWMVLMVAQQ

SEQ ID NO: 48550 - protein, 47 aa, Homo sapiens
  MAP TO AL137026.10; EXPRESSED IN BONE MARROW, SIGNAL = 0.45; EST_HUMAN HIT: AI749459.1, EVALUE 7.80e-01
SMRSPRPGQGFRCSRKQLQVWVKRRDIQGGSTARTWGFSRLSWRRRG

SEQ ID NO: 48551 - protein, 32 aa, Homo sapiens
  MAP TO AC008919.4; EXPRESSED IN BONE MARROW, SIGNAL = 0.82; EST_HUMAN HIT: AW834834.1, EVALUE 8.00e-12
TIEFAEQRIPVLNEYCVVCDEPHVFQNGPMLR

SEQ ID NO: 48552 - protein, 40 aa, Homo sapiens
  MAP TO AC011938.3; EXPRESSED IN BONE MARROW, SIGNAL = 0.44; EST_HUMAN HIT: BF686646.1, EVALUE 5.50e+00
LFLLFMICVSSGSMCSAFLQCFSVLGKPLYPSGFSRETKS

SEQ ID NO: 48553 - protein, 27 aa, Homo sapiens
  MAP TO AC011938.3; EXPRESSED IN BONE MARROW, SIGNAL = 0.44
LTLFLWRTLTDIEVFPGLKSTARMLST

SEQ ID NO: 48554 - protein, 42 aa, Homo sapiens
  MAP TO AL136112.9; EXPRESSED IN PLACENTA, SIGNAL = 0.53; EXPRESSED IN BONE MARROW, SIGNAL = 0.44; EST_HUMAN HIT: AI280803.1, EVALUE 9.00e-17
KLLITLPELVECTSAKAFYIPETETLEITMTMKRELDIANFF

SEQ ID NO: 48555 - protein, 75 aa, Homo sapiens
  MAP TO AL158842.2; EXPRESSED IN BONE MARROW, SIGNAL = 0.44; EST_HUMAN HIT: BF247124.1, EVALUE 6.00e-01; SWISSPROT HIT: P39943, EVALUE 3.30e+00
ASELGTSISSLMSRYPTASTFSEFPRPEYLAAKSPPLHSPTASVQLRPLTPSHGLLPPHPACPTTSPPFSFLSPL

SEQ ID NO: 48556 - protein, 102 aa, Homo sapiens
  MAP TO AC008919.4; EXPRESSED IN BONE MARROW, SIGNAL = 0.63; EST_HUMAN HIT: BE782903.1, EVALUE 1.20e-01; SWISSPROT HIT: P30414, EVALUE 4.70e+00
VGERKETTNKTSTHETQREERTRQDNNGKKKRRTRKPNEHGTRNRTRTRTRTGRGRYGTGRQRGHRKTKKEIRKKASKERKERERKRRKERERKEKMDAAET

SEQ ID NO: 48557 - protein, 102 aa, Homo sapiens
  MAP TO AC008919.4; EXPRESSED IN BONE MARROW, SIGNAL = 0.63; EST_HUMAN HIT: BF240704.1, EVALUE 8.50e+00
GWRKKRDDEQDEHARDATRRTNQTGQQRKKETTNTKTKRTRNAEPDTDTDADGTRTLRNGTTTRTQKDKERNTKESKQRKKGERKKTKERKRKKRKDGCGRD

SEQ ID NO: 48558 - protein, 56 aa, Homo sapiens
  MAP TO AC009298.2; EXPRESSED IN BONE MARROW, SIGNAL = 0.53; SWISSPROT HIT: Q01147, EVALUE 6.00e-26; EST_HUMAN HIT: AU138559.1, EVALUE 7.00e-25
QGGAIQLANNGTDGVQGLQTLTMTNAAATQPGTTILQYAQTTDGQQILVPSNQVVV

SEQ ID NO: 48559 - protein, 20 aa, Homo sapiens
  MAP TO AC009298.2; EXPRESSED IN BONE MARROW, SIGNAL = 0.53; EST_HUMAN HIT: AA375809.1, EVALUE 1.00e-05
REEQYSWLTMVPMGYRACKH

SEQ ID NO: 48560 - protein, 60 aa, Homo sapiens
  MAP TO AL136320.7; EXPRESSED IN BONE MARROW, SIGNAL = 0.55; SWISSPROT HIT: P09925, EVALUE 6.00e+00
EIPVNKSVGMEMKVMKGMRGERTEWFMEDLESMAKESGLYLSQRVPLKVCIPSLVLEFLW

SEQ ID NO: 48561 - protein, 86 aa, Homo sapiens
  MAP TO AC018780.3; EXPRESSED IN BONE MARROW, SIGNAL = 0.45; EST_HUMAN HIT: BF356145.1, EVALUE 3.30e-01; SWISSPROT HIT: P16241, EVALUE 3.00e+00
GQQVQWYQQAAAQPVLFPGVCWWQLMHWVQHHPGGARLHHPGGARLHHPGGARLHHPGGVRLHHPGLQDRVACVGRWGGGGGGAEK

SEQ ID NO: 48562 - protein, 63 aa, Homo sapiens
  MAP TO AC018780.3; EXPRESSED IN BONE MARROW, SIGNAL = 0.45; EST_HUMAN HIT: BE513728.1, EVALUE 5.90e+00; SWISSPROT HIT: P33119, EVALUE 5.90e+00
CACRRAAGSVVPASSCPARAVPGSVLVAAYALGTAPPRRGEAAPPRRGEAAPPRRGEAAPPRR

SEQ ID NO: 48563 - protein, 81 aa, Homo sapiens
  MAP TO AL161747.1; EXPRESSED IN BONE MARROW, SIGNAL = 0.46; SWISSPROT HIT: O14646, EVALUE 1.00e-18; EST_HUMAN HIT: AW342141.1, EVALUE 1.00e-42
QNCILADEMGLGKTIQSIAFLQEVYNVGIHGPFLVIAPLSTITNWEREFNTWTEMNTIVYHGSLASRQMIQQYEMYCKDSR

SEQ ID NO: 48564 - protein, 54 aa, Homo sapiens
  MAP TO AL161747.1; EXPRESSED IN BONE MARROW, SIGNAL = 0.46; SWISSPROT HIT: O60318, EVALUE 8.00e+00; EST_HUMAN HIT: AW342141.1, EVALUE 1.00e-28
RTASWLMRWDWAKLFSPLPSCRKYIMWASMVPSWSLPHCPQLLTGSENLIHGQK

SEQ ID NO: 48565 - protein, 65 aa, Homo sapiens
  MAP TO AL132801.1; EXPRESSED IN BONE MARROW, SIGNAL = 1.6; EST_HUMAN HIT: BF035206.1, EVALUE 5.00e-22; SWISSPROT HIT: Q09507, EVALUE 7.70e+00
VPPTETVPQVKKEKHSTQAKNRAKRKPPKGMFLSQEDVEAVSANATAATTVLRQLDMELVSVKRQ

SEQ ID NO: 48566 - protein, 51 aa, Homo sapiens
  MAP TO AL132801.1; EXPRESSED IN BONE MARROW, SIGNAL = 1.6; EST_HUMAN HIT: AA769448.1, EVALUE 1.00e-16
FPLLRQFLRSKKKNIAHKLKIEQKGNLQKECFFLKKMWRLFLPMPLLLPRC

SEQ ID NO: 48567 - protein, 32 aa, Homo sapiens; identical to SEQ ID NO: 47850
  MAP TO AC012177.2; EXPRESSED IN BONE MARROW, SIGNAL = 3.7

SEQ ID NO: 48568 - protein, 26 aa, Homo sapiens
  MAP TO AL158075.2; EXPRESSED IN BONE MARROW, SIGNAL = 1.8
MCTTVDMLMQTKHFWGQLENNGVRQK

SEQ ID NO: 48569 - protein, 22 aa, Homo sapiens
  MAP TO AL158075.2; EXPRESSED IN BONE MARROW, SIGNAL = 1.8
CAPLLICSCKPSTSGDNWRTME

SEQ ID NO: 48570 - protein, 102 aa, Homo sapiens
  MAP TO AP001242.1; EXPRESSED IN BONE MARROW, SIGNAL = 2.4; EST_HUMAN HIT: AW378342.1, EVALUE 1.00e-27; SWISSPROT HIT: P01605, EVALUE 2.00e-27
EKVTITCQASEGIGNYLYWYQQKPDQAPKLLIKYASQSISGVPSRFSGSGSGTDFTFTISSLEAEDAATYYCQQGNKHPHTVLQPKTKISSAWRNRETEQYP

SEQ ID NO: 48571 - protein, 102 aa, Homo sapiens
  MAP TO AP001242.1; EXPRESSED IN BONE MARROW, SIGNAL = 2.4; EST_HUMAN HIT: AW378342.1, EVALUE 2.00e-13
GRKSPSPARPVKALATTYTGTSRNQIKPQSSSSSMLPSPSQGSPRGSVAVDLGQISPLPSVAWKLKMLQHITVSRAISTLTLCYNPKQKLAQPGGTEKLNNT

SEQ ID NO: 48572 - protein, 26 aa, Homo sapiens
  MAP TO AC020897.3; EXPRESSED IN BONE MARROW, SIGNAL = 1.7
SQEVEEKLMRKAPYALCPVFPNSNIL

SEQ ID NO: 48573 - protein, 144 aa, Homo sapiens
  MAP TO AL138831.2; EXPRESSED IN BONE MARROW, SIGNAL = 1.5; EST_HUMAN HIT: AU132437.1, EVALUE 1.00e-70; SWISSPROT HIT: Q9X0X0, EVALUE 1.30e+00
WKERSSLVWGSFCKVMSLALKKRGKFMKRQEMEIGLVLDLQVQRGNLNLWTIKLLQRNEVKADPKNGLDIGLIKRKVRGVLKSLKRKQLGASQRRGKNLKAHPKEVSLKIKQGNQNPLPLEGDLKRKLVRPDLLLMIRLKLKIK

SEQ ID NO: 48574 - protein, 50 aa, Homo sapiens
  MAP TO AC005323.1; EXPRESSED IN BONE MARROW, SIGNAL = 1.7; EST_HUMAN HIT: BF575306.1, EVALUE 2.00e-20; SWISSPROT HIT: P13535, EVALUE 7.00e-22
VSNAVGALAKAVYEKMFLWMVARINQQLDTKQPRQYFIGVLDIAGFEIFD

SEQ ID NO: 48575 - protein, 46 aa, Homo sapiens
  MAP TO AC010361.3; EXPRESSED IN BONE MARROW, SIGNAL = 3.9; EST_HUMAN HIT: AW328173.1, EVALUE 5.20e+00; SWISSPROT HIT: P13462, EVALUE 4.80e+00
LACKKPDYPEDSMLEKSHRSQRWSKRPKQPQMFQSQLFEFLQMIYQ

SEQ ID NO: 48576 - protein, 61 aa, Homo sapiens
  MAP TO AC008636.4; EXPRESSED IN BONE MARROW, SIGNAL = 2.2; EST_HUMAN HIT: BF359679.1, EVALUE 2.00e-29; SWISSPROT HIT: Q10473, EVALUE 3.00e-13
HLKKPLEDYMALFPSVRILRTKKREGLIRTRMLGASVATGDVITFLDSHCEANVNWLPPLL

SEQ ID NO: 48577 - protein, 79 aa, Homo sapiens
  MAP TO AC023890.3; EXPRESSED IN BONE MARROW, SIGNAL = 2.1; SWISSPROT HIT: O95067, EVALUE 5.00e-39; EST_HUMAN HIT: BE122764.1, EVALUE 4.00e-38
VQPVSRKKLQLVGITALLLASKYEEMFSPNIEDFVYITDNAYTSSQIREMETLILKELKFELGRPLPLHFLRRASKAGE

SEQ ID NO: 48578 - protein, 67 aa, Homo sapiens
  MAP TO AC012178.2; EXPRESSED IN BONE MARROW, SIGNAL = 1.6; EXPRESSED IN PLACENTA, SIGNAL = 1.4
CRKLFLKLLFLKHRSKFQKLVLKLKIMELILLLFLNFLCNILSLKQRTKKVLASQAGRSIIRKLGRG

SEQ ID NO: 48579 - protein, 31 aa, Homo sapiens
  MAP TO AC018552.2; EXPRESSED IN BONE MARROW, SIGNAL = 1.6; EST_HUMAN HIT: BE241639.1, EVALUE 5.00e-12
MYDIFNLNDKALCFTKCRQSGSDSCNVENLQ

SEQ ID NO: 48580 - protein, 24 aa, Homo sapiens
  MAP TO AC018552.2; EXPRESSED IN BONE MARROW, SIGNAL = 1.6; EST_HUMAN HIT: BE241639.1, EVALUE 1.00e-07
VRKSPPKGQETPAWGATTCTTSST

SEQ ID NO: 48581 - protein, 25 aa, Homo sapiens
  MAP TO AL049831.2; EXPRESSED IN BONE MARROW, SIGNAL = 1.8
KTNTNKISANNNIIKSLNIKLNVCL

SEQ ID NO: 48582 - protein, 92 aa, Homo sapiens; identical to SEQ ID NO: 44750
  MAP TO AC013533.3; EXPRESSED IN BONE MARROW, SIGNAL = 6.2; EST_HUMAN HIT: R99160.1, EVALUE 1.00e-04; SWISSPROT HIT: P56117, EVALUE 3.50e-01

SEQ ID NO: 48583 - protein, 49 aa, Homo sapiens
  MAP TO AC007539.8; EXPRESSED IN BONE MARROW, SIGNAL = 2.1; EST_HUMAN HIT: AW383315.1, EVALUE 3.40e-01
KPRHRAWGTAALMCGTRSWCPVMGWGNATYHCLLPGSPVPQPVFRMEPN

SEQ ID NO: 48584 - protein, 48 aa, Homo sapiens
  MAP TO AC006548.20; EXPRESSED IN BONE MARROW, SIGNAL = 1.8
GLATVLLMGLGLLLSPSLPHACPMQAWKTQWRRLGQPQVPAEYVILRD

SEQ ID NO: 48585 - protein, 41 aa, Homo sapiens
  MAP TO AC006548.20; EXPRESSED IN BONE MARROW, SIGNAL = 1.8; EST_HUMAN HIT: BF337100.1, EVALUE 4.80e-01; SWISSPROT HIT: P21917, EVALUE 7.30e-01
WLGNCAVDGPGPPAESLPAPRLPHAGLEDSVEKARTASGAC

SEQ ID NO: 48586 - protein, 101 aa, Homo sapiens
  MAP TO AC009399.5; EXPRESSED IN BONE MARROW, SIGNAL = 2.3; EST_HUMAN HIT: AA320061.1, EVALUE 4.00e-31
ITQPAEMNVKTETESEEEEEVALDNEDEEQEASQEESAGFLRENQAKYTPSLTALVENTPKENSMKVREWNNKGGHCCKLETQELEPKFNLMQILQDNGNL

SEQ ID NO: 48587 - protein, 75 aa, Homo sapiens [sequence omitted]

SEQ ID NO: 48588 - protein, 28 aa, Homo sapiens [sequence omitted]

SEQ ID NO: 48589 - protein, 57 aa, Homo sapiens
  MAP TO AL159141.1; EXPRESSED IN BONE MARROW, SIGNAL = 1.6; SWISSPROT HIT: P45931, EVALUE 2.00e+00; EST_HUMAN HIT: BE778753.1, EVALUE 4.70e+00
RCSSWKNCIPFWHRQDLLSWESLISGTRRKWRREVSIWEANSSSDSSISTYFLENRI

SEQ ID NO: 48590 - protein, 116 aa, Homo sapiens
  MAP TO AL132655.5; EXPRESSED IN BONE MARROW, SIGNAL = 4.8; EST_HUMAN HIT: AA134717.1, EVALUE 3.90e+00; SWISSPROT HIT: Q61127, EVALUE 2.80e+00
KISHLGGKGRGKMSKGQNSPKGSEAGSVQTGTDPFHPETRPMLGSGLGFLASPVFHAAIPEDKIHEPEEKEEGVLWEAKCFTVLQVQRQSFLSYSHLYVVANPEATKASAYRHQET

SEQ ID NO: 48591 - protein, 66 aa, Homo sapiens
  MAP TO AL138717.2; EXPRESSED IN PLACENTA, SIGNAL = 1.6; EXPRESSED IN BONE MARROW, SIGNAL = 1.6; SWISSPROT HIT: P53290, EVALUE 5.00e-14; EST_HUMAN HIT: AI028080.1, EVALUE 2.00e-32
DDYMEALARLHLTVTRAYKVNTDINFEVFIHKVDGLSDDHKIETQRDIHQRANDDLADAGLEKIHL

SEQ ID NO: 48592 - protein, 34 aa, Homo sapiens
  MAP TO AC008638.4; EXPRESSED IN BONE MARROW, SIGNAL = 2.4
PPLKDDFGGHEQTTNYAQENHEFVWVNRINGTQN

SEQ ID NO: 48593 - protein, 29 aa, Homo sapiens
  MAP TO AC008638.4; EXPRESSED IN BONE MARROW, SIGNAL = 2.4
SHLLRMTLGAMNRQLTMPRKIMSSSGSIE

SEQ ID NO: 48594 - protein, 39 aa, Homo sapiens
  MAP TO AC023404.2; EXPRESSED IN BONE MARROW, SIGNAL = 1.5; SWISSPROT HIT: Q03571, EVALUE 2.00e-04; EST_HUMAN HIT: AA381126.1, EVALUE 1.00e-15
YAFLLFQDESSVQALIDACIEEDGKLYLCVSSPTIKDKP

SEQ ID NO: 48595 - protein, 39 aa, Homo sapiens
  MAP TO AC023404.2; EXPRESSED IN BONE MARROW, SIGNAL = 1.5; EST_HUMAN HIT: H71225.1, EVALUE 5.00e-16
AMHSCCFKMKALCRLSLMHALKKMENSTFVYQVPLSRIS

SEQ ID NO: 48596 - protein, 94 aa, Homo sapiens
  MAP TO AC018552.2; EXPRESSED IN BONE MARROW, SIGNAL = 1.7; SWISSPROT HIT: P22110, EVALUE 6.50e+00; EST_HUMAN HIT: AW592568.1, EVALUE 6.00e-04
CWFREGTTMYALYITVHGYFLITFLFGMVVLALVVWKIFTLSRATAVKERGKNRKKVLTLLGLSSLVGVTWGLAIFTPLGLSTVYIFALFNSLQ

SEQ ID NO: 48597 - protein, 68 aa, Homo sapiens
  MAP TO AC018552.2; EXPRESSED IN BONE MARROW, SIGNAL = 1.7; EST_HUMAN HIT: AI807052.1, EVALUE 3.20e+00
AGSVKGQPCTPSISPSTATSSSPSSLAWWSWPWWSGRSSPCPVLQRSRSGGRTGRRCSPCWASRAWWV

SEQ ID NO: 48598 - protein, 26 aa, Homo sapiens
  MAP TO AL133467.1; EXPRESSED IN BONE MARROW, SIGNAL = 1.5
VLLTIAPICFLHATSLSESTGWESNL

SEQ ID NO: 48599 - protein, 33 aa, Homo sapiens
  MAP TO AC009242.2; EXPRESSED IN BONE MARROW, SIGNAL = 1.5; EST_HUMAN HIT: AI282474.1, EVALUE 2.60e+00
MSWGAGRAERPWEKARAWETWVRNRVKASGVKS

SEQ ID NO: 48600 - protein, 120 aa, Homo sapiens
  MAP TO AC018711.2; EXPRESSED IN BONE MARROW, SIGNAL = 1.5; EST_HUMAN HIT: AI948556.1, EVALUE 3.00e-46; SWISSPROT HIT: P27772, EVALUE 3.10e+00
QLSCISFPPKEEKYLQQIVDCLPCILILGQDCNVKCQLLNLLLGVQVLPTTKLGSEESCKLRRLRFTYGTQTRVSLALPGQYELVHTLVAHQGNWETIPEEDLEVQENNEDAAHVLAELE

SEQ ID NO: 48601 - protein, 68 aa, Homo sapiens
  MAP TO AL109658.5; EXPRESSED IN BONE MARROW, SIGNAL = 1.5; SWISSPROT HIT: P01629, EVALUE 4.20e-02; EST_HUMAN HIT: AL119770.1, EVALUE 1.00e-11
VLGDGPPGPIRWFQGAGLSREAIYNFGGISHPKETAVQASNNDFSILLQNVSSEDAGTYYCVKFQRKP

SEQ ID NO: 48602 - protein, 42 aa, Homo sapiens
  MAP TO AL109658.5; EXPRESSED IN BONE MARROW, SIGNAL = 1.5; SWISSPROT HIT: P01555, EVALUE 2.80e+00; EST_HUMAN HIT: AW083793.1, EVALUE 2.40e-02
SAWRRSPWTHQVVPGSWSEPGGHLQLWRHLPPQGDSGAGLQQ

SEQ ID NO: 48603 - protein, 45 aa, Homo sapiens
  MAP TO AC020714.2; EXPRESSED IN PLACENTA, SIGNAL = 1.5; EXPRESSED IN BONE MARROW, SIGNAL = 3.5; EST_HUMAN HIT: AU131774.1, EVALUE 5.00e-21; SWISSPROT HIT: P14351, EVALUE 3.20e-01
NEQLARSGTNCLENVVILNGEKFTLEIWDKTCNCTLDIFKTTIPH

SEQ ID NO: 48604 - protein, 46 aa, Homo sapiens; identical to SEQ ID NO: 48128
  MAP TO AL035705.22; EXPRESSED IN BONE MARROW, SIGNAL = 1.7; SWISSPROT HIT: Q28948, EVALUE 1.00e-20; EST_HUMAN HIT: AW970672.1, EVALUE 2.00e-18

SEQ ID NO: 48605 - protein, 74 aa, Homo sapiens
  MAP TO AC025289.1; EXPRESSED IN BONE MARROW, SIGNAL = 1.8; SWISSPROT HIT: P35177, EVALUE 2.40e-01; EST_HUMAN HIT: BF371302.1, EVALUE 1.00e-27
ITLQITESEDNEEDDMVDVIWRQLISSCPWLSELDESATEGVIKVWRKVVDRIFSLYKLSCSAYFTFLKLNAGQ

SEQ ID NO: 48606 - protein, 93 aa, Homo sapiens
  MAP TO AC021876.2; EXPRESSED IN BONE MARROW, SIGNAL = 6.5; EXPRESSED IN PLACENTA, SIGNAL = 2.8; SWISSPROT HIT: Q07244, EVALUE 6.10e-01; EST_HUMAN HIT: BE545535.1, EVALUE 2.00e-09
ALDKLNGFQLENFTLKVAYIPDEMAAQQNPLQQPRGRRGLGQRGSSRQGSPGSVSKQKPCDLPLRLLVPTQFVGAIIGKEGATIRNITKQTQS

SEQ ID NO: 48607 - protein, 46 aa, Homo sapiens
  MAP TO AC022211.2; EXPRESSED IN BONE MARROW, SIGNAL = 3.6; EST_HUMAN HIT: AW849909.1, EVALUE 4.00e-19; SWISSPROT HIT: P41594, EVALUE 2.80e+00
DEARIQKVTKRLHTLEEVNNNVRLLSEMLLHYSQEDSSDGDRELMK

SEQ ID NO: 48608 - protein, 82 aa, Homo sapiens
  MAP TO AL118518.13; EXPRESSED IN PLACENTA, SIGNAL = 7.6; EXPRESSED IN BONE MARROW, SIGNAL = 6.5; SWISSPROT HIT: P53693, EVALUE 3.60e+00; EST_HUMAN HIT: AW205702.1, EVALUE 2.60e-01
TPILILQFLTRDYGGDVSFTETSSLLSSWKDTPIFGEIKHLSSRAQEDSKHLLKVLHSCKANTAPSWGRGEGRTHCPPLDLH

SEQ ID NO: 48609 - protein, 40 aa, Homo sapiens
  MAP TO AC019248.3; EXPRESSED IN BONE MARROW, SIGNAL = 3.7; EST_HUMAN HIT: BF105067.1, EVALUE 1.00e-15; SWISSPROT HIT: Q07303, EVALUE 5.60e-01
VILMWFPPPPAPMTTWQFTMVPIPAIPFLANSAVPSAHQM

SEQ ID NO: 48610 - protein, 32 aa, Homo sapiens
  MAP TO AC011024.3; EXPRESSED IN BONE MARROW, SIGNAL = 2.1; SWISSPROT HIT: P76262, EVALUE 6.50e+00
VEELQKTADVVEVGPSQATAAEPDSIRIDLCL

SEQ ID NO: 48611 - protein, 49 aa, Homo sapiens
  MAP TO AC008384.2; EXPRESSED IN BONE MARROW, SIGNAL = 2.3; SWISSPROT HIT: Q00721, EVALUE 8.10e+00
NHNTEETKVVILGYLSSCLFCLRCKDSRLKRGKKEIDVSSVTETKEFLT

SEQ ID NO: 48612 - protein, 22 aa, Homo sapiens
  MAP TO AC008384.2; EXPRESSED IN BONE MARROW, SIGNAL = 2.3
RTIIQRRLRWSFWGTYLLASFA

SEQ ID NO: 48613 - protein, 107 aa, Homo sapiens
  MAP TO AC010618.4; EXPRESSED IN BONE MARROW, SIGNAL = 4.9; SWISSPROT HIT: Q9ZCQ8, EVALUE 3.50e+00; EST_HUMAN HIT: BE960799.1, EVALUE 1.00e+00
LMADAVATFLQLADQCLTTALNCDQAAQRLERVRGRVLKVCSVGTGWHGVAVGLGAQMVAGRTAGCVVQKFKSDSGLAQRRFIRGWGLCIFLPFVLSQLEPGCKKVS

SEQ ID NO: 48614 - protein, 31 aa, Homo sapiens
  MAP TO AC017005.3; EXPRESSED IN BONE MARROW, SIGNAL = 1.6; SWISSPROT HIT: P03355, EVALUE 6.00e-07; EST_HUMAN HIT: BE827693.1, EVALUE 7.00e-05
MEMDILWAQVLPAGTSAQRAELVALTQALRL

SEQ ID NO: 48615 - protein, 35 aa, Homo sapiens
  MAP TO AC019219.2; EXPRESSED IN BONE MARROW, SIGNAL = 1.5
QMNQALWLRGTGNLHTKAEKALPEYFYTISYTNHS

SEQ ID NO: 48616 - protein, 35 aa, Homo sapiens
  MAP TO AC004254.1; EXPRESSED IN BONE MARROW, SIGNAL = 1.9; EST_HUMAN HIT: BF342111.1, EVALUE 1.90e+00
RPGAEAQHQDHPGKGGPQPLSLLRKLQGPNVSLVS

SEQ ID NO: 48617 - protein, 46 aa, Homo sapiens
  MAP TO AC018711.2; EXPRESSED IN BONE MARROW, SIGNAL = 1.5; SWISSPROT HIT: P04048, EVALUE 1.30e-02; EST_HUMAN HIT: BE893213.1, EVALUE 2.00e-22
ARPERLPVFDEECWQLMEACWDGDPLKRPLLGIVQPMLQGIMNRLC

SEQ ID NO: 48618 - protein, 49 aa, Homo sapiens
  MAP TO AC008891.4; EXPRESSED IN BONE MARROW, SIGNAL =   2; SWISSPROT HIT: Q28039, EVALUE 3.00e-06; EST_HUMAN HIT: AI869734.1, EVALUE 5.00e-04
LKTKEIQATKTQNYFVQPKNTESILIQIAFSVGLGSVWRSPYLCHRNGG

SEQ ID NO: 48619 - protein, 135 aa, Homo sapiens
  MAP TO AL049872.3; EXPRESSED IN BONE MARROW, SIGNAL = 1.5; EST_HUMAN HIT: BE874505.1, EVALUE 1.00e-16; SWISSPROT HIT: Q14149, EVALUE 5.00e-05
GSGVIETDLSKIYEMQKTIQVLQIEKVESTKKMEQLEDKIKDINKKLSSAENDRDILRREQEQLNVEKRQIMEECENLKLECSKLQPSAVKQSDTMTEKERILAQSASVEEVFRLQQALSGIQSLELISDCCFIA

SEQ ID NO: 48620 - protein, 37 aa, Homo sapiens
  MAP TO AC007225.2; EXPRESSED IN BONE MARROW, SIGNAL = 1.6; EST_HUMAN HIT: AU118020.1, EVALUE 4.00e-15; SWISSPROT HIT: Q9Y5N6, EVALUE 3.00e-16
MEKVEEMPHKPQKDEDLTQDYEEWKRKILENAASAQK

SEQ ID NO: 48621 - protein, 58 aa, Homo sapiens; identical to SEQ ID NO: 44920
  MAP TO AC018835.3; EXPRESSED IN BONE MARROW, SIGNAL = 1.6; EST_HUMAN HIT: AI272244.1, EVALUE 2.00e-16; SWISSPROT HIT: P14781, EVALUE 2.00e-10

SEQ ID NO: 48622 - protein, 19 aa, Homo sapiens
  MAP TO AC018835.3; EXPRESSED IN BONE MARROW, SIGNAL = 1.6
RELSLPSHLPKWMLQLARV

SEQ ID NO: 48623 - protein, 30 aa, Homo sapiens
  MAP TO AC022013.2; EXPRESSED IN BONE MARROW, SIGNAL = 2.1
VPRTDILCIIASREHRSNLWPRTEEGAESQ

SEQ ID NO: 48624 - protein, 42 aa, Homo sapiens
  MAP TO AC008770.3; EXPRESSED IN BONE MARROW, SIGNAL = 1.5; EST_HUMAN HIT: AW137277.1, EVALUE 4.00e-09; SWISSPROT HIT: P52737, EVALUE 1.00e-08
DSVVFEDVDVSFTQEEWALLDPSQKNLYRDVMQETFGNLSSI

SEQ ID NO: 48625 - protein, 94 aa, Homo sapiens
  MAP TO AC008753.5; EXPRESSED IN BONE MARROW, SIGNAL = 2.2; EST_HUMAN HIT: BE903237.1, EVALUE 3.00e-05; SWISSPROT HIT: O15553, EVALUE 2.00e-06
MLRTAGRDGLCRLSTYLEELEAVELKKFKLYLGTATELGEGKIPWGSMEKAGPLEMAQLLITHFGPEEAWRLALSTFERINRKDLWERGQREDL

SEQ ID NO: 48626 - protein, 32 aa, Homo sapiens
  MAP TO AC008753.5; EXPRESSED IN BONE MARROW, SIGNAL = 2.2; EST_HUMAN HIT: AW206975.1, EVALUE 8.80e-01; SWISSPROT HIT: P40249, EVALUE 8.50e+00
WRRPVPWKWPSCSSPTSGQRRPGGWLSAPLSG

SEQ ID NO: 48627 - protein, 24 aa, Homo sapiens
  MAP TO AC018814.3; EXPRESSED IN BONE MARROW, SIGNAL = 1.5
CLTTSHSTTYRKRKTSMLKIKNKN

SEQ ID NO: 48628 - protein, 36 aa, Homo sapiens
  MAP TO AC010369.3; EXPRESSED IN BONE MARROW, SIGNAL = 1.5; EST_HUMAN HIT: BE886059.1, EVALUE 1.00e-14; SWISSPROT HIT: P51251, EVALUE 4.30e-01
PCPSEIQTEPRETLEYKAALELEMWKEMQEDIFENQ

SEQ ID NO: 48629 - protein, 33 aa, Homo sapiens
  MAP TO AC009818.4; EXPRESSED IN BONE MARROW, SIGNAL = 1.6
MVCSKPQKYKKKNLSLNIDRTKAREVARTRVTK

SEQ ID NO: 48630 - protein, 49 aa, Homo sapiens
  MAP TO AL157882.1; EXPRESSED IN BONE MARROW, SIGNAL = 2.7; SWISSPROT HIT: Q09296, EVALUE 4.00e-04; EST_HUMAN HIT: BF096163.1, EVALUE 2.00e-24
NEYDLILNSDINSNHYHQWFYFEVSGMRPGVAYRFNIINCEKSNSQFNY

SEQ ID NO: 48631 - protein, 33 aa, Homo sapiens [sequence omitted]

SEQ ID NO: 48632 - protein, 32 aa, Homo sapiens [sequence omitted]

SEQ ID NO: 48633 - protein, 33 aa, Homo sapiens
  MAP TO AC020722.2; EXPRESSED IN BONE MARROW, SIGNAL = 2.3
RKPIMMMMMMMMMTIMVAIIVMKIIRKLTTTSK

SEQ ID NO: 48634 - protein, 37 aa, Homo sapiens
  MAP TO AC022008.2; EXPRESSED IN BONE MARROW, SIGNAL = 2.3
EEINEKDQIGRREAANIVKLTMEPIVPVMLYWRVQKY

SEQ ID NO: 48635 - protein, 34 aa, Homo sapiens
  MAP TO AL135905.2; EXPRESSED IN BONE MARROW, SIGNAL = 2.3; EST_HUMAN HIT: AA011698.1, EVALUE 1.00e-15
DLLQHQEEHERVTHNSQQQCQFMCWDSDHKPNNQ

SEQ ID NO: 48636 - protein, 50 aa, Homo sapiens
  MAP TO AC018388.4; EXPRESSED IN BONE MARROW, SIGNAL = 1.9; SWISSPROT HIT: Q48930, EVALUE 6.20e+00
TSKDEHGRTCLVPDSDAVDRAFSSHKIWRPKMLIPVEKGTQDLWLKPGAS

SEQ ID NO: 48637 - protein, 35 aa, Homo sapiens
  MAP TO AC018388.4; EXPRESSED IN BONE MARROW, SIGNAL = 1.9
PPKMSMAGPAWFQILTQWTGLSAPTRYGDPKCSFQ

SEQ ID NO: 48638 - protein, 156 aa, Homo sapiens; identical to SEQ ID NO: 43023
  MAP TO AC012664.3; EXPRESSED IN BONE MARROW, SIGNAL = 2.3; SWISSPROT HIT: P34384, EVALUE 2.00e-08; EST_HUMAN HIT: BE264998.1, EVALUE 3.00e-85

SEQ ID NO: 48639 - protein, 24 aa, Homo sapiens
  MAP TO AC012664.3; EXPRESSED IN BONE MARROW, SIGNAL = 2.3; EST_HUMAN HIT: N46128.1, EVALUE 1.00e-06
QRSRTGITMQKYKLLDIGYRKTFP

SEQ ID NO: 48640 - protein, 50 aa, Homo sapiens
  MAP TO AC005323.1; EXPRESSED IN BONE MARROW, SIGNAL = 2.4; SWISSPROT HIT: P13535, EVALUE 2.00e-23; EST_HUMAN HIT: BF575306.1, EVALUE 6.00e-22
VYNAVGALAKAIYEKMFLWMVTRINQQLDTKQPRQYFIGVLDIAGFEIFD

SEQ ID NO: 48641 - protein, 60 aa, Homo sapiens
  MAP TO AC008865.3; EXPRESSED IN PLACENTA, SIGNAL = 1.9; EXPRESSED IN BONE MARROW, SIGNAL =   3; SWISSPROT HIT: P15541, EVALUE 7.00e-07; EST_HUMAN HIT: AL080029.1, EVALUE 3.00e-20
VINLTEEVLWVKVNINMNGYYIVHYADDDWEALIHQLKINPYVLSDKDRANLINNIFELA

SEQ ID NO: 48642 - protein, 61 aa, Homo sapiens
  MAP TO AC008569.3; EXPRESSED IN BONE MARROW, SIGNAL = 1.6; SWISSPROT HIT: Q63413, EVALUE 8.00e-27; EST_HUMAN HIT: BE791491.1, EVALUE 7.00e-29
VSVFFGGLSIKKDEEVLKKNCPHVVVGTPGRILALVRNRSFSLKNVKHFVLDECDKMLEQL

SEQ ID NO: 48643 - protein, 56 aa, Homo sapiens
  MAP TO AC008753.5; EXPRESSED IN BONE MARROW, SIGNAL = 1.5; EST_HUMAN HIT: BE350896.1, EVALUE 9.00e-08; SWISSPROT HIT: P29315, EVALUE 1.00e-08
LGICRLGSAACEGLSVVLQANHNLRELDLSFNDLGDWGLWLLAEGLQHPACRLQKL

SEQ ID NO: 48644 - protein, 28 aa, Homo sapiens
  MAP TO AC008753.5; EXPRESSED IN BONE MARROW, SIGNAL = 1.5; EST_HUMAN HIT: BF590937.1, EVALUE 2.40e-01
WASAGWALPPVRVFLWCSRPTTTSGSWT

SEQ ID NO: 48645 - protein, 90 aa, Homo sapiens
  MAP TO AL157883.2; EXPRESSED IN BONE MARROW, SIGNAL = 1.6; EST_HUMAN HIT: BF350000.1, EVALUE 1.60e+00
LKINIQPTRFSMICLTYLSSPILFPVVPNIMHFNHLAFFLSFQNVMFFLVYGSLNRLLSPGTIISPQTHPENSYLSGRCRANEILSCKSS

SEQ ID NO: 48646 - protein, 66 aa, Homo sapiens
  MAP TO AC007345.2; EXPRESSED IN BONE MARROW, SIGNAL = 1.7; EST_HUMAN HIT: AA496960.1, EVALUE 2.00e-35; SWISSPROT HIT: P24394, EVALUE 5.40e-01
WGRWREILSHGRFKRQLNEHDVEIICRALLAYCLVHYRGDEKIKGFIWDLITPTEDGQTRELQNHL

SEQ ID NO: 48647 - protein, 19 aa, Homo sapiens
  MAP TO AC020912.3; EXPRESSED IN BONE MARROW, SIGNAL = 1.7
PNQHGEQAEDGLLQHLLQD

SEQ ID NO: 48648 - protein, 26 aa, Homo sapiens
  MAP TO AC020912.3; EXPRESSED IN BONE MARROW, SIGNAL = 1.7
CVNGNIAVLTSCRRCCRSPSSACSPC

SEQ ID NO: 48649 - protein, 114 aa, Homo sapiens
  MAP TO AC011469.3; EXPRESSED IN BONE MARROW, SIGNAL = 1.8; EST_HUMAN HIT: D31124.1, EVALUE 8.00e-27; SWISSPROT HIT: O15211, EVALUE 8.00e-03
ALLELTELLASHNNYARYRRTWAGCAGFRLPVLGVHLKDLVSLHEAQPDRLPDGRLHLPKLNNLYLRLQELVALQGQHPPCSANEDLLHLLTVSPPGPAQAGLPRVLRYRVLGV

SEQ ID NO: 48650 - protein, 88 aa, Homo sapiens
  MAP TO AC004916.2; EXPRESSED IN PLACENTA, SIGNAL = 1.6; SWISSPROT HIT: P27467, EVALUE 3.00e-46; EST_HUMAN HIT: AA434160.1, EVALUE 7.00e-20
TRESAFVHAIASAGVAFAVTRSCAEGTAAICGCSSRHQGSPGKGWKWGGCSEDIEFGGMVSREFADARENRPDARSAMNRHNNEAGRQ

SEQ ID NO: 48651 - protein, 20 aa, Homo sapiens
  MAP TO AC004916.2; EXPRESSED IN PLACENTA, SIGNAL = 1.6; EST_HUMAN HIT: AI472003.1, EVALUE 2.50e+00
QLPGSRPLSTPLPQPVWPLQ

SEQ ID NO: 48652 - protein, 118 aa, Homo sapiens
  MAP TO AP000344.1; EXPRESSED IN PLACENTA, SIGNAL = 0.96; EST_HUMAN HIT: AI904151.1, EVALUE 2.00e-12; SWISSPROT HIT: P21059, EVALUE 5.00e-01
LCGYAVQDISKEDTVYDICNEDAVDISDEDTVDISNEASVHDISNEAAVCDISNDAVNISNEAAVRDISNDAVDICNEAAVHDISNEDTIEDISYEDTVYDITNEDAVRYLCKKDATK

SEQ ID NO: 48653 - protein, 37 aa, Homo sapiens
  MAP TO AP000426.1; EXPRESSED IN PLACENTA, SIGNAL = 1.3; EXPRESSED IN BT474, SIGNAL =   4; SWISSPROT HIT: P13002, EVALUE 2.00e-08; EST_HUMAN HIT: BF355293.1, EVALUE 2.00e-08
SVVMVVFSEDKNRDEQLKYWKYWHSRQHTAKQRVLDI

SEQ ID NO: 48654 - protein, 21 aa, Homo sapiens
  MAP TO AP000426.1; EXPRESSED IN PLACENTA, SIGNAL = 1.3; EXPRESSED IN BT474, SIGNAL =   4
TEQKVSSTILPSAECGDGGLQ

SEQ ID NO: 48655 - protein, 46 aa, Homo sapiens; identical to SEQ ID NO: 34976
  MAP TO AC010091.1; EXPRESSED IN PLACENTA, SIGNAL = 2.5; EST_HUMAN HIT: AV686895.1, EVALUE 5.30e-02; SWISSPROT HIT: P14210, EVALUE 4.00e-22

SEQ ID NO: 48656 - protein, 33 aa, Homo sapiens; identical to SEQ ID NO: 34977
  MAP TO AC010091.1; EXPRESSED IN PLACENTA, SIGNAL = 2.5; SWISSPROT HIT: P11042, EVALUE 6.30e+00

SEQ ID NO: 48657 - protein, 35 aa, Homo sapiens
  MAP TO AC009310.1; EXPRESSED IN PLACENTA, SIGNAL = 0.98; EST_HUMAN HIT: AW802256.1, EVALUE 8.80e-02
CWRLRSLRSKHQQVQLSGKGGILQKEECCVLTWQK

SEQ ID NO: 48658 - protein, 94 aa, Homo sapiens
  MAP TO AL035454.16; EXPRESSED IN BT474, SIGNAL = 1.4; EXPRESSED IN HBL100, SIGNAL = 1.8; EXPRESSED IN PLACENTA, SIGNAL =   1; EST_HUMAN HIT: AU132316.1, EVALUE 1.00e-29; SWISSPROT HIT: P17886, EVALUE 1.00e-19
NFWSFQALVWFWCLLTYYFFKPCCFAWDFLNSLALVLVHPDVKNWIKYARFEEKHAYFAHARKVYERAVEFFGDEHMDEHLYVAFAKFEENQKE

SEQ ID NO: 48659 - protein, 51 aa, Homo sapiens
  MAP TO AL049868.10; EXPRESSED IN HBL100, SIGNAL =   1; EXPRESSED IN PLACENTA, SIGNAL = 1.2; EST_HUMAN HIT: AA011272.1, EVALUE 6.60e+00
KKIISGIPVMGRSCVPASPLGLSALTMLKFLVLWPATLLFPIRRGTKVKVP

SEQ ID NO: 48660 - protein, 88 aa, Homo sapiens
  MAP TO AL121773.1; EXPRESSED IN BT474, SIGNAL = 2.2; EXPRESSED IN HELA, SIGNAL = 7.1; EXPRESSED IN PLACENTA, SIGNAL = 1.3; EXPRESSED IN HBL100, SIGNAL = 1.9; EST_HUMAN HIT: AL046590.1, EVALUE 7.00e-35; SWISSPROT HIT: Q10568, EVALUE 2.00e-35
FCKAKDAELAWIDGVLDMRVSKVDTGVILEEGELKDDGEDSEMQVEAPSDSSVIAQQKAMKSLFGDDEKETGEESEIIPTLEPLPPHE

SEQ ID NO: 48661 - protein, 156 aa, Homo sapiens
  MAP TO AL117352.3; EXPRESSED IN PLACENTA, SIGNAL = 1.3; EXPRESSED IN HBL100, SIGNAL =   4; EXPRESSED IN HELA, SIGNAL = 1.3; EXPRESSED IN BT474, SIGNAL =   1; EST_HUMAN HIT: BE018066.1, EVALUE 3.00e-64; SWISSPROT HIT: Q07284, EVALUE 1.20e-01
KPNRGEAQLVIPFSGKGYVLGETSNLPSPGKLITSHAINKTQDLLNQNHSANAVRPNSKIKVKFEQNGSSKNSHLVSPAVSNSHQNVLSNYFPRVSFANQKAFRGVNGSPRISVTVGNIPKNSVSSSSQRRVSSSKISLRNSSKVTESASVMPSQD

SEQ ID NO: 48662 - protein, 72 aa, Homo sapiens
  MAP TO AL096763.9; EXPRESSED IN PLACENTA, SIGNAL = 0.94; EST_HUMAN HIT: AW367998.1, EVALUE 1.00e-31; SWISSPROT HIT: Q69154, EVALUE 3.30e-02
PIVKNIAKTESSPSEASQHSMQSPQKTTLILPTQQVRRSSRIKPPGPTAVPKRSSSVKNITPRKKGPNSGKK

SEQ ID NO: 48663 - protein, 166 aa, Homo sapiens
  MAP TO AP000404.1; EXPRESSED IN PLACENTA, SIGNAL = 1.5; EST_HUMAN HIT: AU140704.1, EVALUE 2.00e-93; SWISSPROT HIT: P10180, EVALUE 1.20e+00
RGHKDCFEKYHLIANQGCPRSKLSKSTYEEVKTILSKKINWIVQYAQNKDLDSDSECSKNPQHHLFNFRHKPEEKLLPQFDSQVPKYSAKWIDGSAGGISNCTQRILEQRENTDFGLSMLQDSGATLCRNSVLWPHSHNQAQKKEETISSPEANVQTQHPHYSREE

SEQ ID NO: 48664 - protein, 36 aa, Homo sapiens
  MAP TO AC010908.1; EXPRESSED IN PLACENTA, SIGNAL = 1.1; EST_HUMAN HIT: R83422.1, EVALUE 3.90e-02
PSFPPLIEKPLPSFPPPLRRPASVGPTDNYPAYGQG

SEQ ID NO: 48665 - protein, 69 aa, Homo sapiens
  MAP TO AL121773.1; EXPRESSED IN PLACENTA, SIGNAL = 0.96; EST_HUMAN HIT: BE537913.1, EVALUE 2.00e-24; SWISSPROT HIT: P54252, EVALUE 3.00e-25
VHKTDLERVLEANDGSGMLDEDEEDLQRALALSRQEIDMEDEEADLRRAIQLSMQGKDILMCVVFIAEE

SEQ ID NO: 48666 - protein, 21 aa, Homo sapiens
  MAP TO AL121773.1; EXPRESSED IN PLACENTA, SIGNAL = 0.96
GCSYYQCFCSLESIKQTWNEC

SEQ ID NO: 48667 - protein, 39 aa, Homo sapiens
  MAP TO AL109953.6; EXPRESSED IN PLACENTA, SIGNAL = 0.94
WFWGADGGNMRSCYSALLLRFEFKPPAMETWKDFPRGEY

SEQ ID NO: 48668 - protein, 26 aa, Homo sapiens
  MAP TO AL109953.6; EXPRESSED IN PLACENTA, SIGNAL = 0.94
QYSPLGKSFHVSMAGGLNSNRSSKAE

SEQ ID NO: 48669 - protein, 48 aa, Homo sapiens
  MAP TO AL035634.7; EXPRESSED IN BT474, SIGNAL = 1.4; EXPRESSED IN PLACENTA, SIGNAL =   1; EXPRESSED IN HELA, SIGNAL = 1.2; EST_HUMAN HIT: AI693971.1, EVALUE 3.00e-13; SWISSPROT HIT: P49880, EVALUE 6.00e+00
TGDDDDWDEDWDGPKSSSYFKDSESADAGGAQRGNSRASSSSMKIPLN

SEQ ID NO: 48670 - protein, 55 aa, Homo sapiens [sequence omitted]

SEQ ID NO: 48671 - protein, 54 aa, Homo sapiens
  MAP TO AC007556.2; EXPRESSED IN PLACENTA, SIGNAL = 0.74; EXPRESSED IN BT474, SIGNAL = 0.63; EXPRESSED IN HELA, SIGNAL = 1.1; EST_HUMAN HIT: AU117089.1, EVALUE 3.00e-10
RTSKRKVLLRHHLHHLRSLLSLSLLREETQLQPILQQKTLLKTPQILLKKTLKY

SEQ ID NO: 48672 - protein, 198 aa, Homo sapiens
  MAP TO AC010766.2; EXPRESSED IN PLACENTA, SIGNAL = 1.2; EST_HUMAN HIT: AW188146.1, EVALUE 1.00e-77; SWISSPROT HIT: P00673, EVALUE 1.00e-05
ETFPLLLLSLGLVLAEASESTMKIIKEEFTDEEMQYDMAKSGQEKQTIEILMNPILLVKNTSLSMSKDDMSSTLLTFRSLHYNDPKGNSSGNDKECCNDMTVWRKVSEANGSCKWSNNFIRSSTEVMRRVHRAPSCKFVQNPGISCCESLELENTVCQFTTGKQFPRCQYHSVTSLEKILTVLTGHSLMSWLVCGSKL

SEQ ID NO: 48673 - protein, 64 aa, Homo sapiens
  MAP TO AP000317.1; EXPRESSED IN PLACENTA, SIGNAL = 0.64; SWISSPROT HIT: P70213, EVALUE 2.00e-11; EST_HUMAN HIT: AA601210.1, EVALUE 2.00e-11
YVNDSRASWCALKKTLIMCSHRAEIAENQTQNLIFQLTELQRKLSSQPHRVKVRALIKKEWDPV

SEQ ID NO: 48674 - protein, 70 aa, Homo sapiens
  MAP TO AJ006997.1; EXPRESSED IN PLACENTA, SIGNAL = 0.63; EXPRESSED IN HELA, SIGNAL = 0.69; EST_HUMAN HIT: AA482662.1, EVALUE 6.00e+00; SWISSPROT HIT: Q12675, EVALUE 1.00e+00
FATQSGQQNHLVHLHTSQPIKNVNPMSIIQRIIKMVFGKGGDQVERRDRRRNHGLNWLQARPSNMSRRRI

SEQ ID NO: 48675 - protein, 74 aa, Homo sapiens; identical to SEQ ID NO: 37194
  MAP TO AP000239.1; EXPRESSED IN PLACENTA, SIGNAL = 0.69; EXPRESSED IN HELA, SIGNAL = 0.6; EST_HUMAN HIT: AA977136.1, EVALUE 3.00e-22; SWISSPROT HIT: Q60934, EVALUE 5.00e-38

SEQ ID NO: 48676 - protein, 40 aa, Homo sapiens
  MAP TO AL049594.4; EXPRESSED IN PLACENTA, SIGNAL = 0.68
CGTGDGGSQASMEKERHLSISCGNIRIALKQQLSRNQMEQ

SEQ ID NO: 48677 - protein, 56 aa, Homo sapiens
  MAP TO AC007102.4; EXPRESSED IN PLACENTA, SIGNAL =   1; EST_HUMAN HIT: AW900843.1, EVALUE 4.80e-01; SWISSPROT HIT: Q08043, EVALUE 3.40e+00
WYPAGWDQVMASTSMTCSELKLCLVVFLRKDLSREWLSCFRSCIMICFWSLPSPAQ

SEQ ID NO: 48678 - protein, 33 aa, Homo sapiens
  MAP TO AF111168.2; EXPRESSED IN PLACENTA, SIGNAL = 0.82; EST_HUMAN HIT: AA278570.1, EVALUE 4.00e-11
ILFRELEVRQVALRHLIHFLKEIGDQKLLLDLF

SEQ ID NO: 48679 - protein, 133 aa, Homo sapiens
  MAP TO AL121907.2; EXPRESSED IN PLACENTA, SIGNAL = 1.1; EST_HUMAN HIT: AA077394.1, EVALUE 6.00e-04; SWISSPROT HIT: P42482, EVALUE 3.70e+00
TIPLHPSPFTLYPITSRCVSSERGSCLLQSQEADVDTIILLILSPCERVVGRVLCVRGTLSRGLTLSPCERVVGRVLCVRGTLSRGLTLSPCERVVGRVLCVRGTLSRGVTLSPCERVGRVLCVRGTLSRGLT

SEQ ID NO: 48680 - protein, 51 aa, Homo sapiens
  MAP TO AL121965.5; EXPRESSED IN PLACENTA, SIGNAL = 2.5e+02; SWISSPROT HIT: P53327, EVALUE 4.00e-16; EST_HUMAN HIT: AU133166.1, EVALUE 7.00e-16
PDGFSIHHAGMLRQDRNLVENLFSNGHIKVLVCTATLAWGVNLPAHAVIIK

SEQ ID NO: 48681 - protein, 84 aa, Homo sapiens
  MAP TO AL122018.4; EXPRESSED IN PLACENTA, SIGNAL =   2; SWISSPROT HIT: P14543, EVALUE 2.00e-44; EST_HUMAN HIT: BF088023.1, EVALUE 1.00e-42
GSPQRVNGKVKGRIFVGSSQVPIVFENTDLHSYVVMNHGRSYTAISTIPETVGYSLLPLAPVGGIIGWMFAVEQDGFKNGFSIT

SEQ ID NO: 48682 - protein, 59 aa, Homo sapiens
  MAP TO AP000176.1; EXPRESSED IN PLACENTA, SIGNAL = 0.61; EXPRESSED IN HBL100, SIGNAL = 0.8; SWISSPROT HIT: P35223, EVALUE 3.00e-01; EST_HUMAN HIT: BF337071.1, EVALUE 1.60e+00
RTRTLDNQPLPKSTRHSHLSFGSHPVVPGHSLPSTGSALTQLNNLEEKGSPPPTQLRNL

SEQ ID NO: 48683 - protein, 70 aa, Homo sapiens
  MAP TO AC007101.1; EXPRESSED IN PLACENTA, SIGNAL =   1; EST_HUMAN HIT: BF182845.1, EVALUE 2.00e-09; SWISSPROT HIT: P25691, EVALUE 6.00e-10
LSTAQPAQSSLKEGISHTEPQEHLCFPHFGEMKATVIWHGETVGCTKEEIKELTHMIQRLMAKVENAKCQ

SEQ ID NO: 48684 - protein, 42 aa, Homo sapiens
  MAP TO AL109823.11; EXPRESSED IN PLACENTA, SIGNAL = 1.6; EXPRESSED IN HELA, SIGNAL = 1.1; EST_HUMAN HIT: AA082628.1, EVALUE 2.00e-15; SWISSPROT HIT: P31600, EVALUE 6.10e+00
TEELIKALQDLENAASGDATVRQKIASLPQEVQDVSLLEKIT

SEQ ID NO: 48685 - protein, 27 aa, Homo sapiens
  MAP TO AL109823.11; EXPRESSED IN PLACENTA, SIGNAL = 1.6; EXPRESSED IN HELA, SIGNAL = 1.1; EST_HUMAN HIT: AW238282.1, EVALUE 3.00e-10
PHQGMLLSDRKLLLCPRKCKMFLYWKK

SEQ ID NO: 48686 - protein, 60 aa, Homo sapiens
  MAP TO AC009532.2; EXPRESSED IN PLACENTA, SIGNAL = 3.1; SWISSPROT HIT: Q28969, EVALUE 1.50e+00; EST_HUMAN HIT: AA688372.1, EVALUE 3.00e-21
NGLMHSCAPSPQEKRMSKATEVMMQYVENLKRTYEKDHAELMEFKKLANQNSSRSCGPSG

SEQ ID NO: 48687 - protein, 185 aa, Homo sapiens
  MAP TO AC007326.22; EXPRESSED IN HELA, SIGNAL = 0.66; EXPRESSED IN BT474, SIGNAL = 0.72; EXPRESSED IN PLACENTA, SIGNAL = 0.61; SWISSPROT HIT: P10264, EVALUE 7.00e-96; EST_HUMAN HIT: AU119631.1, EVALUE 5.00e-63
ENANPECQSAIKPLKGKVPAGSDVISEYVKACDGIGGAMHKAMLMAQAITGVVLGGQVRTFGGKCYNCGQIGHLKKNCPVLNKQNITIQATTTGREPPDLCPRCKKGKHWASQCRSKFDKNGQPLSGNEQRGQPQAPQQTGAFPIQPFVPQGFQGQQPPLSQVFQGISQLPQYNNCPLPQAAVQQ

SEQ ID NO: 48688 - protein, 47 aa, Homo sapiens
  MAP TO AF109907.1; EXPRESSED IN PLACENTA, SIGNAL = 0.99; EST_HUMAN HIT: AW959654.1, EVALUE 4.00e-23; SWISSPROT HIT: P16554, EVALUE 2.00e-18
DLIVDQTIEKVSFCAPDRNFDRAFSYICRDGTTRRWICHCFMAVKDT

SEQ ID NO: 48689 - protein, 67 aa, Homo sapiens
  MAP TO AC009965.3; EXPRESSED IN PLACENTA, SIGNAL = 0.93; EST_HUMAN HIT: AI267928.1, EVALUE 6.30e+00
IIIPHVTDLPPSQLNVLSYEAGLALGAMAGRKAPSSGYLLQGRRRGGRDRVPTWTKRSLILTCFWRH

SEQ ID NO: 48690 - protein, 64 aa, Homo sapiens
  MAP TO AC007382.2; EXPRESSED IN PLACENTA, SIGNAL = 0.6; EXPRESSED IN HELA, SIGNAL = 0.73; EST_HUMAN HIT: BE612554.1, EVALUE 2.00e-05
ETTKAYQRPPIPGTTAQPVTLMQLLAVTVAVATPTTLPRPSPSAASTTSIPRPQSVGHRSQEMG

SEQ ID NO: 48691 - protein, 27 aa, Homo sapiens
  MAP TO AC007382.2; EXPRESSED IN PLACENTA, SIGNAL = 0.6; EXPRESSED IN HELA, SIGNAL = 0.73; EST_HUMAN HIT: BE612554.1, EVALUE 5.30e-01
NSIFLQVRPQKPIRGHLFQGQLHSRSL

SEQ ID NO: 48692 - protein, 147 aa, Homo sapiens
  MAP TO AL109613.11; EXPRESSED IN BT474, SIGNAL =   1; EXPRESSED IN HBL100, SIGNAL = 0.92; EXPRESSED IN PLACENTA, SIGNAL = 1.9; EXPRESSED IN HELA, SIGNAL = 1.5; EST_HUMAN HIT: BE747365.1, EVALUE 5.00e-61; SWISSPROT HIT: P16591, EVALUE 5.00e-07
VSENLVQRDGDFLVRDSLSSPGNFVLTCQWKNLAQHFKINRTVLRLSEAYSRVQYQFEMESFDSIPGLVRCYVGNRRPISQQSGAIIFQPINRTVPLRCLEEHYGTSPGQAREGSLTKGRPDVAKRLSLTMGGVQAREQNLPRGNLL

SEQ ID NO: 48693 - protein, 32 aa, Homo sapiens
  MAP TO AF097649.1; EXPRESSED IN PLACENTA, SIGNAL = 1.7
MFQLPPKLPKPKIYPGVQQIFPQCLLHPTIVT

SEQ ID NO: 48694 - protein, 26 aa, Homo sapiens
  MAP TO AF121782.1; EXPRESSED IN PLACENTA, SIGNAL = 1.9; SWISSPROT HIT: O28076, EVALUE 3.70e+00
PDLPGRAGVRIQKTQSESLDGQPGGY

SEQ ID NO: 48695 - protein, 519 aa, Homo sapiens
  MAP TO AF067845.1; EXPRESSED IN PLACENTA, SIGNAL = 1.1; EST_HUMAN HIT: BE439733.1, EVALUE 4.00e-23; SWISSPROT HIT: Q27409, EVALUE 3.00e-62
MAFPRTVRTHTAVPHTVRTRTAFPRTLRTRTAFPRHTQDAHVLSTHSQDPHVLSTHSQDPHGLSTHSQDPHSLSTHTQDPHGLSTHSQDPHGLSTHSQDPHSLSTHTQDPHGLSTHSQDPHGRSTLRTRTAFPHTLRTRTAFPHTVRTRTAVPHTVRTRTAFPHTVRTRTVFPHTLRICTAFPHTVRTRTVFPHTLRICTAFPHTVRTRTVFPHTLRICTAFPHTVRTRTAVPHTVRTRTAFPRTLRTRTAFPHTLRTRTAFPHTVRTRTAFPRTVRTRAAFPHTVRTRTAFPRTLRTRMAFPRTLRTRTAFPRTLRTRAAFPHTLRTRTAFPRTLRTRTAFPRTLRTRTAFPRTVRTRTAFPRTVRTRAAFPRTVRTRAAFPRTLRTRTAFPRTVRTRTAFPRTVRTRAAFPRTVRTRTAFPRTLRTRAAFPRTVRTRAAFPRTVRTHAAFPHTVRTRTAFPRTLRTRTAFPRTLRTRTAVPHMLRTRTAFPRTLRTRTAFPRTLRTRAAFPRHKSMK

SEQ ID NO: 48696 - protein, 400 aa, Homo sapiens
  MAP TO AF067845.1; EXPRESSED IN PLACENTA, SIGNAL = 1.1; SWISSPROT HIT: P10419, EVALUE 2.00e-17; EST_HUMAN HIT: AW438469.1, EVALUE 9.00e-14
VAWKGRAGPECAWKGRAGPECAWKGRAGPEHVWNGRAGPERAWKGRAGPERAWKGRAGPDSVWKGRVGPDCAWKGRAGPDCAWKGRAGPECAWKGRAGPDCAWKGRAGPDCAWKGRAGPDSAWKGRAGPECAWKGRAGPDCAWKGRAGPDCAWKGRAGPDCAWKGRAGPECAWKGRAGPECAWKGRAGPECVWKGRAGPERAWKGRAGPECAWKGHAGPECAWKGRAGPDSVWKGRAGPDCAWKGRAGPDCVWKGRAGPECVWKGRAGPECAWKGRAGPDCVWNGRAGPDCVWKGRADPECVWKHRAGPDCVWKGRADPECVWKHRAGPDCVWKGRADPECVWKHRAGPDCVWKGRAGPDCVWNGRAGPDCVWKGRAGPECVWKGRAGPECGTAVRVLTV

SEQ ID NO: 48697 - protein, 383 aa, Homo sapiens
  MAP TO AF129408.1; EXPRESSED IN PLACENTA, SIGNAL = 1.9; EST_HUMAN HIT: AI640519.1, EVALUE 1.00e-84; SWISSPROT HIT: P32583, EVALUE 1.70e-01
LLDSASQDNGLSRKISRKRVCSSDSDSSLQVVKKSSKARTGLLRITRRCAATAANKIKLMSDVEDVSLENVHTRSKNGRKKPLHLACTTAKKKLSDCEGSVHCEVPSEQYACEGKPPDPDSEGSTKVLSQALNGDSDSEDMLNSEHKHRHTNIHKIDAPSKRKSSSVTSSGEDSKSHIPGSETDRTFSSESTLAQKATAENNFEVELNYGLRRWNGRRLRTYGKAPFSKTKVIHDSQETAEKEVKRKRSHPELENVKISETTGNSKFRPDTSSKSSDLGSVTESDIDCTDNTKTKRRKTKGKAKVVRKGKTFTANISKTVRRQRQSKRPRLSVDDNDWEDLDYAKSKRVLRRSKIKTRNQGRRTVRYHDGDDDRSLENVLDFN

SEQ ID NO: 48698 - protein, 81 aa, Homo sapiens
  MAP TO AC007099.3; EXPRESSED IN PLACENTA, SIGNAL =   1; EST_HUMAN HIT: AA453068.1, EVALUE 4.00e-08
RRPGKKFLQDRESSSDSSDSEDGSEDTVSDLSVRRHRRFERTLNKNVFTSAEELERAQRLEERERIIREIWMNGQPEVPGT

SEQ ID NO: 48699 - protein, 55 aa, Homo sapiens
  MAP TO AC007099.3; EXPRESSED IN PLACENTA, SIGNAL =   1; EST_HUMAN HIT: AA453068.1, EVALUE 5.00e-18
SSSVLCFWRVHRAGADPGCSGDKDLLPHRLQAASREEVPAGQREQQRQQRQRGWQ

SEQ ID NO: 48700 - protein, 52 aa, Homo sapiens
  MAP TO AP000239.1; EXPRESSED IN PLACENTA, SIGNAL = 0.74; EST_HUMAN HIT: AU129570.1, EVALUE 3.80e+00; SWISSPROT HIT: P47319, EVALUE 5.90e+00
KQWENVASFLHYTYLCSPNKPLTFRLLQNDLEVNVYVSKTLADTSNSFPTTN

SEQ ID NO: 48701 - protein, 21 aa, Homo sapiens
  MAP TO AP000239.1; EXPRESSED IN PLACENTA, SIGNAL = 0.74
NSGKMWHLFSTIHICVAPTSL

SEQ ID NO: 48702 - protein, 831 aa, Homo sapiens
  MAP TO AC004388.1; EXPRESSED IN PLACENTA, SIGNAL = 0.93; EST_HUMAN HIT: AU124569.1, EVALUE 1.00e-57; SWISSPROT HIT: Q14517, EVALUE 4.00e-65
SQNIFGLDVIETPEGDKMPQLIVQKELDREEKDTYVMKVKVEDGGFPQRSSTAILQVSVTDTNDNHPVFKETEIEVSIPENAPVGTSVTQLHATDADIGENAKIHFSFSNLVSNIARRLFHLNATTGLITIKEPLDREETPNHKLLVLASDGGLMPARAMVLVNVTDVNDNVPSIDIRYIVNPVNDTVVLSENIPLNTKIALITVTDKDADHNGRVTCFTDHEIPFRLRPVFSNQFLLETAAYLDYESTKEYAIKLLAADAGKPPLNQSAMLFIKVKDENDNAPVFTQSFVTVSIPENNSPGIQLTKVSAMDADSGPNAKINYLLGPDAPPEFSLDCRTGMLTVVKKLDREKEDKYLFTILAKDNGVPPLTSNVTVFVSIIDQNDNSPVFTHNEYNFYVPENLPRHGTVGLITVTDPDYGDNSAVTLSILDENDDFTIDSQTGVIRPNISFDREKQESYTFYVKAEDGGRVSRSSSAKVTINVVDVNDNKPVFIVPPSNCSYELVLPSTNPGTVVFQVIAVDNDTGMNAEVRYSIVGGNTRDLFAIDQETGNITLMEKCDVTDLGLHRVLVKANDLGQPDSLFSVVIVNLFVNESVTNATLINELVRKSTEAPVTPNTEIADVSSPTSDYVKILVAAVAGTITVVVVIFITAVVRCRQAPHLKAAQKNKQNSEWATPNPENRQMIMMKKKKKKKKHSPKNLLLNFVTIEETKADDVDSDGNRVTLDLPIDLEEQTMGKYNWVTTPTTFKPDSPDLARHYKSASPQPAFQIQPETPLNSKHHIIQELPLDNTFVACDSISKCSSSSSDPYSVSDCGYPVTTFEVPVSVHTRP

SEQ ID NO: 48703 - protein, 33 aa, Homo sapiens
  MAP TO AL031734.9; EXPRESSED IN PLACENTA, SIGNAL = 1.2
EKAHFTNGNFFLVFAEGQGRVSINMVGIEQIGI

SEQ ID NO: 48704 - protein, 70 aa, Homo sapiens
  MAP TO AC008249.14; EXPRESSED IN HELA, SIGNAL =   1; EXPRESSED IN PLACENTA, SIGNAL = 1.8; EST_HUMAN HIT: BE892231.1, EVALUE 4.00e-38; SWISSPROT HIT: P16893, EVALUE 6.80e+00
RCDDWGLDTMRQIQVFEDEPARIKCPLFEHFLKFNYSTAHSAGLTLIWYWTRQDRDLEEPINFRLPENRI

SEQ ID NO: 48705 - protein, 42 aa, Homo sapiens
  MAP TO AC007842.1; EXPRESSED IN PLACENTA, SIGNAL = 1.2; SWISSPROT HIT: Q9Y2G7, EVALUE 2.00e-12; EST_HUMAN HIT: BE890786.1, EVALUE 4.00e-13
VSLAFRDVSIDLSQEEWECLDAVQRDLYKDVMLENYSNLVSL

SEQ ID NO: 48706 - protein, 17 aa, Homo sapiens
  MAP TO AC007842.1; EXPRESSED IN PLACENTA, SIGNAL = 1.2; EST_HUMAN HIT: BE261849.1, EVALUE 8.60e-01
KRSGSAWTLCRGTCTRM

SEQ ID NO: 48707 - protein, 160 aa, Homo sapiens
  MAP TO AC007480.1; EXPRESSED IN PLACENTA, SIGNAL = 0.94; EST_HUMAN HIT: AA132806.1, EVALUE 2.00e-10; SWISSPROT HIT: Q03112, EVALUE 2.00e-89
HSIFSPSLEEQTAVSGAVNDSIKAIASIAEKYFGSTGLVGLQDKKVGALPYPSMFPLPFFPAFSQSMYPFPDRDLRSLPLKMEPQSPGEVKKLQKGSSESPFDLTTKRKDEKPLTPVPSKPPVTPATSQDQPLDLSMGSRSRASGTKLTEPRKNHVFGGK

SEQ ID NO: 48708 - protein, 138 aa, Homo sapiens
  MAP TO AL122001.5; EXPRESSED IN PLACENTA, SIGNAL = 1.9; SWISSPROT HIT: P03355, EVALUE 1.00e-21; EST_HUMAN HIT: AU134310.1, EVALUE 6.00e-53
VQGTSLQPVADLSKEIDVVAKGWPHCLWVMVAVAILVSEAVKIIQERDLTVWTSHDVNSILTAKGDLWLSDSHLLKYQGLLLEGPVLQLCTWATLNPATFLPDIEKKIERNCQQVIAQTYAARGNLLEVPLTDPDLNL

SEQ ID NO: 48709 - protein, 38 aa, Homo sapiens
  MAP TO AL122001.5; EXPRESSED IN PLACENTA, SIGNAL = 1.9; EST_HUMAN HIT: AW800654.1, EVALUE 4.90e+00; SWISSPROT HIT: P15541, EVALUE 3.60e+00
SLPTGQDFSLYVTEKNRNNSRSPYTGPRNELATRGRPE

SEQ ID NO: 48710 - protein, 135 aa, Homo sapiens
  MAP TO AC010872.3; EXPRESSED IN PLACENTA, SIGNAL = 4.1; EST_HUMAN HIT: BF224228.1, EVALUE 9.80e+00; SWISSPROT HIT: P14605, EVALUE 1.10e+00
VIAKKDDKYTVNIQSVEASENIDVISLMLQAGYAEYFQVELEYFPKSVSEYSMLNSESKNKVNIKKVISALLEGPKSKKYHSNNLVENNLSLPKSLAVNISEFKNPFTLSVGPESSWPYKEYIFRPGTVLEVKCS

SEQ ID NO: 48711 - protein, 444 aa, Homo sapiens
  MAP TO AL049796.19; EXPRESSED IN HELA, SIGNAL = 1.7; EXPRESSED IN PLACENTA, SIGNAL = 1.1; EXPRESSED IN HBL100, SIGNAL = 1.3; SWISSPROT HIT: P32334, EVALUE 2.00e-06; EST_HUMAN HIT: AU130849.1, EVALUE 1.00e-122
SFAANGIQAHPESSTGSDARTTAESQTTGKQSLIPRTPKARKRKSRTTGSLPKGTEPSTDGETSEAESNYSVSEHHDTILRVTRRRQILIACSPVSSVRKKPKVTPTKESYTEEIVSEAESHVSGISRIVLPTEKTTGARRSKAKSLTDPSQESHTEAISDAETSSSDISFSGIATRRTRSMQRKLKAQTEKKDSKIVPGNEKQIVGTPVNSEDSDTRQTSHLQARSLSEINKPNFYNNDFDDDFSHRSSENILTVHEQANVESLKETKQNCKDLDEDANGITDEGKEINEKSSQLKNLSELQDTSLQQLVSQRHSTPQNKNAVSVHSNLNSEAVMKSLTQTFATVEVGRWNNNKKSPIKASDLTKFGDCGGSDDEEESTVISVSEDMNSEGNVDFECDTKLYTSAPNTSQGKDNSVLLVLSSDESQQSENSENEEDTLCFVEN

SEQ ID NO: 48712 - protein, 71 aa, Homo sapiens
  MAP TO AC007317.3; EXPRESSED IN PLACENTA, SIGNAL = 0.93; SWISSPROT HIT: P37128, EVALUE 8.50e-01; EST_HUMAN HIT: BF129522.1, EVALUE 5.40e+00
EIIMIKILKTSKYYIVRIALFFRRKKNNVCFKKKEIFLQGTLAIHSIIHYGNRKKTIVDIKIWHPGSSEEV

SEQ ID NO: 48713 - protein, 25 aa, Homo sapiens
  MAP TO AC007567.1; EXPRESSED IN PLACENTA, SIGNAL =  97; EXPRESSED IN HELA, SIGNAL = 0.62
SSSVPNHICHHCAPFCYRQNVFHVW

SEQ ID NO: 48714 - protein, 46 aa, Homo sapiens
  MAP TO AL035695.17; EXPRESSED IN PLACENTA, SIGNAL = 0.83
SNRRWGGGEEGGRGGKGDDSAIVPLTLLVYEAAQKLIRTNSSIRDH

SEQ ID NO: 48715 - protein, 28 aa, Homo sapiens
  MAP TO AC006155.2; EXPRESSED IN PLACENTA, SIGNAL = 0.61
PKVYSGNTQISFRSGRGKEIPWTVRTNF

SEQ ID NO: 48716 - protein, 52 aa, Homo sapiens
  MAP TO AL096792.5; EXPRESSED IN PLACENTA, SIGNAL = 4.7; EST_HUMAN HIT: BE501753.1, EVALUE 2.20e+00
LKFQKLTFLLQSLFLSLLLSLDFPRNYLLNRVCVLQLLQFQSTLIILEPQFV

SEQ ID NO: 48717 - protein, 33 aa, Homo sapiens
  MAP TO AL132776.1; EXPRESSED IN PLACENTA, SIGNAL = 1.4; EST_HUMAN HIT: AA249110.1, EVALUE 1.00e-11
VKQLVSQSKKTGQGDYPLNNELDKEQEDVASTT

SEQ ID NO: 48718 - protein, 38 aa, Homo sapiens
  MAP TO AC008269.1; EXPRESSED IN PLACENTA, SIGNAL = 0.62; EST_HUMAN HIT: T65891.1, EVALUE 9.00e-04
LRVSHLMRAFLLMETLCRIPRQYTVSHGKGVRQLSLLA

SEQ ID NO: 48719 - protein, 36 aa, Homo sapiens
  MAP TO AF130358.1; EXPRESSED IN PLACENTA, SIGNAL = 0.96; SWISSPROT HIT: P01744, EVALUE 2.90e+00; EST_HUMAN HIT: BF508646.1, EVALUE 9.70e+00
EKQKFSSWMKQQPPLTLRWTSWCRPQSGRSFLIASS

SEQ ID NO: 48720 - protein, 44 aa, Homo sapiens
  MAP TO AF067845.1; EXPRESSED IN PLACENTA, SIGNAL = 1.9
MGFMVLPAQMHSEVAVFLQMDTRVHFPSFIPTNPAARSSSPSTL

SEQ ID NO: 48721 - protein, 28 aa, Homo sapiens
  MAP TO AL008710.1; EXPRESSED IN PLACENTA, SIGNAL = 1.5
EDKTQLLYQYDDKASSSSSIKERIVEDA

SEQ ID NO: 48722 - protein, 35 aa, Homo sapiens
  MAP TO AL008710.1; EXPRESSED IN PLACENTA, SIGNAL = 1.5
ISMMIRQAHLLASRRGLLKMQVSISLCIMFICVWY

SEQ ID NO: 48723 - protein, 175 aa, Homo sapiens
  MAP TO AC010904.2; EXPRESSED IN PLACENTA, SIGNAL = 5.1; EST_HUMAN HIT: AW977878.1, EVALUE 5.00e-04; SWISSPROT HIT: P40889, EVALUE 6.10e-02
FLYKLPSLGYLFIAMQQQKNTQRMPIEEEILTGQRMSTGHSNTNRTDDANRTENTKRTGDVKRIENTNRTGDANRTESTNRRGDVNRTENTNRTGNTNRTGDVNRTENRAGMANRTDNTNRTGDATVIKQEMLTGQEMPREQEITSRTVNTNRTEFVNGTGSTNRIGDIALNNRV

SEQ ID NO: 48724 - protein, 36 aa, Homo sapiens
  MAP TO AC007751.3; EXPRESSED IN PLACENTA, SIGNAL = 0.98; EST_HUMAN HIT: AW500547.1, EVALUE 1.30e+00
SRNQNRASSEPQEHWVTKQSTCLAIVSIAVPETGDC

SEQ ID NO: 48725 - protein, 89 aa, Homo sapiens
  MAP TO AC012447.2; EXPRESSED IN PLACENTA, SIGNAL = 1.1; EST_HUMAN HIT: AV726632.1, EVALUE 7.00e-42
PIPHWTCQKKPVRRRYEPYGMYSDDDANSDASSVCSERSYGSRNGGIPHYLRQTEDVAEVLNHCASSNWSERKEGLLGLQNLLKSQRTL

SEQ ID NO: 48726 - protein, 39 aa, Homo sapiens
  MAP TO AC007597.2; EXPRESSED IN PLACENTA, SIGNAL = 0.72; EST_HUMAN HIT: BE152343.1, EVALUE 1.00e-02; SWISSPROT HIT: P33510, EVALUE 1.20e+00
ILVVQWNLYMVLICWWLMMLSIFFMCLLVILASSLLKYL

SEQ ID NO: 48727 - protein, 224 aa, Homo sapiens
  MAP TO AL032818.2; EXPRESSED IN PLACENTA, SIGNAL = 1.3; SWISSPROT HIT: O35245, EVALUE 7.00e-07
KHFLATGIIRFYLSNPEDFIPFHAVSQVDHIMRIILGFLLFLTILKTLRYSRFFYDVRLAQRAIQAALPGICHMAFVVSVYFFVYMAFGYLVFGQHEWNYSNLIHSTQTVFSYCVSAFQNTEFSNNRILGVLFLSSFMLVMICVLINLFQAVILSAYEEMKQPVYEEPSDEVEAMTYLCRKLRTMFSFLTSQSKAKDEPEFFIDMLYGQPEKNSHRYLGLKTRN

SEQ ID NO: 48728 - protein, 167 aa, Homo sapiens
  MAP TO AC007256.1; EXPRESSED IN PLACENTA, SIGNAL = 1.2; EST_HUMAN HIT: BE271526.1, EVALUE 2.00e-98; SWISSPROT HIT: Q14790, EVALUE 2.00e-99
ALTTTFEELHFEIKPHDDCTVEQIYEILKIYQLMDHSNMDCFICCILSHGDKGIIYGTDGQEAPIYELTSQFTGLKCPSLAGKPKVFFIQACQGDNYQKGIPVETDSEEQPYLEMDLSSPQTRYIPDEADFLLGMATVNNCVSYRNPAEGTWYIQSLCQSLRERCPR

SEQ ID NO: 48729 - protein, 21 aa, Homo sapiens
  MAP TO AC007511.1; EXPRESSED IN PLACENTA, SIGNAL = 0.92; EST_HUMAN HIT: H15996.1, EVALUE 3.00e-05
LFTSLFIRFLFCSLERSWLFR

SEQ ID NO: 48730 - protein, 58 aa, Homo sapiens
  MAP TO AL078582.7; EXPRESSED IN PLACENTA, SIGNAL = 0.92; SWISSPROT HIT: Q29040, EVALUE 2.00e-12
FDMLLATSSRFRMMNLQGEEFVCLKSIILLNSGELITQDNSMLDEMFICSFQPDTIYP

SEQ ID NO: 48731 - protein, 29 aa, Homo sapiens
  MAP TO AL078582.7; EXPRESSED IN PLACENTA, SIGNAL = 0.92
RHAAGYIISVPHDESAGRGVCVPQIYYFA

SEQ ID NO: 48732 - protein, 50 aa, Homo sapiens
  MAP TO AC007735.2; EXPRESSED IN PLACENTA, SIGNAL = 0.89; SWISSPROT HIT: P08547, EVALUE 5.00e-05; EST_HUMAN HIT: AW899457.1, EVALUE 2.00e-07
EEKLHPYLLMPYTEKNSKCITDLNVKSNNRKLLKENTGENLYDLELNKEF

SEQ ID NO: 48733 - protein, 52 aa, Homo sapiens
  MAP TO AC007106.6; EXPRESSED IN PLACENTA, SIGNAL = 1.4; SWISSPROT HIT: P34760, EVALUE 8.00e+00
LQIPRFLVILLLRGLYSGYSTVQSRHPTLLKWMCVPSQSRGLLPINVPTPLM

SEQ ID NO: 48734 - protein, 28 aa, Homo sapiens
  MAP TO AC007281.3; EXPRESSED IN PLACENTA, SIGNAL = 1.2; EST_HUMAN HIT: AV705132.1, EVALUE 2.00e-06
IHGVHVQVCYMGILHDAKVWGMTDPITQ

SEQ ID NO: 48735 - protein, 43 aa, Homo sapiens
  MAP TO AC007567.1; EXPRESSED IN PLACENTA, SIGNAL = 2.7; SWISSPROT HIT: P21414, EVALUE 1.00e-05
PSNPTSQLTWTVLPQGFRDSPHLFGQTLAQDLSQFSYLDTLVL

SEQ ID NO: 48736 - protein, 35 aa, Homo sapiens
  MAP TO Z83844.5; EXPRESSED IN PLACENTA, SIGNAL = 1.5; EST_HUMAN HIT: AW451790.1, EVALUE 8.00e-16
TKCWWGYGEEQLPGAAGANVLCCTHGRKLTSFSSS

SEQ ID NO: 48737 - protein, 36 aa, Homo sapiens
  MAP TO AC007313.3; EXPRESSED IN PLACENTA, SIGNAL = 1.5; EST_HUMAN HIT: AW887541.1, EVALUE 1.00e-06
MKHGFTRMILKTKYNQSNGYQEREMVQSKSRLVKSK

SEQ ID NO: 48738 - protein, 19 aa, Homo sapiens
  MAP TO AC007539.8; EXPRESSED IN PLACENTA, SIGNAL = 1.3
PERKICVIINVIIIIINNK

SEQ ID NO: 48739 - protein, 42 aa, Homo sapiens
  MAP TO AC006427.13; EXPRESSED IN PLACENTA, SIGNAL = 1.4; EST_HUMAN HIT: BE963397.2, EVALUE 7.10e+00
VVVMHLVTGFVTHRKPMVTHGPRTFFPEKDTQMTVPLLAHTL

SEQ ID NO: 48740 - protein, 28 aa, Homo sapiens
  MAP TO AB016897.1; EXPRESSED IN PLACENTA, SIGNAL = 1.4; SWISSPROT HIT: P55196, EVALUE 2.00e-09
PDISPTERTHKVIAVVNKMVSMMEGVIQ

SEQ ID NO: 48741 - protein, 54 aa, Homo sapiens
  MAP TO AL079300.11; EXPRESSED IN PLACENTA, SIGNAL = 1.4; SWISSPROT HIT: O67650, EVALUE 3.50e+00
SNISANNNIHSYSALRSLQFLSCPTPAEWKKVMDGQRNGRWTATREESVIWEPF

SEQ ID NO: 48742 - protein, 51 aa, Homo sapiens
  MAP TO AC007556.2; EXPRESSED IN PLACENTA, SIGNAL = 1.4; EXPRESSED IN HELA, SIGNAL = 1.3; SWISSPROT HIT: P28590, EVALUE 2.70e+00
TGTMTVVTIATRGAAYTRLANRISLPVRTGAALVKPSSVMRIMTVETDLMS

SEQ ID NO: 48743 - protein, 28 aa, Homo sapiens
  MAP TO AC007556.2; EXPRESSED IN PLACENTA, SIGNAL = 1.2; EXPRESSED IN HELA, SIGNAL = 1.5; SWISSPROT HIT: P98164, EVALUE 1.00e-13
ELPINLPPPCRCMHGGNCYFDETDLPKC

SEQ ID NO: 48744 - protein, 29 aa, Homo sapiens
  MAP TO AC007556.2; EXPRESSED IN PLACENTA, SIGNAL = 1.2; EXPRESSED IN HELA, SIGNAL = 1.5
SNCLSTCPPHAGACTEEIAILMRLTSPNA

SEQ ID NO: 48745 - protein, 18 aa, Homo sapiens
  MAP TO AC006427.13; EXPRESSED IN PLACENTA, SIGNAL = 1.4
FRWRICLRMDYTQSHIHT

SEQ ID NO: 48746 - protein, 29 aa, Homo sapiens
  MAP TO AL022238.1; EXPRESSED IN PLACENTA, SIGNAL = 1.4; EXPRESSED IN HELA, SIGNAL = 1.3
RYSESDLQDTETQWWSLRDKAAFEDDRRD

SEQ ID NO: 48747 - protein, 45 aa, Homo sapiens
  MAP TO AC006389.2; EXPRESSED IN PLACENTA, SIGNAL = 2.8; SWISSPROT HIT: P15772, EVALUE 8.20e+00
LEAEKSKIKATVDSVSDEGLFLIDDTFLLHPHMAEGGKAAPFNLF

SEQ ID NO: 48748 - protein, 96 aa, Homo sapiens
  MAP TO AC005017.1; EXPRESSED IN PLACENTA, SIGNAL = 0.66; EST_HUMAN HIT: BE720122.1, EVALUE 5.30e+00; SWISSPROT HIT: P56316, EVALUE 2.80e+00
NAVNQTDTIPSLIELAIKNHTPMEIRKERGKCPDLYLLFWSSIAFSAVKPTLCVISFLNNEGPATGLTYKEKLIKLICQIDSQPKCISFLWHKTKM

SEQ ID NO: 48749 - protein, 115 aa, Homo sapiens
  MAP TO AC004080.1; EXPRESSED IN PLACENTA, SIGNAL = 3.9; EST_HUMAN HIT: AI346148.1, EVALUE 9.00e-42; SWISSPROT HIT: P49640, EVALUE 2.00e-36
AYSPTSMAFVCLCLYTPVLWTRCAGSGSEALVGSPNGGSETPKSNGGSGGGGSQGTLACSASDQMRRYRTAFTREQIARLEKEFYRENYVSRPRRCELAAALNLPETTIKVCGVQ

SEQ ID NO: 48750 - protein, 132 aa, Homo sapiens [sequence omitted]

SEQ ID NO: 48751 - protein, 60 aa, Homo sapiens
  MAP TO AC006270.1; EXPRESSED IN PLACENTA, SIGNAL = 4.1; EST_HUMAN HIT: BF379385.1, EVALUE 1.00e-10
AITQRISPCSTLTSSTASPPASSPCSTLPPISTNATAKDCSYGAVTSPTSTLESRDSGII

SEQ ID NO: 48752 - protein, 28 aa, Homo sapiens
  MAP TO AC006270.1; EXPRESSED IN PLACENTA, SIGNAL = 4.1; EST_HUMAN HIT: BF379385.1, EVALUE 3.00e-08
HSHPSVQMQLPRTAAMGLLLVQPLPLKA

SEQ ID NO: 48753 - protein, 52 aa, Homo sapiens
  MAP TO AC005033.1; EXPRESSED IN PLACENTA, SIGNAL = 3.4; EST_HUMAN HIT: BE882304.1, EVALUE 2.00e-23
LKCDLQERLLCPSLLAGTADGSLRMDDPKGDFITLYQMASQSSASHYKLQVI

SEQ ID NO: 48754 - protein, 34 aa, Homo sapiens
  MAP TO AL121894.14; EXPRESSED IN PLACENTA, SIGNAL = 0.49; EST_HUMAN HIT: AW572915.1, EVALUE 4.00e-03; SWISSPROT HIT: Q9Z0H6, EVALUE 3.00e-05
EFALNTFNVQSKEEHAYRLLRVLSSWREDSMDRK

SEQ ID NO: 48755 - protein, 44 aa, Homo sapiens
  MAP TO AC022317.4; EXPRESSED IN PLACENTA, SIGNAL = 0.47
YFFDYSHVIDKSTNVVSTSTTINCNTLNKLLNLMCLNFLISKIR

SEQ ID NO: 48756 - protein, 34 aa, Homo sapiens
  MAP TO AC008701.5; EXPRESSED IN PLACENTA, SIGNAL = 0.67
MAWSVGLGEAADFYLDLDFSTFFQEVSVWKLVVK

SEQ ID NO: 48757 - protein, 53 aa, Homo sapiens
  MAP TO AL137022.6; EXPRESSED IN PLACENTA, SIGNAL = 0.47; EST_HUMAN HIT: BE870829.1, EVALUE 4.90e+00
AQANTVNPKSWIRIHGNEFGQTKASIPPPWSSSLSTHSHTCSCSFCQDKLARP

SEQ ID NO: 48758 - protein, 109 aa, Homo sapiens; identical to SEQ ID NO: 42624
  MAP TO AC009334.3; EXPRESSED IN PLACENTA, SIGNAL = 0.48; SWISSPROT HIT: Q99698, EVALUE 4.00e-58; EST_HUMAN HIT: BE565303.1, EVALUE 5.50e+00

SEQ ID NO: 48759 - protein, 32 aa, Homo sapiens
  MAP TO AC022036.3; EXPRESSED IN PLACENTA, SIGNAL = 0.51; EST_HUMAN HIT: AW082206.1, EVALUE 3.00e-04; SWISSPROT HIT: P08547, EVALUE 4.00e-03
LLKSTLPKCPSKIKWINSLWCIHTLKYHSSVT

SEQ ID NO: 48760 - protein, 47 aa, Homo sapiens
  MAP TO AC011229.2; EXPRESSED IN PLACENTA, SIGNAL = 0.46
TLKTILCLERFPFKMQINTIILVENIFRRYAIKILNQLNKADMCNHI

SEQ ID NO: 48761 - protein, 62 aa, Homo sapiens; identical to SEQ ID NO: 37476
  MAP TO AC019194.2; EXPRESSED IN PLACENTA, SIGNAL = 0.47

SEQ ID NO: 48762 - protein, 53 aa, Homo sapiens
  MAP TO AC019194.2; EXPRESSED IN PLACENTA, SIGNAL = 0.47; SWISSPROT HIT: P75931, EVALUE 6.10e+00; EST_HUMAN HIT: BF356412.1, EVALUE 8.60e-02
VAMESWPPLLMTSSSWPKPTPAGPWRTCGAWRKTHSSGPWNCWELSRVSAGLS

SEQ ID NO: 48763 - protein, 36 aa, Homo sapiens
  MAP TO AC022474.3; EXPRESSED IN PLACENTA, SIGNAL = 0.47; EST_HUMAN HIT: W72530.1, EVALUE 9.70e+00
DTEDKGNGLYPSSGALNVNSWNSYNHLITIMEEGKP

SEQ ID NO: 48764 - protein, 28 aa, Homo sapiens
  MAP TO AC022474.3; EXPRESSED IN PLACENTA, SIGNAL = 0.47
ETLKIKEMASILLLVPLTLIPGTPTTIS

SEQ ID NO: 48765 - protein, 87 aa, Homo sapiens
  MAP TO AL133414.3; EXPRESSED IN PLACENTA, SIGNAL = 0.46; EST_HUMAN HIT: AW951147.1, EVALUE 2.00e-32; SWISSPROT HIT: Q14953, EVALUE 2.00e-47
PLVKSEETVILQCWSDVMFEHFLLHREGTFNHTLRLIGEHIDGVSKGNFSIGRMTQDLAGTYRCYGSVTHSPYQLSAPSDPLDIVIT

SEQ ID NO: 48766 - protein, 49 aa, Homo sapiens
  MAP TO AC018578.3; EXPRESSED IN PLACENTA, SIGNAL = 0.47; SWISSPROT HIT: P16393, EVALUE 4.70e+00; EST_HUMAN HIT: BF678686.1, EVALUE 1.20e-01
CDGLQCQHSQWWGHSPSVLLWLHAGSCWCLRGDFSLQCRDMLYTSITDL

SEQ ID NO: 48767 - protein, 46 aa, Homo sapiens
  MAP TO AL133352.10; EXPRESSED IN PLACENTA, SIGNAL = 0.51; SWISSPROT HIT: Q93098, EVALUE 3.00e-22; EST_HUMAN HIT: AI924610.1, EVALUE 4.10e-02
AYLIYSSSVAAGAQSGIEECKYQFAWDRWNCPERALQLSSHGGLRS

SEQ ID NO: 48768 - protein, 40 aa, Homo sapiens
  MAP TO AC019281.4; EXPRESSED IN PLACENTA, SIGNAL = 0.46; EST_HUMAN HIT: BE182653.1, EVALUE 4.20e+00
PSLLSSPATPGKIGPIGKLSAPRTLTPLKVQSLSAMLEPS

SEQ ID NO: 48769 - protein, 41 aa, Homo sapiens
  MAP TO AL121713.24; EXPRESSED IN PLACENTA, SIGNAL = 0.46; EST_HUMAN HIT: AW102680.1, EVALUE 2.00e-16
NANRGNGPRGNDAAATASPGDLLATEVLRLRHRTTESEILE

SEQ ID NO: 48770 - protein, 45 aa, Homo sapiens
  MAP TO AL139195.2; EXPRESSED IN PLACENTA, SIGNAL = 0.57
GAYLRNDIFEDAGILCQRVNKQVGDIFSNPETVLAKLIQNVFEIK

SEQ ID NO: 48771 - protein, 31 aa, Homo sapiens
  MAP TO AC010767.3; EXPRESSED IN PLACENTA, SIGNAL = 0.46; SWISSPROT HIT: P13608, EVALUE 8.50e+00
CSSDTPDLSGYEVSGTVFGVADMVSSTMIEQ

SEQ ID NO: 48772 - protein, 27 aa, Homo sapiens
  MAP TO AC010767.3; EXPRESSED IN PLACENTA, SIGNAL = 0.46
VRQIPLTYLAMRCQALYLVLLIWCQVQ

SEQ ID NO: 48773 - protein, 45 aa, Homo sapiens
  MAP TO AC013726.3; EXPRESSED IN PLACENTA, SIGNAL = 0.49; SWISSPROT HIT: P10523, EVALUE 2.00e-20; EST_HUMAN HIT: W28472.1, EVALUE 9.00e-19
SSVRLLIRKVQHAPLEMGPQPRAEAAWQFFMSDKPLHLAVSLNKE

SEQ ID NO: 48774 - protein, 28 aa, Homo sapiens
  MAP TO AL160281.2; EXPRESSED IN PLACENTA, SIGNAL = 0.49; EST_HUMAN HIT: H58819.1, EVALUE 6.00e+00
WNSWWRRELEKALCVKVMWLSSKMGSLC

SEQ ID NO: 48775 - protein, 75 aa, Homo sapiens
  MAP TO AC015493.4; EXPRESSED IN PLACENTA, SIGNAL = 0.54; EST_HUMAN HIT: AA931321.1, EVALUE 6.00e-33; SWISSPROT HIT: P40190, EVALUE 1.00e-03
VYWTCPAEDVDSFEMEFYEVITSPPNNVQMELCGQIRDIMQQNLELHNLTPNTEYVFKVRAINDNGPGQWSDICK

SEQ ID NO: 48776 - protein, 38 aa, Homo sapiens
  MAP TO AC015493.4; EXPRESSED IN PLACENTA, SIGNAL = 0.54; EST_HUMAN HIT: AA931321.1, EVALUE 1.00e-08
FTGHVQQKTWTLLRWNSMKSLLLLLTTYKWSSVDKFGT

SEQ ID NO: 48777 - protein, 39 aa, Homo sapiens
  MAP TO AC011957.2; EXPRESSED IN PLACENTA, SIGNAL = 0.58; EST_HUMAN HIT: BF310980.1, EVALUE 4.20e+00
SHRALELGGTFQIPQGLDCLSPQQQPRTSEATKLEAVIS

SEQ ID NO: 48778 - protein, 34 aa, Homo sapiens
  MAP TO AC011957.2; EXPRESSED IN PLACENTA, SIGNAL = 0.58; SWISSPROT HIT: O14248, EVALUE 4.90e+00; EST_HUMAN HIT: AA702116.1, EVALUE 7.50e+00
TATERWSWEEPSRSLRGWTAYLHSSSPAPLRQQS

SEQ ID NO: 48779 - protein, 29 aa, Homo sapiens
  MAP TO AC015873.2; EXPRESSED IN PLACENTA, SIGNAL = 0.46; EST_HUMAN HIT: W25558.1, EVALUE 1.20e+00
PQMPQDSRSPASCLCASSGLCPVVPTPPW

SEQ ID NO: 48780 - protein, 53 aa, Homo sapiens
  MAP TO AC018525.4; EXPRESSED IN PLACENTA, SIGNAL = 0.46; SWISSPROT HIT: P29487, EVALUE 6.10e+00
CARKTPDAAKYFLELGLSPFGIKGIWLIYMPLYQSNSIFINRNITGLINDTTC

SEQ ID NO: 48781 - protein, 21 aa, Homo sapiens
  MAP TO AC018525.4; EXPRESSED IN PLACENTA, SIGNAL = 0.46
VPVRHQMLLNISWNLDSLLLV

SEQ ID NO: 48782 - protein, 28 aa, Homo sapiens
  MAP TO AC022015.2; EXPRESSED IN PLACENTA, SIGNAL = 1.2
LLMKMQNTKDELLKPLEAKERFVQNNDN

SEQ ID NO: 48783 - protein, 99 aa, Homo sapiens
  MAP TO AL161756.1; EXPRESSED IN PLACENTA, SIGNAL = 0.46; SWISSPROT HIT: Q92731, EVALUE 5.00e-52; EST_HUMAN HIT: AI073549.1, EVALUE 2.00e-11
SRRERCGYRLVRRQRSADEQLHCAGKAKRSGGHAPRVRELLLDALSPEQLVLTLLEAEPPHVLISRPSAPFTEASMMMSLTKLADKELVHMISWAKKIP

SEQ ID NO: 48784 - protein, 30 aa, Homo sapiens
  MAP TO AL161756.1; EXPRESSED IN PLACENTA, SIGNAL = 0.46; SWISSPROT HIT: P35400, EVALUE 4.40e-01; EST_HUMAN HIT: AL041517.1, EVALUE 2.60e+00
EVPTSSCTVPARPREVAATRPECGSCCWTP

SEQ ID NO: 48785 - protein, 18 aa, Homo sapiens
  MAP TO AL160492.1; EXPRESSED IN PLACENTA, SIGNAL = 0.64
EVTHLNFGQQDANRYVVK

SEQ ID NO: 48786 - protein, 60 aa, Homo sapiens
  MAP TO AC025129.2; EXPRESSED IN PLACENTA, SIGNAL = 0.46; EST_HUMAN HIT: AA311724.1, EVALUE 1.60e-02; SWISSPROT HIT: P76091, EVALUE 2.70e+00
RWRLSCFSSMLSLSTWWRLSCFSSMLSLSTWWRLSCFSSVLSLSTRWRPYCFSSMLSLST

SEQ ID NO: 48787 - protein, 42 aa, Homo sapiens
  MAP TO AC015744.3; EXPRESSED IN PLACENTA, SIGNAL = 0.47
IKKAENEVTVNLKSTINQLDMIGILNLTNIAYKLFATDIILN

SEQ ID NO: 48788 - protein, 31 aa, Homo sapiens
  MAP TO AC026236.4; EXPRESSED IN PLACENTA, SIGNAL = 1.6; EST_HUMAN HIT: BF001061.1, EVALUE 5.90e+00
MFSPSLSLFPDWPWCISTWACVTYLPPASRG

SEQ ID NO: 48789 - protein, 30 aa, Homo sapiens
  MAP TO AC026236.4; EXPRESSED IN PLACENTA, SIGNAL = 1.6
LEKQEASMSRRPTWRYTRASQETERGKGRT

SEQ ID NO: 48790 - protein, 36 aa, Homo sapiens
  MAP TO AL137225.7; EXPRESSED IN PLACENTA, SIGNAL = 0.5
MAWASRLGLLLALLLPVVGASTPGTVVRLNKAALSY

SEQ ID NO: 48791 - protein, 33 aa, Homo sapiens
  MAP TO AL137225.7; EXPRESSED IN PLACENTA, SIGNAL = 0.5; EST_HUMAN HIT: BF511540.1, EVALUE 8.80e-01; SWISSPROT HIT: O75949, EVALUE 1.70e+00
WLGQVGWACCWHCCCPWSVPPRQAPWSDSTRQH

SEQ ID NO: 48792 - protein, 49 aa, Homo sapiens
  MAP TO AL121917.12; EXPRESSED IN PLACENTA, SIGNAL = 0.85; EST_HUMAN HIT: N31138.1, EVALUE 6.70e+00
SLNDMMHMLPFIEDSRWTHNLDINREQKTNPLAGPKGRPISRTQAAAST

SEQ ID NO: 48793 - protein, 41 aa, Homo sapiens
  MAP TO AL157405.2; EXPRESSED IN PLACENTA, SIGNAL = 0.5; EST_HUMAN HIT: AW868624.1, EVALUE 9.30e+00
QLSNWNPTGGLEQSYLLRSMRAAWTPEPLAHFLATMLQPTR

SEQ ID NO: 48794 - protein, 18 aa, Homo sapiens
  MAP TO AC019159.3; EXPRESSED IN PLACENTA, SIGNAL = 0.48
YLWPLKDLSIKMEHPSAL

SEQ ID NO: 48795 - protein, 64 aa, Homo sapiens
  MAP TO AC015578.4; EXPRESSED IN PLACENTA, SIGNAL = 0.46; SWISSPROT HIT: P02716, EVALUE 4.00e-01; EST_HUMAN HIT: AA173224.1, EVALUE 5.10e-01
MTDTDVFSGQKEGQITERLCLWVVFRATVAGLFWTFALTALPGLATETPWINFHGVPESAYSNQ

SEQ ID NO: 48796 - protein, 25 aa, Homo sapiens
  MAP TO AC018796.3; EXPRESSED IN PLACENTA, SIGNAL = 0.47
VMRDLFKGKDSNFLGIYEYTVQLQY

SEQ ID NO: 48797 - protein, 36 aa, Homo sapiens
  MAP TO AL136984.7; EXPRESSED IN PLACENTA, SIGNAL = 0.46; EST_HUMAN HIT: BF091698.1, EVALUE 9.00e-13
VILMLTTDLDGEDEKDKGALDNLLSQLIAELGMDKK

SEQ ID NO: 48798 - protein, 42 aa, Homo sapiens [sequence omitted]

SEQ ID NO: 48799 - protein, 72 aa, Homo sapiens
  MAP TO AL135998.2; EXPRESSED IN PLACENTA, SIGNAL = 0.59; EST_HUMAN HIT: BE798099.1, EVALUE 3.00e-23; SWISSPROT HIT: P39952, EVALUE 2.00e-04
QVQAPPVVAATPSPTAVPEVASGETADVVQTAAEQSFAELGLGSYTPVGLIQNLLEFMHVDLGLPWWGAIAA

SEQ ID NO: 48800 - protein, 144 aa, Homo sapiens [sequence omitted]

SEQ ID NO: 48801 - protein, 44 aa, Homo sapiens
  MAP TO AC010634.2; EXPRESSED IN PLACENTA, SIGNAL = 1.2; EST_HUMAN HIT: BE778308.1, EVALUE 2.40e-02; SWISSPROT HIT: P02858, EVALUE 2.10e+00
EKMRTETKKDKGENKTRKYFPERGGRISRSTDEKEDREEQKTIK

SEQ ID NO: 48802 - protein, 47 aa, Homo sapiens
  MAP TO AC019250.3; EXPRESSED IN PLACENTA, SIGNAL = 0.46; EST_HUMAN HIT: T40494.1, EVALUE 3.00e+00
NFDEQNTLGTRCTCGASVMPGSILNFLTLLENTACHIINTDFHIIMH

SEQ ID NO: 48803 - protein, 17 aa, Homo sapiens
  MAP TO AC019250.3; EXPRESSED IN PLACENTA, SIGNAL = 0.46
TLTNRTPLVPDARVAHL

SEQ ID NO: 48804 - protein, 42 aa, Homo sapiens
  MAP TO AC018421.3; EXPRESSED IN PLACENTA, SIGNAL = 0.47
GQAGSNATCDRHVTSKPWCADEDQATDSCGMFSILTNTSHAN

SEQ ID NO: 48805 - protein, 35 aa, Homo sapiens
  MAP TO AC018421.3; EXPRESSED IN PLACENTA, SIGNAL = 0.47
WVKLAPMPLVTDMSLASPGVQTRTRPLIAVACLAS

SEQ ID NO: 48806 - protein, 34 aa, Homo sapiens
  MAP TO AC009234.3; EXPRESSED IN PLACENTA, SIGNAL = 0.47
ITHCIKLVKMNGFRIRHSQIPILAPLNLVVVSPE

SEQ ID NO: 48807 - protein, 31 aa, Homo sapiens
  MAP TO AC009234.3; EXPRESSED IN PLACENTA, SIGNAL = 0.47
SGDTTTKFKGAKIGIWECLILKPFILTNLMQ

SEQ ID NO: 48808 - protein, 57 aa, Homo sapiens
  MAP TO AC022015.2; EXPRESSED IN PLACENTA, SIGNAL = 0.94
AATSLLQSRPPLLTSPSPQSPPPPPPPNIITISLMTIITISLPLPPPSSLQPSPSPH

SEQ ID NO: 48809 - protein, 26 aa, Homo sapiens
  MAP TO AC009410.3; EXPRESSED IN PLACENTA, SIGNAL = 0.46
MKYSGEGGMSRGKGDVLGECFLTLVL

SEQ ID NO: 48810 - protein, 37 aa, Homo sapiens
  MAP TO AL136132.15; EXPRESSED IN PLACENTA, SIGNAL = 0.69; EST_HUMAN HIT: BE550195.1, EVALUE 1.00e-13; SWISSPROT HIT: P32492, EVALUE 1.00e-02
VKLMPPAPNDDLATLSELNDGSLLYEIQKRFGNNQIY

SEQ ID NO: 48811 - protein, 120 aa, Homo sapiens
  MAP TO AC019222.3; EXPRESSED IN PLACENTA, SIGNAL = 0.52; SWISSPROT HIT: P98155, EVALUE 2.00e-65; EST_HUMAN HIT: AU125996.1, EVALUE 2.00e-64
NITCSPDEFTCSSGRCISRNFVCNGQDDCSDGSDELDCAPPTCGAHEFQCSTSSCIPISWVCDDDADCSDQSDESLEQCGRQPVIHTKCPASEIQCGSGECIHKKWRCDGDPDCKDGSDE

SEQ ID NO: 48812 - protein, 51 aa, Homo sapiens
  MAP TO AL161668.1; EXPRESSED IN PLACENTA, SIGNAL = 0.49; EST_HUMAN HIT: AV763345.1, EVALUE 6.00e-15; SWISSPROT HIT: P42158, EVALUE 8.00e+00
ALAALVPGVTQVDNKSGFLQKRPHRQHPGILKLPHVRLPQALANGAQLLLL

SEQ ID NO: 48813 - protein, 48 aa, Homo sapiens
  MAP TO AC022015.2; EXPRESSED IN PLACENTA, SIGNAL = 0.74; EST_HUMAN HIT: H30795.1, EVALUE 3.90e+00; SWISSPROT HIT: Q00417, EVALUE 3.60e+00
DPAPPLLLLPSCGCRGSLPAPLDEAECLARILAKQMNNHYKQTQFSSQ

SEQ ID NO: 48814 - protein, 41 aa, Homo sapiens
  MAP TO AP001417.1; EXPRESSED IN PLACENTA, SIGNAL = 0.53; EST_HUMAN HIT: AI732979.1, EVALUE 5.50e-02; SWISSPROT HIT: P08064, EVALUE 2.80e+00
AKIKVLVGLCSFLEVWGINLLPKSFRVHSLACFLAGIVLGF

SEQ ID NO: 48815 - protein, 94 aa, Homo sapiens; identical to SEQ ID NO: 45080
  MAP TO AC007226.2; EXPRESSED IN PLACENTA, SIGNAL = 1.6; EST_HUMAN HIT: R17132.1, EVALUE 1.00e-42; SWISSPROT HIT: P53978, EVALUE 1.80e+00

SEQ ID NO: 48816 - protein, 19 aa, Homo sapiens
  MAP TO AC007226.2; EXPRESSED IN PLACENTA, SIGNAL = 1.6; EST_HUMAN HIT: R17132.1, EVALUE 1.00e-05
HLQCWQMEERCPSLCQKLF

SEQ ID NO: 48817 - protein, 34 aa, Homo sapiens
  MAP TO AC010745.2; EXPRESSED IN PLACENTA, SIGNAL = 1.9; EST_HUMAN HIT: AA810301.1, EVALUE 8.00e-04
DSMNSWEAFSAFCWLWKHFICKKSLGCLKKGLLI

SEQ ID NO: 48818 - protein, 30 aa, Homo sapiens
  MAP TO AC010450.3; EXPRESSED IN PLACENTA, SIGNAL = 1.8
SVVVKGDNASVLSEEIFKYLLLSRIQTQDK

SEQ ID NO: 48819 - protein, 29 aa, Homo sapiens
  MAP TO AC010450.3; EXPRESSED IN PLACENTA, SIGNAL = 1.8
QWLSKATMHRYCLKKFSNTCSFLGSRHRI

SEQ ID NO: 48820 - protein, 63 aa, Homo sapiens
  MAP TO AC009028.3; EXPRESSED IN PLACENTA, SIGNAL = 2.2; SWISSPROT HIT: P27945, EVALUE 7.40e+00; EST_HUMAN HIT: AW896251.1, EVALUE 1.50e+00
WHATLLSQSIQLPVFNSPPLFTHPIKCRCLSHLCPWVSMLIRILLLTCMQHVAQARIKPLLFD

SEQ ID NO: 48821 - protein, 55 aa, Homo sapiens
  MAP TO AL078590.27; EXPRESSED IN PLACENTA, SIGNAL = 1.4; SWISSPROT HIT: O33280, EVALUE 2.70e+00; EST_HUMAN HIT: AI435225.1, EVALUE 4.00e-15
SILFVVVVLLFTKYSNSRLLKMSNPRKRSIPTRDVNIILKQLLAVDSFDETDFSE

SEQ ID NO: 48822 - protein, 60 aa, Homo sapiens
  MAP TO AC023154.3; EXPRESSED IN PLACENTA, SIGNAL =   2
AGMQVGGQSRVVGDNKMEAELLRILPILPISLKSLSVSPHVAQSPLYLGVLVRLSSHHGD

SEQ ID NO: 48823 - protein, 40 aa, Homo sapiens
  MAP TO AC023154.3; EXPRESSED IN PLACENTA, SIGNAL =   2; EST_HUMAN HIT: BE547578.1, EVALUE 3.20e+00
QVCKLGARAELLGTIKWKLSCYEYSPFFLFPSNHCQCLLT

SEQ ID NO: 48824 - protein, 119 aa, Homo sapiens
  MAP TO AC010289.2; EXPRESSED IN PLACENTA, SIGNAL = 1.5; SWISSPROT HIT: P35125, EVALUE 7.70e+00
AISKENVKQMVFKIFLVRVSCEAVLRTAGTRMLEPGTEKLARTHSRHSSEKRLVKPCSCLEGVQPGPGSGGPQQGPSEGVGSETALAEGTAGQRSLPMALSPSEVSTAPNSLPSGSPVL

SEQ ID NO: 48825 - protein, 39 aa, Homo sapiens
  MAP TO AC010289.2; EXPRESSED IN PLACENTA, SIGNAL = 1.5; EST_HUMAN HIT: BE791527.1, EVALUE 1.90e-02; SWISSPROT HIT: P48841, EVALUE 2.20e+00
TNWTPSWAGWATRPPWSLSSHWSRPSAKRMSSRWCSRSS

SEQ ID NO: 48826 - protein, 31 aa, Homo sapiens
  MAP TO AC009275.5; EXPRESSED IN PLACENTA, SIGNAL = 1.4; EST_HUMAN HIT: AV707179.1, EVALUE 1.00e-11; SWISSPROT HIT: P15121, EVALUE 1.00e-12
IECHPYLTQEKLIQYCQSKGIVVTAYSPLGS

SEQ ID NO: 48827 - protein, 38 aa, Homo sapiens
  MAP TO AC010653.3; EXPRESSED IN PLACENTA, SIGNAL = 1.7
ESPQEGGTTLKLKLLKRTIMLLMTGIQRSCVCGRSGRR

SEQ ID NO: 48828 - protein, 40 aa, Homo sapiens
  MAP TO AL133371.2; EXPRESSED IN PLACENTA, SIGNAL = 1.7; SWISSPROT HIT: P22623, EVALUE 2.80e+00; EST_HUMAN HIT: AI075915.1, EVALUE 2.30e-01
TLGPTLHPMHTACTEQRSFLERIHETALLKSKSRIQRVQM

SEQ ID NO: 48829 - protein, 77 aa, Homo sapiens
  MAP TO AL133304.2; EXPRESSED IN PLACENTA, SIGNAL = 1.4; SWISSPROT HIT: P75072, EVALUE 4.10e+00; EST_HUMAN HIT: BE408611.1, EVALUE 4.00e-24
LQPMEPGVISTFKSYYLRNIFHKAAIDSDSLDGSGQSKLKAFWKGFIPLDVINICDSWEEVKISTLTGVWKKLIQTL

SEQ ID NO: 48830 - protein, 111 aa, Homo sapiens
  MAP TO AC006111.2; EXPRESSED IN PLACENTA, SIGNAL = 1.6; EST_HUMAN HIT: BE899391.1, EVALUE 1.90e-01; SWISSPROT HIT: Q64739, EVALUE 4.40e-01
VKKHGIKEVSGERKTQKAASNGTQIRSKLKRTKQTATKTKTLQGPAEKKPPSGSQAPRTKKQRVTKWQASEPAHSVNGEGGVLASAPDPPVLRETAQNTQTGNQQEPSPNL

SEQ ID NO: 48831 - protein, 40 aa, Homo sapiens
  MAP TO AL138827.2; EXPRESSED IN PLACENTA, SIGNAL =  64; EXPRESSED IN HELA, SIGNAL =  22; EST_HUMAN HIT: W86567.1, EVALUE 6.00e-18; SWISSPROT HIT: P01215, EVALUE 5.00e-19
CMGCCFSRAYPTPLRSKKTMLVQKNVTSESTCCVAKSYNR

SEQ ID NO: 48832 - protein, 35 aa, Homo sapiens; identical to SEQ ID NO: 48491
  MAP TO AL159165.1; EXPRESSED IN PLACENTA, SIGNAL = 1.3; EST_HUMAN HIT: AW504489.1, EVALUE 2.00e-14; SWISSPROT HIT: Q9Y3T9, EVALUE 4.90e+00

SEQ ID NO: 48833 - protein, 21 aa, Homo sapiens
  MAP TO AL159165.1; EXPRESSED IN PLACENTA, SIGNAL = 1.3; EST_HUMAN HIT: BE879561.1, EVALUE 2.00e-04
VMQKMGKNMMTLLLGLQTLFH

SEQ ID NO: 48834 - protein, 42 aa, Homo sapiens
  MAP TO AL136384.2; EXPRESSED IN PLACENTA, SIGNAL = 1.7
PFTITVFEDALVCVSPQTEYIIIRLVDYCGIEQDKHLSEPRN

SEQ ID NO: 48835 - protein, 62 aa, Homo sapiens
  MAP TO AL136527.7; EXPRESSED IN PLACENTA, SIGNAL = 1.6; SWISSPROT HIT: P03317, EVALUE 4.50e+00
DEGVKKVMDQGNLENHYFQSLSCNDRAVALCALSSPRIQCPESGVFLSLSTLQLSERPAQEC

SEQ ID NO: 48836 - protein, 19 aa, Homo sapiens
  MAP TO Z97197.2; EXPRESSED IN PLACENTA, SIGNAL = 1.3; EST_HUMAN HIT: AA078318.1, EVALUE 4.80e+00
WTSMISCGREKRSRSLPTK

SEQ ID NO: 48837 - protein, 29 aa, Homo sapiens
  MAP TO AC018967.3; EXPRESSED IN PLACENTA, SIGNAL = 1.4; EXPRESSED IN HELA, SIGNAL = 1.7; EST_HUMAN HIT: D78234.1, EVALUE 6.00e-04; SWISSPROT HIT: P27321, EVALUE 8.60e+00
CSAGPEVLVPKEGTLPPEYTTMIPFNWKL

SEQ ID NO: 48838 - protein, 66 aa, Homo sapiens
  MAP TO AC010311.5; EXPRESSED IN PLACENTA, SIGNAL = 1.9; SWISSPROT HIT: Q28516, EVALUE 2.00e-35; EST_HUMAN HIT: BE818284.1, EVALUE 1.00e-28
LKLPSRTWSPPFESEDSQKHNQSEYEDSAGECCSCPKTDSQILKELEESSFRKTFEDYLHNVVFVP

SEQ ID NO: 48839 - protein, 54 aa, Homo sapiens
  MAP TO AC019043.2; EXPRESSED IN PLACENTA, SIGNAL = 1.6; EST_HUMAN HIT: AA732880.1, EVALUE 6.40e+00
EHDASVALTATADCPGRGLQGTAQEGGCSSARFQIQQDVHDLPADTNGQNVTAV

SEQ ID NO: 48840 - protein, 36 aa, Homo sapiens
  MAP TO AC010487.4; EXPRESSED IN PLACENTA, SIGNAL = 2.7; EST_HUMAN HIT: BF437122.1, EVALUE 3.00e-14; SWISSPROT HIT: Q15928, EVALUE 6.00e-13
DVAIEFSQEEWKCLDPAQRTLYRDVMLENYRNLVSL

SEQ ID NO: 48841 - protein, 45 aa, Homo sapiens
  MAP TO AC011508.3; EXPRESSED IN PLACENTA, SIGNAL = 2.2; EST_HUMAN HIT: AI159975.1, EVALUE 4.00e-05
AISQSLCTSEPATGPPAPPRAPPAPGQPSTSRAPAVRGTSATGNP

SEQ ID NO: 48842 - protein, 33 aa, Homo sapiens
  MAP TO AL158845.1; EXPRESSED IN PLACENTA, SIGNAL = 1.7; EST_HUMAN HIT: AW806915.1, EVALUE 5.80e+00
NSISMVWNSKFRFGISNSISIQIWNLKSNFHIY

SEQ ID NO: 48843 - protein, 41 aa, Homo sapiens
  MAP TO AC017093.2; EXPRESSED IN PLACENTA, SIGNAL = 1.6; EST_HUMAN HIT: BF570115.1, EVALUE 9.30e+00
TVEDMVPLNSNISPSTHAVDPIFCLLACVSNFPLNKFKCLF

SEQ ID NO: 48844 - protein, 26 aa, Homo sapiens
  MAP TO AC017093.2; EXPRESSED IN PLACENTA, SIGNAL = 1.6; EST_HUMAN HIT: AA936978.1, EVALUE 3.60e+00
VQWRTWSLSIPTSLHPPMPWIPSSVF

SEQ ID NO: 48845 - protein, 33 aa, Homo sapiens
  MAP TO AC017116.2; EXPRESSED IN PLACENTA, SIGNAL = 2.2
MYADSGARSVAVNCLTVAPTSTVVKVWGLLLAR

SEQ ID NO: 48846 - protein, 18 aa, Homo sapiens
  MAP TO AC017116.2; EXPRESSED IN PLACENTA, SIGNAL = 2.2
AWPAAAPTPSPPWRSAPQ

SEQ ID NO: 48847 - protein, 91 aa, Homo sapiens
  MAP TO AC010311.5; EXPRESSED IN PLACENTA, SIGNAL = 1.3; EST_HUMAN HIT: C06264.1, EVALUE 3.00e-27; SWISSPROT HIT: P06213, EVALUE 1.00e-30
PSRKRRSLGDVGNVTVAVPTVAAFPNTSSTSVPTSPEEHRPFEKVVNKESLVISGLRHFTGYRIELQACNQDTPEERCSVAAYVSARTMPE

SEQ ID NO: 48848 - protein, 126 aa, Homo sapiens
  MAP TO AC010368.2; EXPRESSED IN PLACENTA, SIGNAL = 2.4; SWISSPROT HIT: P27958, EVALUE 7.50e-01; EST_HUMAN HIT: AI472010.1, EVALUE 2.00e-57
RKPPLAPLNPWIMWRFTRSTKMVHYHCYQNRERTAASPRSPGLLRTIRSMPRCPGSWITTSWCWCQIHMLKTWLALKNQPKRPHHHLNRIKLRKPWPTSLQHQASAGSSWVVWITWIPHVLHTPFT

SEQ ID NO: 48849 - protein, 79 aa, Homo sapiens
  MAP TO AC019181.2; EXPRESSED IN PLACENTA, SIGNAL = 4.9; SWISSPROT HIT: Q03497, EVALUE 5.20e-01; EST_HUMAN HIT: AW503797.1, EVALUE 3.00e-40
TASAPATPLVNKHRPTFTRSNTISKPYISNTLPSDAPKKRRAPLPPMPASQSVPQDLAHIQERPASCIVKSMSVDETDK

SEQ ID NO: 48850 - protein, 52 aa, Homo sapiens
  MAP TO AP001207.1; EXPRESSED IN PLACENTA, SIGNAL = 1.5; SWISSPROT HIT: P13002, EVALUE 1.00e-03; EST_HUMAN HIT: BF355275.1, EVALUE 6.00e-13
GTFQYTLEATKSLRQKQGEGPMTYLNKGQFYAITLSETGDNKCFRHPISKVR

SEQ ID NO: 48851 - protein, 21 aa, Homo sapiens
  MAP TO AP001207.1; EXPRESSED IN PLACENTA, SIGNAL = 1.5; EST_HUMAN HIT: AA079268.1, EVALUE 8.30e+00
AHFSTPWKPPNLSVRSRGRAP

SEQ ID NO: 48852 - protein, 99 aa, Homo sapiens [sequence omitted]

SEQ ID NO: 48853 - protein, 66 aa, Homo sapiens
  MAP TO AL137862.1; EXPRESSED IN PLACENTA, SIGNAL = 1.5; SWISSPROT HIT: O00330, EVALUE 6.00e-11; EST_HUMAN HIT: AU137768.1, EVALUE 6.00e-10
VEEGSKNIRLGSLIGLIVEEGEDWKHVEIPKDVGPPPPVSKPSEPRPSPEPQISIPVKKEHIPGTL

SEQ ID NO: 48854 - protein, 31 aa, Homo sapiens
  MAP TO AC008920.4; EXPRESSED IN PLACENTA, SIGNAL = 5.7; EST_HUMAN HIT: BF508793.1, EVALUE 4.50e+00
LNSVPSCVWMEYCSARNKEENSKTFYNMDEP

SEQ ID NO: 48855 - protein, 60 aa, Homo sapiens; identical to SEQ ID NO: 48641
  MAP TO AC008850.4; EXPRESSED IN PLACENTA, SIGNAL = 2.5; EST_HUMAN HIT: AL080029.1, EVALUE 3.00e-20; SWISSPROT HIT: P15541, EVALUE 7.00e-07

SEQ ID NO: 48856 - protein, 44 aa, Homo sapiens
  MAP TO AL133413.5; EXPRESSED IN PLACENTA, SIGNAL = 1.3; SWISSPROT HIT: Q96066, EVALUE 1.00e-08; EST_HUMAN HIT: AW070665.1, EVALUE 2.00e-07
KSDPYECGFDPITSAHLPFSIKFFLVAIMFLLFDLEITLLLPLP

SEQ ID NO: 48857 - protein, 57 aa, Homo sapiens
  MAP TO AL158072.2; EXPRESSED IN PLACENTA, SIGNAL = 5.5; SWISSPROT HIT: P34361, EVALUE 6.00e+00; EST_HUMAN HIT: AL135160.1, EVALUE 7.00e-05
SQYLTILLGLVLDSYVQVILLLWPPKILDYRWEPLFLVNLCLFIEEFNPFIIKVITD

SEQ ID NO: 48858 - protein, 50 aa, Homo sapiens
  MAP TO AC011609.9; EXPRESSED IN PLACENTA, SIGNAL = 1.8; SWISSPROT HIT: P03361, EVALUE 4.10e-01; EST_HUMAN HIT: BE064410.1, EVALUE 1.00e-17
EFAYPACHASTKTTIHGLMEFLIHHHGIPHSIASDQGTHLMAKEVRQWAH

SEQ ID NO: 48859 - protein, 46 aa, Homo sapiens
  MAP TO AL109985.2; EXPRESSED IN PLACENTA, SIGNAL = 1.6
ARPSPSPFPSLSALHLRLHLHLHLHLHLHLHLHLHLHLYLHLRLHL

SEQ ID NO: 48860 - protein, 18 aa, Homo sapiens
  MAP TO AL139348.3; EXPRESSED IN PLACENTA, SIGNAL = 2.4
ASDIRELQLKELQDADSF

SEQ ID NO: 48861 - protein, 87 aa, Homo sapiens
  MAP TO AL138831.2; EXPRESSED IN PLACENTA, SIGNAL = 1.5; SWISSPROT HIT: P36654, EVALUE 3.10e+00; EST_HUMAN HIT: BF339706.1, EVALUE 1.10e+00
VNAIPFSVPKRVAVSPEYLLLPPRHGGCDKISWLPEGKVFSNVHREKISSKFFKESILKKVFCSQQMRWEGSDDQKGTSSYTFPGTR

SEQ ID NO: 48862 - protein, 114 aa, Homo sapiens
  MAP TO AL133415.12; EXPRESSED IN PLACENTA, SIGNAL = 1.3; EST_HUMAN HIT: AA399001.1, EVALUE 1.00e-59; SWISSPROT HIT: P40999, EVALUE 1.80e-01
VLMEFPKIESVHPQKYAMDVENKIQEKNVEPNISFDGSIQCSGKDAILFKLETAEEIHRKNQQDSDLSVKMLKDFLEDDTDVNQYLLPPKSLLRYALLLDIVQPTCRRSVCFTK

SEQ ID NO: 48863 - protein, 105 aa, Homo sapiens
  MAP TO AL132838.1; EXPRESSED IN PLACENTA, SIGNAL = 1.7; SWISSPROT HIT: P03079, EVALUE 3.40e-01; EST_HUMAN HIT: BE780453.1, EVALUE 1.00e-56
TSPKKQEEARREYPLSPDGHLHRQKNEPIHLDVVEQPPQRSDFPLAAPENASTGPAHVRGRTAVETDLTFGLTPNRPSLSACSSEAPEERSGRRLADSESLGHGA

SEQ ID NO: 48864 - protein, 20 aa, Homo sapiens
  MAP TO AL158148.1; EXPRESSED IN PLACENTA, SIGNAL = 2.1; EST_HUMAN HIT: AA761524.1, EVALUE 1.00e-05
CISSPTLRPGRRRPHQPHLP

SEQ ID NO: 48865 - protein, 60 aa, Homo sapiens
  MAP TO AL109658.5; EXPRESSED IN PLACENTA, SIGNAL = 2.5; EST_HUMAN HIT: AI080398.1, EVALUE 8.00e-02; SWISSPROT HIT: Q48806, EVALUE 4.00e-01
MASPTVGKREGGLDLGPSNNEGIPSSDHNPISGAGPRRNIDSLIPGTPRSAGLDLPVREQ

SEQ ID NO: 48866 - protein, 45 aa, Homo sapiens
  MAP TO AP001208.1; EXPRESSED IN PLACENTA, SIGNAL = 1.7; EST_HUMAN HIT: BE208783.1, EVALUE 4.00e+00; SWISSPROT HIT: P46310, EVALUE 2.10e+00
VFSTVTQSCSDSDVFLFGVWEGLWLSQGQSFFALFLGHSEKLHLK

SEQ ID NO: 48867 - protein, 36 aa, Homo sapiens
  MAP TO AL157885.2; EXPRESSED IN PLACENTA, SIGNAL =  32; SWISSPROT HIT: Q58134, EVALUE 9.70e-01
DLIPKENMYIHEILRDLIPKKYMYVHEILRDLIPKN

SEQ ID NO: 48868 - protein, 61 aa, Homo sapiens
  MAP TO AL136298.1; EXPRESSED IN PLACENTA, SIGNAL = 1.6; SWISSPROT HIT: Q9Z9C9, EVALUE 6.90e-01; EST_HUMAN HIT: W33061.1, EVALUE 1.20e+00
AIKLQMILSEGYRPLNFQVIFLQKSPRLPISGMTEAKSCLYPLDLAVYHFHQPIELPCPDN

SEQ ID NO: 48869 - protein, 98 aa, Homo sapiens
  MAP TO AC011497.3; EXPRESSED IN PLACENTA, SIGNAL = 2.1; SWISSPROT HIT: Q05469, EVALUE 2.00e-54; EST_HUMAN HIT: AW269990.1, EVALUE 4.00e-53
DSEELSSLIKSNGQRSLELWPRPQQAPRSRSLIVHFHGGGFVAQTSRSHEPYLKSWAQELGAPIISIDYSLAPEAPFPRALEECFFAYCWAIKHCALL

SEQ ID NO: 48870 - protein, 19 aa, Homo sapiens
  MAP TO AC018760.4; EXPRESSED IN PLACENTA, SIGNAL = 1.6
SSLDLRWQLLTLPQVSIWF

SEQ ID NO: 48871 - protein, 44 aa, Homo sapiens
  MAP TO AC011497.3; EXPRESSED IN PLACENTA, SIGNAL = 1.8; SWISSPROT HIT: Q06561, EVALUE 3.00e-04; EST_HUMAN HIT: BF081244.1, EVALUE 4.00e-03
CQCNGHADTCNEQDGTGCPCQNNTETGTCQGSSPSDRRDCYKYQ

SEQ ID NO: 48872 - protein, 43 aa, Homo sapiens
  MAP TO AC011497.3; EXPRESSED IN PLACENTA, SIGNAL = 1.8; EST_HUMAN HIT: BF317055.1, EVALUE 9.20e+00; SWISSPROT HIT: P16848, EVALUE 8.20e+00
ASVMATRTHVTSRMGRAVHVRITQRRAHARAAPPVTVETATST

SEQ ID NO: 48873 - protein, 35 aa, Homo sapiens
  MAP TO AC022212.2; EXPRESSED IN PLACENTA, SIGNAL = 1.4
IGVKLNMEGQKSQETRNMMMSLMNREYSNSSRSTF

SEQ ID NO: 48874 - protein, 62 aa, Homo sapiens
  MAP TO AC019181.2; EXPRESSED IN PLACENTA, SIGNAL = 2.7; EST_HUMAN HIT: AU137981.1, EVALUE 6.00e-21; SWISSPROT HIT: Q46638, EVALUE 3.50e+00
RKPKAKAPLPPAETKYTDVSSAADSVESTAFIMEQKENMIDKDVELSVVLPGDIIKSTTVHG

SEQ ID NO: 48875 - protein, 25 aa, Homo sapiens
  MAP TO AC019181.2; EXPRESSED IN PLACENTA, SIGNAL = 2.7; EST_HUMAN HIT: BF677515.1, EVALUE 4.00e-07
ENQKPRHHFLQLRPNILMSLQLLIL

SEQ ID NO: 48876 - protein, 123 aa, Homo sapiens
  MAP TO AC011455.3; EXPRESSED IN PLACENTA, SIGNAL = 1.6; EST_HUMAN HIT: AA112438.1, EVALUE 3.00e-23; SWISSPROT HIT: P14137, EVALUE 3.90e-01
RKWTILGRLSPAYWKRRRKTLKERRKEGRTTLKRKALRTCSPFTSSLWSGPGAATWPGSTEAFGCASPQILGVPTGLGTRPRSCFRMCGTSLLTSRITWQRTPTSGLSLEAGVLGSPRRTRIQ

SEQ ID NO: 48877 - protein, 53 aa, Homo sapiens
  MAP TO AC023009.3; EXPRESSED IN PLACENTA, SIGNAL =   2; EST_HUMAN HIT: AV733491.1, EVALUE 4.00e-22; SWISSPROT HIT: P00488, EVALUE 4.00e-23
KKEAVLIQAGEYMGQLLEQASLHFFVTARINETRDVLAKQKSTVLTIPEIIIK

SEQ ID NO: 48878 - protein, 17 aa, Homo sapiens
  MAP TO AL133388.2; EXPRESSED IN PLACENTA, SIGNAL = 2.1
WFLLLMRMMMKKMRLQQ

SEQ ID NO: 48879 - protein, 46 aa, Homo sapiens
  MAP TO AL133241.2; EXPRESSED IN PLACENTA, SIGNAL =  12
ADEEAEEEEKELVLLSQEWQRQRRVVREVEEAGTLKCNIYGKKSAC

SEQ ID NO: 48880 - protein, 66 aa, Homo sapiens
  MAP TO AC013568.3; EXPRESSED IN PLACENTA, SIGNAL = 1.8; EST_HUMAN HIT: AA664476.1, EVALUE 2.90e-01; SWISSPROT HIT: P25117, EVALUE 1.90e+00
WERPFAASRMRFWTRCSPTVPSEANPTGSSCPTLGPIPFSLILHSLKCLLASPARRDRMGSWRASR

SEQ ID NO: 48881 - protein, 48 aa, Homo sapiens
  MAP TO AC012568.3; EXPRESSED IN PLACENTA, SIGNAL =   3; EST_HUMAN HIT: BE870614.1, EVALUE 4.00e-12; SWISSPROT HIT: P03468, EVALUE 8.10e+00
NPICQQQIVLNPSLIIGVVHLTQQMPRLIALWVSSSFGCQERALCNLE

SEQ ID NO: 48882 - protein, 46 aa, Homo sapiens
  MAP TO AC010093.2; EXPRESSED IN PLACENTA, SIGNAL = 1.7; EST_HUMAN HIT: T18891.1, EVALUE 2.30e+00
MTNFSQIQSPQEMPIRKPIVRVGKEWVRRAAPQEVAGVQSTCHETW

SEQ ID NO: 48883 - protein, 38 aa, Homo sapiens
  MAP TO AC013568.3; EXPRESSED IN PLACENTA, SIGNAL = 1.5; EST_HUMAN HIT: AW242934.1, EVALUE 4.30e+00
RQCKGGPPELCKVAVLTMLPHIDHKNHCAKFCTALELR

SEQ ID NO: 48884 - protein, 61 aa, Homo sapiens
  MAP TO AL031123.14; EXPRESSED IN PLACENTA, SIGNAL = 1.5; SWISSPROT HIT: Q05632, EVALUE 1.50e+00; EST_HUMAN HIT: AV763053.1, EVALUE 5.00e-29
LVLSTAACWLQPGPWVHTQPASRACRDSGAGDGKQMVACALSFPSLQPHLGVEAVLRGPQE

SEQ ID NO: 48885 - protein, 56 aa, Homo sapiens
  MAP TO AL121819.1; EXPRESSED IN PLACENTA, SIGNAL = 3.7; SWISSPROT HIT: Q65328, EVALUE 3.50e+00; EST_HUMAN HIT: BE733711.1, EVALUE 4.80e+00
DLLNWRPLHMLLLRSMYSFNKHFKPPARHKLQGLQETQEEMRWLLLPKECGPGKGI

SEQ ID NO: 48886 - protein, 50 aa, Homo sapiens
  MAP TO AC020754.2; EXPRESSED IN PLACENTA, SIGNAL = 1.3; SWISSPROT HIT: Q9QYC0, EVALUE 3.60e+00
MSELEIKRNWHSKGRVRLLPDAGLVVVGVPSADARVGLHNIVLLGEELAE

SEQ ID NO: 48887 - protein, 35 aa, Homo sapiens
  MAP TO AL117332.16; EXPRESSED IN PLACENTA, SIGNAL = 1.3; EST_HUMAN HIT: BF220308.1, EVALUE 5.00e-16; SWISSPROT HIT: P36627, EVALUE 4.30e-01
REEFKPNKPKPCGLCNQFGHEVKDCEGLPREKKGK

SEQ ID NO: 48888 - protein, 34 aa, Homo sapiens
  MAP TO AL117332.16; EXPRESSED IN PLACENTA, SIGNAL = 1.3; EST_HUMAN HIT: BF220308.1, EVALUE 3.00e-12
EKNSNQTSPNHVVFVISLDMRSKIVKVCQEKRRE

SEQ ID NO: 48889 - protein, 36 aa, Homo sapiens
  MAP TO AL035455.28; EXPRESSED IN BT474, SIGNAL = 5.7; EXPRESSED IN HBL100, SIGNAL = 2.2; EST_HUMAN HIT: BF365818.1, EVALUE 7.00e-13; SWISSPROT HIT: P51154, EVALUE 5.00e-14
EVMERDAKDYADSIHAIFVETSAKNAININELFIEI

SEQ ID NO: 48890 - protein, 218 aa, Homo sapiens
  MAP TO AP000406.1; EXPRESSED IN BT474, SIGNAL = 2.2; EXPRESSED IN HBL100, SIGNAL =   1; EXPRESSED IN HELA, SIGNAL = 1.4; EST_HUMAN HIT: AW014033.1, EVALUE 7.00e-80; SWISSPROT HIT: P34482, EVALUE 5.90e-01
LEMQNPNLNNKECCFTFTLNGNSRKLDRSVFTAYGKPSESIYSALSANDYFSERIKNQFNKNIIVYEEKTIDGHINLGMPLKCLPSDSHFKITFGQRKSSKEDGHILRQCENPNMECILFHVVAIGRTRKKIVKINELHEKGSKLCIYALKGETIEGALCKDGRFRSDIGEFEWKLKEGHKKIYGKQSMVDEVSGKVLEMDISKKKALQQKDIHKKIN

SEQ ID NO: 48891 - protein, 43 aa, Homo sapiens
  MAP TO AL078623.21; EXPRESSED IN BT474, SIGNAL = 1.9
VALKTKIMITFTIKNTITQEFVITIVDVAIVITSSNQCPLTNI

SEQ ID NO: 48892 - protein, 45 aa, Homo sapiens
  MAP TO AL031428.9; EXPRESSED IN BT474, SIGNAL = 1.3; EXPRESSED IN HELA, SIGNAL =   3; EXPRESSED IN HBL100, SIGNAL = 1.6; SWISSPROT HIT: P06660, EVALUE 1.60e+00; EST_HUMAN HIT: BE886699.1, EVALUE 4.00e-19
MVNLKEKIKELHQQYKEASEVKPPRDITAEFLVKSKHRDLTALCK

SEQ ID NO: 48893 - protein, 49 aa, Homo sapiens; identical to SEQ ID NO: 45027
  MAP TO AL109613.10; EXPRESSED IN BT474, SIGNAL = 2.3; EST_HUMAN HIT: AA182952.1, EVALUE 5.00e-18

SEQ ID NO: 48894 - protein, 37 aa, Homo sapiens
  MAP TO AL109613.10; EXPRESSED IN BT474, SIGNAL = 2.3; EST_HUMAN HIT: AA182952.1, EVALUE 2.00e-06
VGHPSSMVTTMSLMMNLRMMIPCLLLDTAKLSTLLMV

SEQ ID NO: 48895 - protein, 63 aa, Homo sapiens
  MAP TO AC007566.1; EXPRESSED IN BT474, SIGNAL = 0.7; EXPRESSED IN HBL100, SIGNAL = 0.69; EST_HUMAN HIT: AA972884.1, EVALUE 3.00e-30; SWISSPROT HIT: O43933, EVALUE 3.00e-31
EQRCEILCNVIKNKLDCDINKFTDLDLQHVAKETGGFVARDFTVLVDRAIHSRLSRQSISTRE

SEQ ID NO: 48896 - protein, 33 aa, Homo sapiens
  MAP TO AC009405.2; EXPRESSED IN BT474, SIGNAL = 0.95; EXPRESSED IN HBL100, SIGNAL = 1.1
MNSSRREMTSWRICLASSQSTTVGEVRWDSQGT

SEQ ID NO: 48897 - protein, 28 aa, Homo sapiens
  MAP TO AC009639.2; EXPRESSED IN BT474, SIGNAL =   1; EXPRESSED IN HELA, SIGNAL = 1.3; SWISSPROT HIT: P16899, EVALUE 1.70e+00; EST_HUMAN HIT: AI750793.1, EVALUE 3.00e-13
PRCSVESWQCPLWKTGTWCKPWEKVPME

SEQ ID NO: 48898 - protein, 51 aa, Homo sapiens
  MAP TO AC009639.2; EXPRESSED IN BT474, SIGNAL =   1; EXPRESSED IN HELA, SIGNAL = 1.3; EST_HUMAN HIT: AI750793.1, EVALUE 3.00e-02
  unsure 1
  unsure 12
XELLIFVGNPGXEAGLSGFTGDLTLYIFSGFLPFTAEVLGGVMAVPFVEDW

SEQ ID NO: 48899 - protein, 91 aa, Homo sapiens
  MAP TO AC010740.2; EXPRESSED IN BT474, SIGNAL = 3.9; SWISSPROT HIT: Q02563, EVALUE 2.80e+00; EST_HUMAN HIT: AW104586.1, EVALUE 5.00e-08
GIISVSDLSSWMLLVIILALDNYFWFSLGESEAIWLLFCNFDGVSLFNWGNLNMPINLTCIFLGCGMKPEHSEKTHTDMGRTGKLHTDSGP

SEQ ID NO: 48900 - protein, 34 aa, Homo sapiens
  MAP TO AC010877.1; EXPRESSED IN BT474, SIGNAL = 1.4; EST_HUMAN HIT: R27397.1, EVALUE 6.00e-12; SWISSPROT HIT: O14607, EVALUE 2.00e-15
QYQTLREALVAAGKEVIWHGRTNDEPAHYCSICE

SEQ ID NO: 48901 - protein, 27 aa, Homo sapiens
  MAP TO AC010090.1; EXPRESSED IN BT474, SIGNAL = 1.4; EXPRESSED IN HBL100, SIGNAL =  44
IESIGLKVMMMIMMMMWRRSSWRRRKQ

SEQ ID NO: 48902 - protein, 48 aa, Homo sapiens
  MAP TO AP000148.1; EXPRESSED IN BT474, SIGNAL = 0.73
IFYVLSRQKYSLLCMLMAFFHISIIEIITLLLFFTVMSPLLLEEILKK

SEQ ID NO: 48903 - protein, 40 aa, Homo sapiens [sequence omitted]

SEQ ID NO: 48904 - protein, 85 aa, Homo sapiens
  MAP TO AL031667.17; EXPRESSED IN BT474, SIGNAL =   1; EXPRESSED IN HBL100, SIGNAL = 1.9; EXPRESSED IN HELA, SIGNAL = 0.99; SWISSPROT HIT: Q12873, EVALUE 3.00e-19; EST_HUMAN HIT: AW502428.1, EVALUE 2.00e-34
VKKLQSILKPMMLRRLKDDVEKNLAPKQETIIEVELTNIQKKYYRAILEKNFSFLTKGANQHNMPNLINTMMELRKCCNHPYLIN

SEQ ID NO: 48905 - protein, 62 aa, Homo sapiens
  MAP TO AC007239.2; EXPRESSED IN BT474, SIGNAL = 0.74; SWISSPROT HIT: P50482, EVALUE 6.00e-28; EST_HUMAN HIT: AU141670.1, EVALUE 3.00e-14
QVINRFRTIPLTFKDQFIIAYGGLRGAICFALVFLLPAAVFPRKKLFITAAIVVIFFTVFIL

SEQ ID NO: 48906 - protein, 97 aa, Homo sapiens
  MAP TO AL132774.1; EXPRESSED IN BT474, SIGNAL = 1.3; EXPRESSED IN HELA, SIGNAL = 1.4; EXPRESSED IN HBL100, SIGNAL = 2.2; EST_HUMAN HIT: AI267168.1, EVALUE 4.10e-01; SWISSPROT HIT: O58284, EVALUE 8.20e+00
IPEGENETTTLTKDLNTMGLMKNVISQCSSLVWSVKKKTNGNLEACVRSCQLNLVGIIVLAVTDIVTVNESIPCDSTWCAIFDFGHVFFSIPFAPKD

SEQ ID NO: 48907 - protein, 66 aa, Homo sapiens
  MAP TO AL117355.1; EXPRESSED IN BT474, SIGNAL = 1.2; EXPRESSED IN HELA, SIGNAL = 1.5; EXPRESSED IN HBL100, SIGNAL = 0.94; SWISSPROT HIT: Q26255, EVALUE 1.10e+00; EST_HUMAN HIT: AU127862.1, EVALUE 6.00e-29
LKENLYYEAGKMLAISLVHGGPSPGFFSKTLFNCLVYGPENTQPILDDVSDFDVAQIIIRVSNVSV

SEQ ID NO: 48908 - protein, 91 aa, Homo sapiens
  MAP TO AC004900.2; EXPRESSED IN BT474, SIGNAL = 1.2; EXPRESSED IN HELA, SIGNAL = 1.6; EXPRESSED IN HBL100, SIGNAL = 1.5; EST_HUMAN HIT: AW501661.1, EVALUE 3.00e-46; SWISSPROT HIT: P46062, EVALUE 3.00e-14
FVSKGCESVEMTLRRNGLGQLGFHVNYEGIVADVEPYGYAWQAGLRQGSRLVEICKVAVATLSHEQMIDLLRTSVTVKVVIIPPHDDCTPR

SEQ ID NO: 48909 - protein, 35 aa, Homo sapiens; identical to SEQ ID NO: 48475
  MAP TO AC007182.3; EXPRESSED IN BT474, SIGNAL = 0.65; EST_HUMAN HIT: BE385111.1, EVALUE 2.00e-05

SEQ ID NO: 48910 - protein, 34 aa, Homo sapiens
  MAP TO AC007182.3; EXPRESSED IN BT474, SIGNAL = 0.65; SWISSPROT HIT: P43681, EVALUE 2.10e+00; EST_HUMAN HIT: BE730289.1, EVALUE 2.00e-10
SSEEGEKSYCRPEEPTEADTEGRHPAPGKCSDQS

SEQ ID NO: 48911 - protein, 57 aa, Homo sapiens
  MAP TO AL049652.16; EXPRESSED IN HELA, SIGNAL = 1.1; EXPRESSED IN HBL100, SIGNAL = 1.1; EXPRESSED IN BT474, SIGNAL = 1.4; EST_HUMAN HIT: AU121681.1, EVALUE 3.00e-28; SWISSPROT HIT: P53914, EVALUE 9.00e-16
HRKKRMRQLQKKIKNGTLNIKQDDPFELFIAATNIRYCYYNETHKILGNTFGMCVLQ

SEQ ID NO: 48912 - protein, 46 aa, Homo sapiens
  MAP TO AB026898.1; EXPRESSED IN BT474, SIGNAL = 1.6; EXPRESSED IN HELA, SIGNAL = 1.4; EST_HUMAN HIT: BE256811.1, EVALUE 3.00e-19; SWISSPROT HIT: P50527, EVALUE 5.00e-03
SVLDIIKHIVAKGEHKSGVLDESTIATILREVLEGLEYLHKNGQIH

SEQ ID NO: 48913 - protein, 67 aa, Homo sapiens
  MAP TO AL121716.2; EXPRESSED IN BT474, SIGNAL = 1.3; SWISSPROT HIT: Q9Y3R5, EVALUE 1.00e-02; EST_HUMAN HIT: AA625526.1, EVALUE 3.00e-30
AWLNQVLQRHDIARVLEPLLLLLLHPKTQRVSVQRVQAERYWNKSPCYPGEESDKHFMQNFACSNGE

SEQ ID NO: 48914 - protein, 44 aa, Homo sapiens
  MAP TO AC009758.1; EXPRESSED IN BT474, SIGNAL = 0.97; EXPRESSED IN HELA, SIGNAL = 0.97; EST_HUMAN HIT: AW947694.1, EVALUE 6.10e+00
  unsure 26
MFPLKPGSLLEYRVPFKKPQASPVAXVCNYRGSLDFRPMKDLLG

SEQ ID NO: 48915 - protein, 42 aa, Homo sapiens
  MAP TO AC009758.1; EXPRESSED IN BT474, SIGNAL = 0.97; EXPRESSED IN HELA, SIGNAL = 0.97
  unsure 35
  unsure 40
GGKVENLVNQDETRLPAEQIFHGPEIQAAPVIADXGYRGXLR

SEQ ID NO: 48916 - protein, 60 aa, Homo sapiens
  MAP TO AC010968.1; EXPRESSED IN BT474, SIGNAL = 1.1; EXPRESSED IN HBL100, SIGNAL = 1.8; EST_HUMAN HIT: R31173.1, EVALUE 3.00e-18; SWISSPROT HIT: P25795, EVALUE 3.40e+00
KPGGQVKCQYISAVDKVIFVDDYAVGCRKDLNGILLLDTALQTPVSKQDDVVQLELPVTE

SEQ ID NO: 48917 - protein, 17 aa, Homo sapiens
  MAP TO AC010968.1; EXPRESSED IN BT474, SIGNAL = 1.1; EXPRESSED IN HBL100, SIGNAL = 1.8
VSISLLWIKLYLWMIMQ

SEQ ID NO: 48918 - protein, 27 aa, Homo sapiens
  MAP TO AP000426.1; EXPRESSED IN BT474, SIGNAL = 0.96
CITTRMMNEKGKTLSSFISTLQVSSCQ

SEQ ID NO: 48919 - protein, 211 aa, Homo sapiens
  MAP TO AC004943.1; EXPRESSED IN BT474, SIGNAL = 1.1; SWISSPROT HIT: P28167, EVALUE 8.00e-22; EST_HUMAN HIT: AW663888.1, EVALUE 4.00e-98
TSEDLGKNILPSASTEQSGDLKPSPADPGSVREDSGFICWKKGCNQVFKTSAALQTHFNEVHAKRPQLPVSDRHVYKYRCNQCSLAFKTIEKLQLHSQYHVIRAATMCCLCQRSFRTFQALKKHLETSHLELSEADIQQLYGGLLANGDLLAMGDPTLAEDHTIIVEEDKEEESDLEDKQSPTGSDSGSVQEDSGSEPKRALPFRKGPNFT

SEQ ID NO: 48920 - protein, 54 aa, Homo sapiens
  MAP TO AC011504.2; EXPRESSED IN BT474, SIGNAL = 1.1
WNRRKKPAPAVFLELPGNFYFLFPLLIMTVFGSAASSPLPPSSPLLLQPPRAPV

SEQ ID NO: 48921 - protein, 28 aa, Homo sapiens
  MAP TO AC008123.9; EXPRESSED IN BT474, SIGNAL =  51; SWISSPROT HIT: P16943, EVALUE 4.90e+00
TEKRHRGCRISRMGAKTCCGTMPLQRWI

SEQ ID NO: 48922 - protein, 30 aa, Homo sapiens
  MAP TO AC008012.8; EXPRESSED IN HBL100, SIGNAL = 1.2; EXPRESSED IN BT474, SIGNAL = 1.1; EST_HUMAN HIT: AW373185.1, EVALUE 1.00e-10
MGLRNILKVCCTHDITTISIPLLLVHDMSE

SEQ ID NO: 48923 - protein, 17 aa, Homo sapiens
  MAP TO AC008012.8; EXPRESSED IN HBL100, SIGNAL = 1.2; EXPRESSED IN BT474, SIGNAL = 1.1; EST_HUMAN HIT: AW373185.1, EVALUE 7.00e-03
WDSEIYSKFAVPMTSQQ

SEQ ID NO: 48924 - protein, 37 aa, Homo sapiens
  MAP TO AL117332.2; EXPRESSED IN BT474, SIGNAL = 1.5; EXPRESSED IN HELA, SIGNAL = 6.2; EST_HUMAN HIT: BE408992.1, EVALUE 4.00e-14; SWISSPROT HIT: P40848, EVALUE 2.00e-10
PAPKNEDEMMVAIFEYIDRLFSIVRPRRLLYMAIDGV

SEQ ID NO: 48925 - protein, 63 aa, Homo sapiens
  MAP TO AC007282.2; EXPRESSED IN BT474, SIGNAL = 1.1; EXPRESSED IN HBL100, SIGNAL = 1.7; EXPRESSED IN HELA, SIGNAL = 0.82; EST_HUMAN HIT: H04619.1, EVALUE 3.00e-11
MIGLFSHGFLAGCAVWNIVVIYVLAGDQLSNLSNLLQQYKTLAYPFQSLLYLLLALSTISAFD

SEQ ID NO: 48926 - protein, 55 aa, Homo sapiens
  MAP TO AC011356.1; EXPRESSED IN BT474, SIGNAL = 0.97; EXPRESSED IN HELA, SIGNAL = 4.3; EXPRESSED IN HBL100, SIGNAL = 0.97; EST_HUMAN HIT: BF061624.1, EVALUE 3.00e-23; SWISSPROT HIT: P41846, EVALUE 5.20e-01
MLISKLEKNKNMKPEERANIMKTLKELGEKISQLKDELKTSSAVSTPSKVKTKTE

SEQ ID NO: 48927 - protein, 88 aa, Homo sapiens
  MAP TO AC007189.6; EXPRESSED IN BT474, SIGNAL = 5.2; EST_HUMAN HIT: AV681718.1, EVALUE 7.80e+00; SWISSPROT HIT: Q08791, EVALUE 5.30e+00
VILQISLIENPDILCRTIIIVKKLLAISWLSVLQGSKDVAMTTRMFGHNRDLQLLFLSVICLAEPTLPTIFKSRKMWPAFPSRTLMLK

SEQ ID NO: 48928 - protein, 19 aa, Homo sapiens
  MAP TO AC007189.6; EXPRESSED IN BT474, SIGNAL = 5.2
SSCRYHSSRIQTSYAGLSL

SEQ ID NO: 48929 - protein, 77 aa, Homo sapiens
  MAP TO AL021332.1; EXPRESSED IN BT474, SIGNAL =   1; EST_HUMAN HIT: AU132049.1, EVALUE 8.40e-01; SWISSPROT HIT: Q35543, EVALUE 4.60e-01
HGISSISTSGDLISGLVILIISPIFTLSSICLALTTCLYSVCIIVSTDINRKITKLNRTLFFLPEVDFGIVIPVIIM

SEQ ID NO: 48930 - protein, 30 aa, Homo sapiens
  MAP TO AL021332.1; EXPRESSED IN BT474, SIGNAL =   1
QIELSVKMGEIIRMTKPLIKSPDVEMELIP

SEQ ID NO: 48931 - protein, 76 aa, Homo sapiens
  MAP TO AL034551.14; EXPRESSED IN HELA, SIGNAL = 2.2; EXPRESSED IN BT474, SIGNAL =   1; SWISSPROT HIT: P29673, EVALUE 4.10e-01; EST_HUMAN HIT: BE149917.1, EVALUE 1.60e+00
NERKGICDCASDWVASKILFLRVSLGFISIKRIICQTLACLVIRKALGVAQKCYHNSGVIFCPYQYFGFFKLPLEL

SEQ ID NO: 48932 - protein, 22 aa, Homo sapiens
  MAP TO AL034551.14; EXPRESSED IN HELA, SIGNAL = 2.2; EXPRESSED IN BT474, SIGNAL =   1
TREKASVIVPLIGWHPKSCFSG

SEQ ID NO: 48933 - protein, 63 aa, Homo sapiens
  MAP TO AC007030.2; EXPRESSED IN BT474, SIGNAL = 1.1; EXPRESSED IN HELA, SIGNAL = 1.1; SWISSPROT HIT: P18491, EVALUE 1.90e+00; EST_HUMAN HIT: BE781510.1, EVALUE 8.90e-01
KQTKQTKKPNYSPFLRLPLSGPQSPGQLLQLARPICHHSEIPQLDRNQDRQPSSRQGDPLQIK

SEQ ID NO: 48934 - protein, 60 aa, Homo sapiens; identical to SEQ ID NO: 48163
  MAP TO AC009957.4; EXPRESSED IN BT474, SIGNAL = 0.92; SWISSPROT HIT: P39542, EVALUE 5.80e+00

SEQ ID NO: 48935 - protein, 74 aa, Homo sapiens
  MAP TO AL109928.5; EXPRESSED IN BT474, SIGNAL = 1.6; EXPRESSED IN HBL100, SIGNAL = 1.8; EST_HUMAN HIT: F08337.1, EVALUE 5.00e-04; SWISSPROT HIT: P55291, EVALUE 4.00e-04
IVVENEERLVFCERGKLQPPRKAAASATVSVQVTDANDPPAFHPQSFIVNKEEGARPGTLLGTFNAMDPDSQIR

SEQ ID NO: 48936 - protein, 50 aa, Homo sapiens; identical to SEQ ID NO: 34822
  MAP TO AL096677.18; EXPRESSED IN BT474, SIGNAL = 0.96; EST_HUMAN HIT: AI200857.1, EVALUE 5.00e-23; SWISSPROT HIT: O60676, EVALUE 1.00e-01

SEQ ID NO: 48937 - protein, 19 aa, Homo sapiens
  MAP TO AL096677.18; EXPRESSED IN BT474, SIGNAL = 0.96; EST_HUMAN HIT: AI200857.1, EVALUE 4.00e-04
IDSDGPPLPSKEENLSKRP

SEQ ID NO: 48938 - protein, 39 aa, Homo sapiens
  MAP TO AP000251.1; EXPRESSED IN BT474, SIGNAL = 1.8; EST_HUMAN HIT: BE961543.1, EVALUE 3.20e+00
VEARRLLIHTEPSAVPTSWSAALRIPRTNLQDPGPLAWK

SEQ ID NO: 48939 - protein, 32 aa, Homo sapiens
  MAP TO AL096700.6; EXPRESSED IN BT474, SIGNAL =  29; EXPRESSED IN HBL100, SIGNAL = 0.92; SWISSPROT HIT: P44699, EVALUE 6.30e+00
HRLQFIFVGCQLVLVGFSLLVIFLPDYLPCRL

SEQ ID NO: 48940 - protein, 46 aa, Homo sapiens
  MAP TO AL049835.3; EXPRESSED IN BT474, SIGNAL = 0.62; EST_HUMAN HIT: AV699405.1, EVALUE 6.80e+00
TSISILFLLTIVFTFTYITLLNFPHIMDEEIKALSVKCHIQGYTAR

SEQ ID NO: 48941 - protein, 533 aa, Homo sapiens
  MAP TO AC008174.1; EXPRESSED IN BT474, SIGNAL = 0.63; EST_HUMAN HIT: BF129490.1, EVALUE 1.30e+00; SWISSPROT HIT: P13666, EVALUE 6.40e-02
VSPKDNPKPCFKAHLKTRSKITTLPKFTKKTHLGLSAAKAKSKTKLGPGEKTLKDSRSKTAIGLSHIMSAGDAKNLLDTKLPTSELKIYAKDIIINILETIVKEFGKVKQTKALPSDQIIAAGKIVNTVLQELYVTNNCNLAYPMKSSHLRLSQGNIGTGSLPKQQACFYLENVSSQLEHIFPREGIFKKLFDKWQTESNDKENEKCKLLMIAENVLTEISIKAKELEYSLSLLNLPPLENCESRFYNHFKGASTRAEDTKAQINMFGREIVEMLLEKLQLCFLSQIPTPDSEETLSNSKEHITAKSKYGFPNKHSLSSLPIYNTKTKDQISVGSSNQIVQEIVETVLNMLESFVDLQFKHISKYEFSEIVKMPIENLSSIQQKLLNKKMLPKLQPLKMFSDKSESNTINFKENIQNILLRVHSFHSQLLTYAVNIISDMLAVIKNKLDNEISQMEPSSISILKENIVASEIIGTLMDQCTYFNESLIQNLSRESLFQGAENAYTVNQVELATNMKMFTSKLKEGSLGINPSQ

SEQ ID NO: 48942 - protein, 29 aa, Homo sapiens
  MAP TO AC011308.2; EXPRESSED IN HBL100, SIGNAL = 0.98; EXPRESSED IN BT474, SIGNAL = 0.92
ALKAHCPPMEQVVLSSENNMPNLVKEQPW

SEQ ID NO: 48943 - protein, 42 aa, Homo sapiens
  MAP TO AC007733.1; EXPRESSED IN BT474, SIGNAL = 0.72; EST_HUMAN HIT: AW605893.1, EVALUE 1.80e+00
  unsure 30
RKLLIIRFRCFSLLGDRLSLARLQSIITTXLPDHHLMASEHS

SEQ ID NO: 48944 - protein, 31 aa, Homo sapiens
  MAP TO AC007733.1; EXPRESSED IN BT474, SIGNAL = 0.72; EST_HUMAN HIT: AI912459.1, EVALUE 8.00e-03
  unsure 29
EAADHQIQVFLLTGRPPFPGTAAINYYNXTA

SEQ ID NO: 48945 - protein, 18 aa, Homo sapiens
  MAP TO AC009973.2; EXPRESSED IN BT474, SIGNAL = 1.7; EXPRESSED IN HBL100, SIGNAL = 0.96; EST_HUMAN HIT: AI990847.1, EVALUE 8.30e+00
PLTFPTHSCACLINCGNR

SEQ ID NO: 48946 - protein, 67 aa, Homo sapiens
  MAP TO AL096817.12; EXPRESSED IN BT474, SIGNAL = 7.7; SWISSPROT HIT: P28661, EVALUE 7.40e+00; EST_HUMAN HIT: AI791362.1, EVALUE 2.00e-22
EVTAKTKTEMYQNMDDEMKREHLAAEQRMVHRIQRIMMECHREKVEAVEKARAEERHIAQEAIQAQK

SEQ ID NO: 48947 - protein, 28 aa, Homo sapiens
  MAP TO AC007652.1; EXPRESSED IN HELA, SIGNAL = 8.3; EXPRESSED IN BT474, SIGNAL =   4
QNPGAMVMPTTKYDNSNYMFRNWENDTG

SEQ ID NO: 48948 - protein, 36 aa, Homo sapiens
  MAP TO AL109843.6; EXPRESSED IN BT474, SIGNAL =  48
INATVPKTIIYWDSQTTIEKVSCEMRYKATTNQTWN

SEQ ID NO: 48949 - protein, 19 aa, Homo sapiens
  MAP TO AC009401.1; EXPRESSED IN BT474, SIGNAL = 1.3
DSLSQIMKAKRKRSTSLRY

SEQ ID NO: 48950 - protein, 34 aa, Homo sapiens
  MAP TO AC004381.1; EXPRESSED IN BT474, SIGNAL = 1.6; EXPRESSED IN HBL100, SIGNAL = 1.2; EST_HUMAN HIT: AI915981.1, EVALUE 1.00e-11
QFLIEGLSLKEFLVEILKFLSQIWLVSGELKVSP

SEQ ID NO: 48951 - protein, 83 aa, Homo sapiens
  MAP TO AC011345.1; EXPRESSED IN BT474, SIGNAL = 1.9; SWISSPROT HIT: Q92370, EVALUE 5.70e-01
HLEKLSVVHDSVFYEISSYSFKGPSAVLILVRKVSRDKFRNMKASMRTPGTSAVLPINLALSSSYNVQIGLPKDGIRHTPSLS

SEQ ID NO: 48952 - protein, 37 aa, Homo sapiens
  MAP TO AC010740.3; EXPRESSED IN BT474, SIGNAL =   1; EST_HUMAN HIT: AA928673.1, EVALUE 3.30e-01; SWISSPROT HIT: Q07954, EVALUE 2.00e-07
MSFELRKLYWTDGNTINMANMDGSNSKILFQNQKEPV

SEQ ID NO: 48953 - protein, 18 aa, Homo sapiens
  MAP TO AC009475.2; EXPRESSED IN BT474, SIGNAL =   1
VFYVLFPENLAKQLNWKQ

SEQ ID NO: 48954 - protein, 54 aa, Homo sapiens
  MAP TO AL121578.1; EXPRESSED IN BT474, SIGNAL = 1.8; SWISSPROT HIT: P47709, EVALUE 4.00e-04; EST_HUMAN HIT: AA370481.1, EVALUE 3.00e-12
VIKKSVNPQWNHTFMFSGIHPQDIKNVCLELTIWDKEAFSSNIFLGGVRLNSGS

SEQ ID NO: 48955 - protein, 30 aa, Homo sapiens [sequence omitted]

SEQ ID NO: 48956 - protein, 20 aa, Homo sapiens
  MAP TO AL049765.16; EXPRESSED IN BT474, SIGNAL = 1.3; EXPRESSED IN HBL100, SIGNAL =   1
ENGEIVHSHLLQVQHGQKMC

SEQ ID NO: 48957 - protein, 117 aa, Homo sapiens
  MAP TO AC007461.8; EXPRESSED IN BT474, SIGNAL = 0.95
MSWGRLAGVLSSFGLIHPSFRCSSQSTARGRREAGRRESGRLPEIPFLPSLHRLPHSDPGDSRLPPVKELVTLPEPSRASPPSSLPPLPAPSLYPSSLLWLHRQVPHPRKKELELRD

SEQ ID NO: 48958 - protein, 58 aa, Homo sapiens
  MAP TO AC009957.2; EXPRESSED IN BT474, SIGNAL = 1.3; EST_HUMAN HIT: AI423283.1, EVALUE 2.00e-28; SWISSPROT HIT: Q03744, EVALUE 7.60e+00
SILIIEAFYGGSHKQLVDLLQEELGDCVVYTLPAKKWHWRARTSALYFSQTIPISEHY

SEQ ID NO: 48959 - protein, 78 aa, Homo sapiens
  MAP TO AC008171.1; EXPRESSED IN BT474, SIGNAL = 0.62; EST_HUMAN HIT: BE087807.1, EVALUE 1.00e-11
GLSDKSSHSGQGALNCESAPQGNSELEDMENKARKVKKTKEKEKKKEKGKLKVKEKKRKEENEDPERKIKKKGFGAML

SEQ ID NO: 48960 - protein, 21 aa, Homo sapiens
  MAP TO AC008171.1; EXPRESSED IN BT474, SIGNAL = 0.62
KIKPGKSKKRKRRRRKRKRAN

SEQ ID NO: 48961 - protein, 70 aa, Homo sapiens
  MAP TO AL096763.9; EXPRESSED IN BT474, SIGNAL =   1; EST_HUMAN HIT: BF576500.1, EVALUE 3.20e+00; SWISSPROT HIT: P32192, EVALUE 8.50e-01
FLQENYPICDLSENGRDWKSCVTSINSGIRSLRHDVRRAEARSQSLPAVTPPELEQESKPGDPDATDPST

SEQ ID NO: 48962 - protein, 65 aa, Homo sapiens
  MAP TO AC011330.4; EXPRESSED IN BT474, SIGNAL = 1.4; SWISSPROT HIT: O01705, EVALUE 1.10e-01; EST_HUMAN HIT: AI674672.1, EVALUE 1.00e-33
PPEPQIIVGICAMTKKSKSKPMTQILERLCRFDYLTVVILGEDVILNEPVENWPSCHCLISFHSK

SEQ ID NO: 48963 - protein, 39 aa, Homo sapiens
  MAP TO AC004947.2; EXPRESSED IN BT474, SIGNAL = 0.65; EST_HUMAN HIT: BE838383.1, EVALUE 3.20e+00; SWISSPROT HIT: P22763, EVALUE 4.70e+00
NVKPLNDFIREEWHHQVYILKRWLWLQYEEWVEELMRQP

SEQ ID NO: 48964 - protein, 35 aa, Homo sapiens
  MAP TO AC012449.1; EXPRESSED IN BT474, SIGNAL = 2.1; EST_HUMAN HIT: AW615296.1, EVALUE 3.00e-03
SMASISSVMLNRIDESEHPFLIPHYREKTCNFSPL

SEQ ID NO: 48965 - protein, 49 aa, Homo sapiens
  MAP TO AL121761.1; EXPRESSED IN BT474, SIGNAL = 1.2; EST_HUMAN HIT: T06656.1, EVALUE 4.00e-07
VFGVHLNKWQLDKKLGCGCLLLYGVFLCFSIMTEFNVFTFVNLPMCGDH

SEQ ID NO: 48966 - protein, 47 aa, Homo sapiens
  MAP TO AP000018.2; EXPRESSED IN BT474, SIGNAL = 1.4; SWISSPROT HIT: Q21986, EVALUE 2.70e+00
KDLVLDLAESEREGCVTEERNSRYEQGAGSELDSQTSRLLTQEKSHK

SEQ ID NO: 48967 - protein, 159 aa, Homo sapiens [sequence omitted]

SEQ ID NO: 48968 - protein, 34 aa, Homo sapiens; identical to SEQ ID NO: 46817
  MAP TO AP000076.1; EXPRESSED IN BT474, SIGNAL = 1.8

SEQ ID NO: 48969 - protein, 27 aa, Homo sapiens
  MAP TO AL132633.1; EXPRESSED IN BT474, SIGNAL = 0.96
LGLIHANSGLFKRKNIKITQKAQENAL

SEQ ID NO: 48970 - protein, 77 aa, Homo sapiens
  MAP TO AC009613.2; EXPRESSED IN BT474, SIGNAL = 0.97; EST_HUMAN HIT: R36048.1, EVALUE 1.90e-02; SWISSPROT HIT: P29483, EVALUE 9.70e-01
DSNEESGPKYLKDQEDVMGFNPWIRLVMRRLWQKEIQIKTEVLVWAAVTISQKEWLINNKNLFLESGKSKIKADSIL

SEQ ID NO: 48971 - protein, 42 aa, Homo sapiens
  MAP TO AF145206.1; EXPRESSED IN BT474, SIGNAL =  25
PCMYNYIVMQTTGRFAEIFIIISYSNEAHPPLDTQFPVLLYV

SEQ ID NO: 48972 - protein, 31 aa, Homo sapiens
  MAP TO AC005476.3; EXPRESSED IN BT474, SIGNAL = 0.81
MNDAGLADAVDLVRCAKQAAVETTVGSLGGQ

SEQ ID NO: 48973 - protein, 47 aa, Homo sapiens
  MAP TO AB020863.1; EXPRESSED IN HBL100, SIGNAL = 2.3; EST_HUMAN HIT: H04072.1, EVALUE 2.00e-20
GKLNSGSYCGLSLKILSSANVISCINRLEVFHCNDTLGDSRGVSQSS

SEQ ID NO: 48974 - protein, 38 aa, Homo sapiens
  MAP TO AC007869.1; EXPRESSED IN HBL100, SIGNAL = 0.87; SWISSPROT HIT: Q53552, EVALUE 3.60e+00
SSPWKDLWVRRARALNAELLGAVSSGQTRPDENHKTRC

SEQ ID NO: 48975 - protein, 37 aa, Homo sapiens
  MAP TO AC005235.2; EXPRESSED IN HBL100, SIGNAL = 0.87; SWISSPROT HIT: O13097, EVALUE 8.10e+00
MSQQEVYSTEKDESTTEGKKSRENGTCCIGMKDNLQK

SEQ ID NO: 48976 - protein, 26 aa, Homo sapiens
  MAP TO AC011402.1; EXPRESSED IN HBL100, SIGNAL = 1.2; EXPRESSED IN HELA, SIGNAL = 1.9
EKHHLDQMIKFSITGDVILIACIHNI

SEQ ID NO: 48977 - protein, 39 aa, Homo sapiens
  MAP TO AC010739.2; EXPRESSED IN HBL100, SIGNAL = 0.91
VLLGNLPDYHIISKMTTLWSRTSALGNITPKAPSLKLPQ

SEQ ID NO: 48978 - protein, 29 aa, Homo sapiens
  MAP TO AL122035.1; EXPRESSED IN HBL100, SIGNAL = 1.8; SWISSPROT HIT: P27653, EVALUE 2.50e-01; EST_HUMAN HIT: BE892738.1, EVALUE 3.50e+00
DIHAITAANNLVAAAIDARIFHELTQTDK

SEQ ID NO: 48979 - protein, 29 aa, Homo sapiens
  MAP TO AL122035.1; EXPRESSED IN HBL100, SIGNAL = 1.8; EST_HUMAN HIT: AU125984.1, EVALUE 7.00e-05
LLFFCSLISTSQVTSMPSLQLITSLLRPL

SEQ ID NO: 48980 - protein, 320 aa, Homo sapiens
  MAP TO AC005164.1; EXPRESSED IN HELA, SIGNAL =   1; EXPRESSED IN HBL100, SIGNAL =   1; EST_HUMAN HIT: AU128881.1, EVALUE 1.00e-119; SWISSPROT HIT: P24588, EVALUE 2.00e-03
IKYSVGSLSPVSASVLKKTEQKEKVELQHISQKDCQEDDTTVKEQNFLYKETQETEKKLLFISEPIPHPSNELRGLNEKMSNKCSMLSTAEDDIRQNFTQLPLHKNKQECILDISEHTLSENDLEELRVDHYKCNIQASVHVSDFSTDNSGSQPKQKSDTVLFPAKDLKEKDLHSIFTHDSGLITINSSQEHLTVQAKAPFHTPPEEPNECDFKNMDSLPSGKIHRKVKIILGRNRKENLEPNAEFDKRTEFITQEENRICSSPVQSLLDLFQTSEEKSEFLGFTSYTEKSGICNVLDIWEEENSDNLLTAFFSSPSTST

SEQ ID NO: 48981 - protein, 24 aa, Homo sapiens
  MAP TO AC005164.1; EXPRESSED IN HELA, SIGNAL =   1; EXPRESSED IN HBL100, SIGNAL =   1
FLTTQEFVLIAIILIFFFYFSYKE

SEQ ID NO: 48982 - protein, 65 aa, Homo sapiens
  MAP TO AL096865.5; EXPRESSED IN HELA, SIGNAL = 0.99; EXPRESSED IN HBL100, SIGNAL = 0.92; EST_HUMAN HIT: AI863695.1, EVALUE 2.00e-24; SWISSPROT HIT: Q01196, EVALUE 5.00e-24
VVALGEVPDGTVVTVMAGNDENYSAELRNASAVMKNQVARFNDLRFVGRSGRGRSLTFDTDNRIS

SEQ ID NO: 48983 - protein, 30 aa, Homo sapiens
  MAP TO AC009834.2; EXPRESSED IN HBL100, SIGNAL = 1.1; SWISSPROT HIT: P33316, EVALUE 7.00e-12; EST_HUMAN HIT: BE644721.1, EVALUE 1.00e-10
AYDYTIPPMEKAVVKTDIQIALPSGCYGRV

SEQ ID NO: 48984 - protein, 43 aa, Homo sapiens
  MAP TO AJ239320.2; EXPRESSED IN HBL100, SIGNAL = 0.91; EXPRESSED IN HELA, SIGNAL = 1.1; EST_HUMAN HIT: BE271479.1, EVALUE 1.00e-18; SWISSPROT HIT: P39067, EVALUE 2.40e-01
IVKPKVASMEEMATFHTDAYLQHLQKVSQEGDDDHPDSIEYGL

SEQ ID NO: 48985 - protein, 58 aa, Homo sapiens
  MAP TO AF111167.2; EXPRESSED IN HBL100, SIGNAL = 1.2
HCHCHKRHHYHHHHHNHYYYHHHHHHHHQHLYHNYHLHHHQHHYHHHATTTTTAIANA

SEQ ID NO: 48986 - protein, 55 aa, Homo sapiens
  MAP TO Z98200.8; EXPRESSED IN HBL100, SIGNAL = 0.91; EXPRESSED IN HELA, SIGNAL = 1.4; EST_HUMAN HIT: N43850.1, EVALUE 3.00e-25
MNITRKLWSRTFNCSVPCSDTVPVIAVSVFILFLPVVFYLSSFLHSEQKKRKLIL

SEQ ID NO: 48987 - protein, 85 aa, Homo sapiens
  MAP TO AL049611.24; EXPRESSED IN HBL100, SIGNAL = 0.91; EXPRESSED IN HELA, SIGNAL = 1.8; SWISSPROT HIT: P29290, EVALUE 3.00e-04; EST_HUMAN HIT: AA582539.1, EVALUE 8.00e-35
KQTEKDPGVQELEALIDTIQKQLKDHSCKDNIREAFQIYDKEASGYVDRDMFFKICESLNVPVDDSLVKEVSMNYSSEFIAEARH

SEQ ID NO: 48988 - protein, 18 aa, Homo sapiens
  MAP TO AL049611.24; EXPRESSED IN HBL100, SIGNAL = 0.91; EXPRESSED IN HELA, SIGNAL = 1.8; EST_HUMAN HIT: AI089302.1, EVALUE 6.00e-03
NRHNSEATERSLMQRQHS

SEQ ID NO: 48989 - protein, 46 aa, Homo sapiens
  MAP TO AL122035.1; EXPRESSED IN HBL100, SIGNAL = 1.3; EXPRESSED IN HELA, SIGNAL = 0.97; EST_HUMAN HIT: BE791347.1, EVALUE 4.00e-21; SWISSPROT HIT: P11586, EVALUE 3.00e-22
TEAGFGADIGMEKFFNIKCRYSGLCPHVVVLVATVRALKMHGGGPT

SEQ ID NO: 48990 - protein, 56 aa, Homo sapiens
  MAP TO AC007077.2; EXPRESSED IN HBL100, SIGNAL = 0.83; EXPRESSED IN HELA, SIGNAL = 0.69; SWISSPROT HIT: O81481, EVALUE 1.20e+00; EST_HUMAN HIT: BE388075.1, EVALUE 1.20e+00
CMENSSVQIVDTVGSSRTTCHPSPPTYELLTHSLAFWFPVGFRQQKHEQYICRTGG

SEQ ID NO: 48991 - protein, 44 aa, Homo sapiens
  MAP TO AC007249.2; EXPRESSED IN HELA, SIGNAL = 1.9; EXPRESSED IN HBL100, SIGNAL = 1.4; EST_HUMAN HIT: BE409376.1, EVALUE 2.00e-16; SWISSPROT HIT: P11926, EVALUE 1.00e-17
LVLRIATDDSKAVCRLSVKFGATLRTSRLLLERAKELNIDVVGV

SEQ ID NO: 48992 - protein, 25 aa, Homo sapiens
  MAP TO AC007249.2; EXPRESSED IN HELA, SIGNAL = 1.9; EXPRESSED IN HBL100, SIGNAL = 1.4; EST_HUMAN HIT: BE872212.1, EVALUE 5.00e-03
AALSLLVGWFCGLPLMIPKQSVVSV

SEQ ID NO: 48993 - protein, 85 aa, Homo sapiens
  MAP TO AF064858.1; EXPRESSED IN HBL100, SIGNAL = 3.5; SWISSPROT HIT: P46711, EVALUE 4.70e+00
VHNNIKKLTAHNWKMVMNHIATLKLIKRKDKAFTNLCLHNTNCRITKELMGERIPISKQRRDDLMSHFETPNEFMDQGNGNHKKT

SEQ ID NO: 48994 - protein, 31 aa, Homo sapiens
  MAP TO AC005018.2; EXPRESSED IN HBL100, SIGNAL = 1.3
PCPATAKYKSSRLLHSPPTSSCSDSSSPCFP

SEQ ID NO: 48995 - protein, 36 aa, Homo sapiens
  MAP TO AC005018.2; EXPRESSED IN HBL100, SIGNAL = 1.3
GSEKREERREKHSPGHHSGHCHHGHSWAMAQAQQEE

SEQ ID NO: 48996 - protein, 18 aa, Homo sapiens
  MAP TO AL031302.1; EXPRESSED IN HBL100, SIGNAL = 1.1; EST_HUMAN HIT: AW577569.1, EVALUE 1.10e+00
WPFGMMDFPSQNHGSICP

SEQ ID NO: 48997 - protein, 27 aa, Homo sapiens
  MAP TO AL031302.1; EXPRESSED IN HBL100, SIGNAL = 1.1; EST_HUMAN HIT: AV747607.1, EVALUE 1.00e-07
AIRDDGLSIPEPWLHLSVTLWRRPQHW

SEQ ID NO: 48998 - protein, 47 aa, Homo sapiens
  MAP TO AC008008.2; EXPRESSED IN HBL100, SIGNAL = 0.98; EXPRESSED IN HELA, SIGNAL = 0.72; SWISSPROT HIT: P38700, EVALUE 7.90e+00; EST_HUMAN HIT: BE747944.1, EVALUE 2.00e-18
PNPPTIREELCTASYDTITVHWTSDDEFSVVSYELQYTIFTGQANVV

SEQ ID NO: 48999 - protein, 40 aa, Homo sapiens
  MAP TO AC008008.2; EXPRESSED IN HBL100, SIGNAL = 0.98; EXPRESSED IN HELA, SIGNAL = 0.72; EST_HUMAN HIT: AI371111.1, EVALUE 3.00e-04
PMMSSAWSPTSSSTPYSPDKPTSLVSISWPIYFCLWWLSS

SEQ ID NO: 49000 - protein, 32 aa, Homo sapiens
  MAP TO AP000501.1; EXPRESSED IN HBL100, SIGNAL = 1.3
FMDVPLAHKLEGSLLKTYKQDDYPNKIFLAYR

SEQ ID NO: 49001 - protein, 32 aa, Homo sapiens
  MAP TO AC011087.1; EXPRESSED IN HBL100, SIGNAL = 8.8
DSIGGQDDMELTYSREKGIAGRWENSSNRFLS

SEQ ID NO: 49002 - protein, 58 aa, Homo sapiens
  MAP TO AC007314.3; EXPRESSED IN HBL100, SIGNAL = 0.71; SWISSPROT HIT: P48234, EVALUE 4.00e-06; EST_HUMAN HIT: AI806383.1, EVALUE 3.00e-16
SLPNILTDDRFKVMFENPDFQVDEESEEFRLLNPLVSKISEKRKKKLRLLEQQELREK

SEQ ID NO: 49003 - protein, 21 aa, Homo sapiens
  MAP TO AC007314.3; EXPRESSED IN HBL100, SIGNAL = 0.71; EST_HUMAN HIT: AW302586.1, EVALUE 2.00e-04
VFLIFSPMIDLKLCLRTLTSK

SEQ ID NO: 49004 - protein, 54 aa, Homo sapiens
  MAP TO AL049868.10; EXPRESSED IN HBL100, SIGNAL = 0.93; SWISSPROT HIT: Q9Q8Z2, EVALUE 9.20e-01
LPLDGETVKYCVDVYTDWIMALVLPKDSIPLPVIKEPNQYVQTILKHLQNLFVP

SEQ ID NO: 49005 - protein, 44 aa, Homo sapiens
  MAP TO AC006346.1; EXPRESSED IN HBL100, SIGNAL = 1.2; EST_HUMAN HIT: BE674422.1, EVALUE 7.00e+00; SWISSPROT HIT: P70579, EVALUE 1.00e-19
GVCIAQSQKIPREPRPGEFEKIIKRLLETPNARAVIMFANEDDI

SEQ ID NO: 49006 - protein, 27 aa, Homo sapiens
  MAP TO AC006346.1; EXPRESSED IN HBL100, SIGNAL = 1.2
VVFALLSHRKSHVNQDLENLKKLSNAC

SEQ ID NO: 49007 - protein, 123 aa, Homo sapiens
  MAP TO AP000120.1; EXPRESSED IN HELA, SIGNAL = 0.98; EXPRESSED IN HBL100, SIGNAL = 0.67; EST_HUMAN HIT: AI962650.1, EVALUE 3.00e-59; SWISSPROT HIT: Q9Y6J6, EVALUE 7.00e-67
MSTLSNFTQTLEDVFRRIFITYMDNWRQNTTAEQEALQAKVDAENFYYVILYLMVMIGMFSFIIVAILVSTVKSKRREHSNDPYHQYIVEDWQEKYKSQILNLEESKATIHENIGAAGFKMSP

SEQ ID NO: 49008 - protein, 27 aa, Homo sapiens
  MAP TO AL049832.2; EXPRESSED IN HBL100, SIGNAL = 1.4; SWISSPROT HIT: P26651, EVALUE 6.40e+00
SCLAQVTASSPGWTDGGPASVSNSEQL

SEQ ID NO: 49009 - protein, 27 aa, Homo sapiens
  MAP TO AL079337.3; EXPRESSED IN HBL100, SIGNAL = 4.1
RENNAKKEKLYDDSMTLSPNTKKTNIK

SEQ ID NO: 49010 - protein, 43 aa, Homo sapiens
  MAP TO AC006348.2; EXPRESSED IN HBL100, SIGNAL =   1
FALLTFESICASGFMMDNDRQLQFLVKPLSGVGIHAMLVMLAL

SEQ ID NO: 49011 - protein, 41 aa, Homo sapiens
  MAP TO AC010904.1; EXPRESSED IN HBL100, SIGNAL = 1.1; EST_HUMAN HIT: BE543778.1, EVALUE 9.30e+00; SWISSPROT HIT: P07445, EVALUE 8.00e+00
DGIRKPKAWCLTGSIATSSSGCGALERKGLLRIISCNMKMP

SEQ ID NO: 49012 - protein, 88 aa, Homo sapiens
  MAP TO AL022727.1; EXPRESSED IN HBL100, SIGNAL = 1.6; EST_HUMAN HIT: BF116115.1, EVALUE 4.00e-06; SWISSPROT HIT: Q91474, EVALUE 2.00e+00
DLLPDDTDRKPVHHHPVIRGLPSPHTNVLLPFKPLISGSLPHHQLYPSVAGESPGPGKDHLVCWLHGSTLLCSCTGNRRVCPTGGDVV

SEQ ID NO: 49013 - protein, 40 aa, Homo sapiens
  MAP TO AL031132.1; EXPRESSED IN HBL100, SIGNAL = 1.7
VRNKKWEKNAIISILTLWSNPPLEINLREKSTKTKFTQLQ

SEQ ID NO: 49014 - protein, 54 aa, Homo sapiens
  MAP TO AL096771.11; EXPRESSED IN HBL100, SIGNAL = 0.92; EXPRESSED IN HELA, SIGNAL =   1; EST_HUMAN HIT: BE004406.1, EVALUE 7.00e-24; SWISSPROT HIT: Q99715, EVALUE 8.00e-25
MALNFIRQQNFRTQAGMRPRARKIGVLITDGKSQDDVEAPSKKLKDEGVELFAI

SEQ ID NO: 49015 - protein, 34 aa, Homo sapiens
  MAP TO AL035460.13; EXPRESSED IN HBL100, SIGNAL = 0.91; SWISSPROT HIT: O08791, EVALUE 1.00e-12; EST_HUMAN HIT: BF515857.1, EVALUE 6.00e-13
KSNFFHFVLAMYDRQGQPVEVERTAFIDFVEKDR

SEQ ID NO: 49016 - protein, 29 aa, Homo sapiens
  MAP TO AC009972.3; EXPRESSED IN HBL100, SIGNAL = 1.1
GPEKDEKVNNVKAVSNSLNGYASHNNKPE

SEQ ID NO: 49017 - protein, 995 aa, Homo sapiens
  MAP TO AC007282.2; EXPRESSED IN HBL100, SIGNAL = 1.6; EST_HUMAN HIT: AI023682.1, EVALUE 8.00e-72; SWISSPROT HIT: P30622, EVALUE 1.00e-06
WLSEKDILNSKTTLSQIIKNIPADSFSEGSQIIENIPADSLLEGGQVIKNIPEYSLSEGGQIIKNIPADSFLESGPGQSPEVEEHVSKKHFEADERDFPIKKNSSTKKKHLISEVPNSKSGSSGTVHDYIMRQIFTAPIFSELEIEVKEPSETPMNLENQLPTPWKRSLSSHILFHEENADEIELPQPRSATSQIIQAFPIDTLLESGIIKVIELDKEHHKSSLLGTGITSPKGNLKDSQEYYSEIRSETEPLSEQSIPIIPKDTTSVSRAEFIQEDQNMFPQDSSYYSIANKELYLPRNGQRLCKDKNDLSSTLESLTNSLMDKLSESDEIMLKSFLKNIFNVFFKYNHSERRGQPEKELERLIQPSFTSDTEHLEELQEDFDKADKLDRKPILSPKLRVFLEELSESEVKHLKSELSKQIQHYLVERLSESGHITKEDLPKIYQNLYLMNEKAEQKGPNSFQGKYSETVKEIMSFVNNFNHHFIDKHLEIKLRSFLKEILQNYFLKNISESSLFNETASETIYPNISSLRTKSVSISFHELEQDISKGSFGRRFEINMKYPLSKSLQNYLIALSENELLHLKADLSKHLQSLFIEKLSKSGLMTKKQLEGINQHINLLNSSSIPLKYIKTHLPFRDDCHFVEKHSEKQNKYSRIVQQTTLQTVSEDKLREAELIREKEKKYFPLQNLKGNSSLIKEQKSYYTKEEAKTPSLIKVQPSSNENIQASPLSKSSEILTDILLKKLRKEHVFTQLPQAENSVHKTEIQDPYSWGGKSKITQSKAWCEKTLKMKSLDRKEHVNIYKWTVQEKPEAVLTSYPRIPNARMPREDEYLNRITFPSWQSSTLTHFNTETGEKSKLEDQYCQTLKGNNNNNKKHLVTFAQYKKEIQTLYIKPDEICSEKCAKFPEIQSFQYKVVEDEKNLKPHLFPELFKIEDLKPKVRKERDRVAQPKKSFNKIVRILPTTLPTTRIHLKKSVPRTLLHWTARRTIHVIMFF

SEQ ID NO: 49018 - protein, 71 aa, Homo sapiens
  MAP TO AC007563.1; EXPRESSED IN HBL100, SIGNAL = 0.71; EXPRESSED IN HELA, SIGNAL = 0.62; EST_HUMAN HIT: BE617271.1, EVALUE 2.80e-01; SWISSPROT HIT: O50607, EVALUE 4.40e+00
WVECDPPQLQRQAPIGLNQSDNPFQFTIKVDPGISNNPNLSEAAHGIPLGITVMGSSWPNGSEAQDQPQPH

SEQ ID NO: 49019 - protein, 33 aa, Homo sapiens
  MAP TO AL035086.12; EXPRESSED IN HBL100, SIGNAL =   1; EXPRESSED IN HELA, SIGNAL = 0.72; EST_HUMAN HIT: BF114891.1, EVALUE 2.00e-11; SWISSPROT HIT: P27653, EVALUE 1.30e-02
VTDINLGKLVRGDAHECFVSPVAKAVIELLEKS

SEQ ID NO: 49020 - protein, 159 aa, Homo sapiens
  MAP TO AL049830.2; EXPRESSED IN HBL100, SIGNAL = 1.2; EST_HUMAN HIT: AW023479.1, EVALUE 2.00e-76; SWISSPROT HIT: O43405, EVALUE 4.00e-90
AVCRNNGFFSYHMPNWFGTTKYVKPLVQKLCTHEQMMCSKTCYNSVNIAFLIDGSSSVGDSNFRLMLEFVSNIAKTFEISDIGAKIAAVQFTYDQRTEFSFTDYSTKENVLAVIRNIRYMSGGTATGDAISFTVRNVFGPIRESPNKNFLVIVTDGQSY

SEQ ID NO: 49021 - protein, 54 aa, Homo sapiens; identical to SEQ ID NO: 36436
  MAP TO AC010149.2; EXPRESSED IN HBL100, SIGNAL = 0.94; EST_HUMAN HIT: AV724371.1, EVALUE 5.00e-25; SWISSPROT HIT: P23497, EVALUE 4.00e-26

SEQ ID NO: 49022 - protein, 56 aa, Homo sapiens
  MAP TO AC007358.2; EXPRESSED IN HBL100, SIGNAL = 1.1; EST_HUMAN HIT: AI276750.1, EVALUE 1.00e-25; SWISSPROT HIT: P54660, EVALUE 7.70e+00
IMLVPIESSGMLLLTHQQEFLSSFTCPSIQRVPTTVVGFLCLSEDMRAIGGIPMLE

SEQ ID NO: 49023 - protein, 36 aa, Homo sapiens
  MAP TO AC007768.1; EXPRESSED IN HBL100, SIGNAL = 1.2; SWISSPROT HIT: P46783, EVALUE 6.20e+00
GKTEPNFVSPEIKRSTRSKSHPRLGGKKWERPARTT

SEQ ID NO: 49024 - protein, 34 aa, Homo sapiens
  MAP TO AC006318.2; EXPRESSED IN HBL100, SIGNAL = 0.92
RTKSSDADSAAILRTLDPNYQVIYFWFKDDDLSY

SEQ ID NO: 49025 - protein, 33 aa, Homo sapiens
  MAP TO AC009508.2; EXPRESSED IN HBL100, SIGNAL =   1; EST_HUMAN HIT: AA937831.1, EVALUE 9.00e-02
RRATTIPSQALLKNRRGGTLSSSSYKANITLIP

SEQ ID NO: 49026 - protein, 53 aa, Homo sapiens; identical to SEQ ID NO: 46726
  MAP TO AL033532.15; EXPRESSED IN HBL100, SIGNAL = 0.99; EST_HUMAN HIT: AI192675.1, EVALUE 2.90e-02

SEQ ID NO: 49027 - protein, 26 aa, Homo sapiens
  MAP TO AL033532.15; EXPRESSED IN HBL100, SIGNAL = 0.99; EST_HUMAN HIT: AI192675.1, EVALUE 3.00e-09
ACSAHPTPRCTDHEPQLLPQLQEGAE

SEQ ID NO: 49028 - protein, 57 aa, Homo sapiens
  MAP TO AC007653.1; EXPRESSED IN HBL100, SIGNAL = 0.7; SWISSPROT HIT: Q92995, EVALUE 5.00e-27; EST_HUMAN HIT: AW958624.1, EVALUE 4.00e-26
ELIAYELTRREAEANRRPLPELVRAKIPFSACLQAFSEPENVDDFWSSALQAKSAGV

SEQ ID NO: 49029 - protein, 183 aa, Homo sapiens
  MAP TO AL049780.2; EXPRESSED IN HBL100, SIGNAL = 0.74; EST_HUMAN HIT: BF207616.1, EVALUE 3.00e-63; SWISSPROT HIT: P74925, EVALUE 2.00e-17
AIISSQRRKPVPGILTIFLPTMIKCLSVEVQAKLRSGLAISSLGQCVEELALNSIDAEAKCVAVRVNMETFQVQVIDNGFGMGSDDVEKVGNRYFTSKCHSVQDLENPRFYGFRGEALANIADMASAVEISSKKNRTMKTFVKLFQSGKALKACEADVTRASAGTTVTVYNLFYQLPVRRKCM

SEQ ID NO: 49030 - protein, 52 aa, Homo sapiens
  MAP TO AC009559.2; EXPRESSED IN HBL100, SIGNAL = 4.7; SWISSPROT HIT: P27715, EVALUE 2.00e-15; EST_HUMAN HIT: AA015938.1, EVALUE 9.00e-26
IAINDLNWQTTAMFRPFVEVCILGPNLGDKKRKQGTKTKSNTWSPKYNETFQ

SEQ ID NO: 49031 - protein, 54 aa, Homo sapiens
  MAP TO AC010082.2; EXPRESSED IN HBL100, SIGNAL = 0.97; SWISSPROT HIT: O08394, EVALUE 2.60e+00; EST_HUMAN HIT: AA664365.1, EVALUE 4.90e-01
YPGPDFLHFPFALIPKPDLCEKGNSSIGCGEGNALQKDLKQAIQKALDSQHIGA

SEQ ID NO: 49032 - protein, 33 aa, Homo sapiens
  MAP TO AF187000.1; EXPRESSED IN HBL100, SIGNAL = 0.93; SWISSPROT HIT: P27998, EVALUE 4.80e+00
LNFHISAMNRNKEKVDLTECQEAWPGRPLKSRQ

SEQ ID NO: 49033 - protein, 33 aa, Homo sapiens
  MAP TO AF187000.1; EXPRESSED IN HBL100, SIGNAL = 0.93
LTRFQRAPWPRLLALCQINFLLISIHCRNVKIQ

SEQ ID NO: 49034 - protein, 97 aa, Homo sapiens
  MAP TO AL049708.6; EXPRESSED IN HBL100, SIGNAL = 1.1; EST_HUMAN HIT: BF337367.1, EVALUE 9.40e-01
NNGTSDRFHRKLIAVALFSRVHQQIPSEGPCALNPERSERTKRPSALVFAYNLREKGTHSDTRQALNPGGGSSRASVTFLPLLPSAIDNYQDRECFN

SEQ ID NO: 49035 - protein, 43 aa, Homo sapiens
  MAP TO AC011232.3; EXPRESSED IN HBL100, SIGNAL = 1.1; EST_HUMAN HIT: AW028230.1, EVALUE 2.00e-13
DLAAGQLDRVHKGVAQEVDKMVEDEEGIEIDQEVGATNGVLTI

SEQ ID NO: 49036 - protein, 40 aa, Homo sapiens
  MAP TO AE000660.1; EXPRESSED IN HBL100, SIGNAL = 1.1; SWISSPROT HIT: P04437, EVALUE 2.70e+00; EST_HUMAN HIT: AW268496.1, EVALUE 4.00e-03
AKKNSSLHITATQTTDVGTYFCAGHSAPQAPAACLQILPW

SEQ ID NO: 49037 - protein, 35 aa, Homo sapiens
  MAP TO AC005043.2; EXPRESSED IN HBL100, SIGNAL =   1
LWPTTRTSMAERGGASPAVLSNREESASMMLEGAG

SEQ ID NO: 49038 - protein, 85 aa, Homo sapiens
  MAP TO AL049563.4; EXPRESSED IN HBL100, SIGNAL = 0.75; SWISSPROT HIT: P13983, EVALUE 2.90e-01; EST_HUMAN HIT: AV727554.1, EVALUE 2.00e-49
TFPNADSSSVPHGAVYYPVMSDPYGQPPLPGFDSCLPVVPDYSCVPPWHPVGTAYGGSSQIHGAINPGPIGCIAPSPPASHYVPQ

SEQ ID NO: 49039 - protein, 45 aa, Homo sapiens
  MAP TO AL049593.4; EXPRESSED IN HBL100, SIGNAL = 1.2
ILTLWSNPPLEINLREKSTKTKFTQLQQNLFQVTSTPRPRIPSKF

SEQ ID NO: 49040 - protein, 34 aa, Homo sapiens
  MAP TO AC008126.9; EXPRESSED IN HBL100, SIGNAL = 0.95
TVFALNINMNILILFRMNATFFLSIAAFLSIKLV

SEQ ID NO: 49041 - protein, 47 aa, Homo sapiens
  MAP TO AC008280.2; EXPRESSED IN HBL100, SIGNAL = 0.98; SWISSPROT HIT: Q9ZCW4, EVALUE 7.90e+00
VRKKYEDVANIKIAMMADTVVGDLALLIGTQTFYLDLTFRNSTFRVS

SEQ ID NO: 49042 - protein, 30 aa, Homo sapiens
  MAP TO AC010985.1; EXPRESSED IN HBL100, SIGNAL = 1.4
LKIYTDDDMKQLLKPQVENIFELKDSVKNN

SEQ ID NO: 49043 - protein, 19 aa, Homo sapiens
  MAP TO AL109750.5; EXPRESSED IN HBL100, SIGNAL = 1.5
VLSLSVTSTFLIRAPIILN

SEQ ID NO: 49044 - protein, 89 aa, Homo sapiens
  MAP TO AC012073.1; EXPRESSED IN HELA, SIGNAL = 1.2; SWISSPROT HIT: P21932, EVALUE 3.00e-37; EST_HUMAN HIT: AA446922.1, EVALUE 1.00e-46
GLQLSCLQYYTGPSNATAGMETEGSCLENPKYYNYVAVLSLIATIMLVQVSHMVKLTLMLLVAGAVATINLYAWRPVFDEYDHKRFREH

SEQ ID NO: 49045 - protein, 37 aa, Homo sapiens
  MAP TO AC011561.2; EXPRESSED IN HELA, SIGNAL = 1.1
TPALVELKTSQVLDEHEINNSTSHESHERENATAQQK

SEQ ID NO: 49046 - protein, 28 aa, Homo sapiens
  MAP TO AC010721.1; EXPRESSED IN HELA, SIGNAL = 1.3
DICQACSYSYSTTIYYVKENSLSSILDE

SEQ ID NO: 49047 - protein, 17 aa, Homo sapiens
  MAP TO AC010721.1; EXPRESSED IN HELA, SIGNAL = 1.3
QTSAKHVLIPIPQQYTM

SEQ ID NO: 49048 - protein, 48 aa, Homo sapiens
  MAP TO AC009958.1; EXPRESSED IN HELA, SIGNAL = 1.4
ARSPVSRKLTRTLHSPRASNAASLGAQPLSAAPATAAPRDGVHSRWAQ

SEQ ID NO: 49049 - protein, 31 aa, Homo sapiens
  MAP TO AL035414.18; EXPRESSED IN HELA, SIGNAL = 0.93
DQHDQTHTFLLIPYTTLQYHRDCYHPASTLP

SEQ ID NO: 49050 - protein, 168 aa, Homo sapiens
  MAP TO Z82214.22; EXPRESSED IN HELA, SIGNAL = 0.6; EST_HUMAN HIT: AI146468.1, EVALUE 4.00e-03
MRSTRCRPSCTAEGEEVSATACDAAGTPAPGCGSAAPAPFCGMWVDSGGESLAGARGRCSQPYRSSCSCVHSALTTVSFRVPRAAVGTLLGCYHLGPHAWAPSISSPAGKEKQTFSLFVAGHGLGTCLSSLAVGAKGGTRQPVRPPWLPLGSLWRAGQGCQIKYRVPI

SEQ ID NO: 49051 - protein, 50 aa, Homo sapiens
  MAP TO AC011376.1; EXPRESSED IN HELA, SIGNAL = 1.1; EST_HUMAN HIT: AA341536.1, EVALUE 3.00e-21
ARLCLVPLETIVIINKFAMIFTGLEVLYFLGSNLLVPYNLAKSAYRELVQ

SEQ ID NO: 49052 - protein, 57 aa, Homo sapiens
  MAP TO AL109759.1; EXPRESSED IN HELA, SIGNAL = 0.96; EST_HUMAN HIT: AA157467.1, EVALUE 3.00e-04; SWISSPROT HIT: Q47157, EVALUE 4.50e+00
TLQELLNRINNADTGIAIQKNGAIIVDRIYKTKECKMRITAEEMSALIEERDAALSK

SEQ ID NO: 49053 - protein, 64 aa, Homo sapiens; identical to SEQ ID NO: 48690
  MAP TO AC007363.3; EXPRESSED IN HELA, SIGNAL = 0.82; EST_HUMAN HIT: BE612554.1, EVALUE 2.00e-05

SEQ ID NO: 49054 - protein, 21 aa, Homo sapiens
  MAP TO AC007363.3; EXPRESSED IN HELA, SIGNAL = 0.82; EST_HUMAN HIT: BE612554.1, EVALUE 2.10e+00
VRPQKPIRGHLFQGQLHSRSL

SEQ ID NO: 49055 - protein, 20 aa, Homo sapiens
  MAP TO AP000036.1; EXPRESSED IN HELA, SIGNAL = 0.96
LSHSKTGHHELLSADFEHPY

SEQ ID NO: 49056 - protein, 52 aa, Homo sapiens; identical to SEQ ID NO: 37840
  MAP TO AP000042.1; EXPRESSED IN HELA, SIGNAL = 0.94; SWISSPROT HIT: P49147, EVALUE 2.00e+00; EST_HUMAN HIT: BE841807.1, EVALUE 2.90e+00

SEQ ID NO: 49057 - protein, 28 aa, Homo sapiens
  MAP TO AC012106.1; EXPRESSED IN HELA, SIGNAL = 4.3
ECNRFQNFMINLENRSKDLKVCLSIKVK

SEQ ID NO: 49058 - protein, 44 aa, Homo sapiens
  MAP TO AL049647.7; EXPRESSED IN HELA, SIGNAL = 3.9; EST_HUMAN HIT: AW848272.1, EVALUE 2.70e+00; SWISSPROT HIT: P54643, EVALUE 1.60e+00
CCLLSKLCQSVLGLFHNPLSICPGQTLLHCVSASYISPETISPS

SEQ ID NO: 49059 - protein, 56 aa, Homo sapiens
  MAP TO AC007738.1; EXPRESSED IN HELA, SIGNAL = 1.1; EST_HUMAN HIT: AW869159.1, EVALUE 4.00e-14; SWISSPROT HIT: P97697, EVALUE 5.90e+00
KESFYPLIDVNWWADSAVTLARCSGALTVSSVKTLKNLLGKSCEWFEPSPQVTATH

SEQ ID NO: 49060 - protein, 49 aa, Homo sapiens
  MAP TO AF099810.1; EXPRESSED IN HELA, SIGNAL =   1; EST_HUMAN HIT: AV762492.1, EVALUE 4.50e-01; SWISSPROT HIT: P50554, EVALUE 4.60e+00
SSFMDTHAHNNIRHSPRSLLMAIITKTPVQIEGGRSQQEADFRPKLEEV

SEQ ID NO: 49061 - protein, 69 aa, Homo sapiens
  MAP TO AL009051.1; EXPRESSED IN HELA, SIGNAL =   1; SWISSPROT HIT: P38861, EVALUE 7.10e+00; EST_HUMAN HIT: AI953493.1, EVALUE 3.20e+00
LASFHPFIHPLSVYFVPGILDLRELTVRRSTNFPQWKFGRKHRTEKACNSLQEPGTPSQRREHTSSVLK

SEQ ID NO: 49062 - protein, 670 aa, Homo sapiens
  MAP TO AC004505.1; EXPRESSED IN HELA, SIGNAL =   1; SWISSPROT HIT: P22265, EVALUE 9.00e-08; EST_HUMAN HIT: BF530308.1, EVALUE 6.00e-71
ASRFRCRQCSAAYDTLVELTVHMNETGHYQDDNRKKDKLRPTSYSKPRKRAFQDMDKEDAQKVLKCMFCGDSFDSLQDLSVHMIKTKHYQKVPLKEPVPTISSKMVTPAKKRVFDVNRPCSPDSTTGSFADSFSSQKNANLQLSSNNRYGYQNGASYTWQFEACKSQILKCMECGSSHDTLQQLTTHMMVTGHFLKVTSSASKKGKQLVLDPLAVEKMQSLSEAPNSDSLAPKPSSNSASDCTASTTELKKESKKERPEETSKDEKVVKSEDYEDPLQKPLDPTIKYQYLREEDLEDGSKGGGDILKSLENTVTTAINKAQNGAPSWSAYPSIHAAYQLSEGTKPPLPMGSQVLQIRPNLTNKLRPIAPKWKVMPLVSMPTHLAPYTQVKKESEDKDEAVKECGKESPHEEASSFSHSEGDSFRKSETPPEAKKTELGPLKEEEKLMKEGSEKEKPQPLEPTSALSNGCALANHAPALPCINPLSALQSVLNNHLGKATEPLRSPSCSSPSSSTISMFHKSNLNVMDKPVLSPASTRSASVSRRYLFENSDQPIDLTKSKSKKAESSQAQSCMSPPQKHALSDIADMVKVLPKATTPKPASSSRVPPMKLEMDVRRFEDVSSEVSTLHKRKGRQSNWNPQHLLILQAQFASSLFQTSEGKYLLSDLAHKS

SEQ ID NO: 49063 - protein, 29 aa, Homo sapiens
  MAP TO AC007597.2; EXPRESSED IN HELA, SIGNAL = 0.6; EST_HUMAN HIT: AW086043.1, EVALUE 1.00e-04; SWISSPROT HIT: P53632, EVALUE 1.40e-01
SPRPEEEKMRMEVVNRIESVIKELWPSAD

SEQ ID NO: 49064 - protein, 52 aa, Homo sapiens
  MAP TO AL078591.17; EXPRESSED IN HELA, SIGNAL = 1.1; EST_HUMAN HIT: AU136559.1, EVALUE 4.00e-23; SWISSPROT HIT: P39985, EVALUE 4.50e+00
KIENPDELAELINMNLAQLCSLLMALWGQFLEVITLHEELRILLAQEHHTLR

SEQ ID NO: 49065 - protein, 45 aa, Homo sapiens
  MAP TO AC005973.2; EXPRESSED IN HELA, SIGNAL = 0.88; EST_HUMAN HIT: AI358103.1, EVALUE 4.60e+00
PRPCPRFSWSCCRASWAPRRRPRPPGPPRPQGGRRRWAYCSARRS

SEQ ID NO: 49066 - protein, 60 aa, Homo sapiens
  MAP TO AC005973.2; EXPRESSED IN HELA, SIGNAL = 0.88; SWISSPROT HIT: Q04844, EVALUE 3.00e-16; EST_HUMAN HIT: BE780326.1, EVALUE 2.00e-05
FLIFVMVVATLIVMNCVIVLNVSQRTPTTHAMSPRLRHVSAEGAVQPGSGWGFVLTSSPK

SEQ ID NO: 49067 - protein, 37 aa, Homo sapiens
  MAP TO AC005973.2; EXPRESSED IN HELA, SIGNAL = 0.88; SWISSPROT HIT: Q04844, EVALUE 5.00e-04
PPPEAPRAASPPRRASSVGLLLRAEELILKKPRSELV

SEQ ID NO: 49068 - protein, 42 aa, Homo sapiens
  MAP TO AC007386.3; EXPRESSED IN HELA, SIGNAL = 0.62; EST_HUMAN HIT: AW302494.1, EVALUE 4.80e-02
RQKWRPTKVILWPWRKSLRVSQPIHMWVTMWFLEMSIDMALL

SEQ ID NO: 49069 - protein, 39 aa, Homo sapiens
  MAP TO AC009444.1; EXPRESSED IN HELA, SIGNAL = 1.2
  unsure 14
VSSILQTSSISSMXKFSKISFSTSYLAFDSNATYPTASK

SEQ ID NO: 49070 - protein, 28 aa, Homo sapiens
  MAP TO AL118517.5; EXPRESSED IN HELA, SIGNAL = 3.9
FAIYHDTGNTDRHDEHKSNTLLPHKKEI

SEQ ID NO: 49071 - protein, 56 aa, Homo sapiens
  MAP TO AJ239323.2; EXPRESSED IN HELA, SIGNAL = 1.8; EST_HUMAN HIT: AW803095.1, EVALUE 1.80e+00; SWISSPROT HIT: P47054, EVALUE 7.70e+00
EVTEVQKGQVMCLKSLGEEVKEPEISMPSITHTGLYFNGDDQVVTCNVRARTPCGR

SEQ ID NO: 49072 - protein, 70 aa, Homo sapiens
  MAP TO AC010881.1; EXPRESSED IN HELA, SIGNAL = 4.3; SWISSPROT HIT: P07909, EVALUE 4.80e+00
IKELHIHQLHTKHDVLNLSDFYSMFNKICEYVWSINLFPGEKRGKGCYKEKQAWLSQYKVHPKGGFNRLT

SEQ ID NO: 49073 - protein, 22 aa, Homo sapiens
  MAP TO AL121652.1; EXPRESSED IN HELA, SIGNAL = 1.5
IRSRNKGGVRSDGHTSIKWKRR

SEQ ID NO: 49074 - protein, 51 aa, Homo sapiens
  MAP TO AP000035.1; EXPRESSED IN HELA, SIGNAL = 0.71; EST_HUMAN HIT: BE747576.1, EVALUE 2.20e+00; SWISSPROT HIT: P51882, EVALUE 3.50e+00
PLPKSTRHSHLSFGSHPVVPGHSLPSTGSALTQLNNLEEKGSPPPTQLRNL

SEQ ID NO: 49075 - protein, 50 aa, Homo sapiens
  MAP TO AJ011929.1; EXPRESSED IN HELA, SIGNAL = 2.8; SWISSPROT HIT: Q9Y5Z0, EVALUE 5.00e-24; EST_HUMAN HIT: N95694.1, EVALUE 7.00e-23
MGAGLNYECYRFGISPSTNALVIGATVMEGFYVIFDRAQKRVGFAASPCA

SEQ ID NO: 49076 - protein, 58 aa, Homo sapiens
  MAP TO AL049744.7; EXPRESSED IN HELA, SIGNAL = 0.67; EST_HUMAN HIT: BE065795.1, EVALUE 1.60e-01; SWISSPROT HIT: P45356, EVALUE 4.50e+00
INGCTYVKSWALRKIWRNQKFCILLMKTNIGTITLKNSVAESTKFENIHMLQSVSSIP

SEQ ID NO: 49077 - protein, 29 aa, Homo sapiens
  MAP TO AL049744.7; EXPRESSED IN HELA, SIGNAL = 0.67; EST_HUMAN HIT: AA160199.1, EVALUE 4.10e+00
EKPEILYIANENEHWYNYFKELCSGIYQI

SEQ ID NO: 49078 - protein, 37 aa, Homo sapiens
  MAP TO AC007464.2; EXPRESSED IN HELA, SIGNAL = 0.79
HNMAGNMLGLLKRRRTVPQKSCKPLPTCISRSWESGA

SEQ ID NO: 49079 - protein, 39 aa, Homo sapiens
  MAP TO AC007429.11; EXPRESSED IN HELA, SIGNAL = 1.1; EST_HUMAN HIT: BE152048.1, EVALUE 3.00e-05; SWISSPROT HIT: Q09747, EVALUE 8.10e+00
GRMERAAVRFHHAPQNGAQLKTYQWSISGISHLYFEMVV

SEQ ID NO: 49080 - protein, 31 aa, Homo sapiens
  MAP TO AC007450.1; EXPRESSED IN HELA, SIGNAL = 1.3
CQMKPRKVCHIEMTCLFYVNTTLETILELVF

SEQ ID NO: 49081 - protein, 43 aa, Homo sapiens
  MAP TO AL035667.12; EXPRESSED IN HELA, SIGNAL = 0.68; EST_HUMAN HIT: AI261297.1, EVALUE 2.00e-06; SWISSPROT HIT: P08547, EVALUE 4.00e-04
IKKMQIKSTMRYYFTPIRIAVIKRQTITRFGEDVGKLELTYTA

SEQ ID NO: 49082 - protein, 28 aa, Homo sapiens
  MAP TO AF108083.1; EXPRESSED IN HELA, SIGNAL = 2.3; SWISSPROT HIT: P56999, EVALUE 8.60e+00
MLHMRVMWNWLFDDWDVHLLKRPITQVM

SEQ ID NO: 49083 - protein, 56 aa, Homo sapiens; identical to SEQ ID NO: 37477
  MAP TO AL035072.7; EXPRESSED IN HELA, SIGNAL = 2.1; EST_HUMAN HIT: AW196383.1, EVALUE 2.10e-01; SWISSPROT HIT: P47927, EVALUE 2.00e+00

SEQ ID NO: 49084 - protein, 34 aa, Homo sapiens
  MAP TO AL109622.10; EXPRESSED IN HELA, SIGNAL =  32; EST_HUMAN HIT: BE767300.1, EVALUE 5.10e-01
NMRSHSHQQRTTLCFSPKPHRDLLYYLSDNSYPK

SEQ ID NO: 49085 - protein, 24 aa, Homo sapiens
  MAP TO AC006328.3; EXPRESSED IN HELA, SIGNAL = 0.61
SKLWQNMNLLLRKLTIMLAITVII

SEQ ID NO: 49086 - protein, 49 aa, Homo sapiens
  MAP TO AC011003.1; EXPRESSED IN HELA, SIGNAL =  12; EST_HUMAN HIT: AI636219.1, EVALUE 2.00e-10; SWISSPROT HIT: P75384, EVALUE 2.70e+00
ILNQAQMDEMAETEFRIWIGMKIIDIQEKVETQCKESEEYNKMIQEMKD

SEQ ID NO: 49087 - protein, 38 aa, Homo sapiens
  MAP TO AL096793.8; EXPRESSED IN HELA, SIGNAL = 7.8; SWISSPROT HIT: P14266, EVALUE 2.80e+00
YHKQLSEIEKYYATITGQFGLVKENHEKLEQNGMCYLI

SEQ ID NO: 49088 - protein, 60 aa, Homo sapiens
  MAP TO AL034384.1; EXPRESSED IN HELA, SIGNAL = 0.9; EST_HUMAN HIT: BE783321.1, EVALUE 7.90e+00; SWISSPROT HIT: P13887, EVALUE 4.40e+00
TFGTFPGESGKPPYFQARKMVRAVLWKGFSTTVWRTNGKAKTGGRGSPLGGGCGRSPGKR

SEQ ID NO: 49089 - protein, 52 aa, Homo sapiens
  MAP TO AL096865.7; EXPRESSED IN HELA, SIGNAL = 1.1; SWISSPROT HIT: Q01196, EVALUE 5.00e-22; EST_HUMAN HIT: BF058528.1, EVALUE 2.00e-22
VVALGEVPDGTVVTVMAGNDENYSAELRNASAVMKNQVARFNDLRFVGRSGR

SEQ ID NO: 49090 - protein, 17 aa, Homo sapiens
  MAP TO AL096865.7; EXPRESSED IN HELA, SIGNAL = 1.1; EST_HUMAN HIT: AI935270.1, EVALUE 3.00e-05
GSPRRGTRWDCGYCHGG

SEQ ID NO: 49091 - protein, 243 aa, Homo sapiens
  MAP TO AC005678.1; EXPRESSED IN HELA, SIGNAL = 1.3; EST_HUMAN HIT: AU141046.1, EVALUE 1.00e-66; SWISSPROT HIT: O43309, EVALUE 0.00e+00
LDVETGNEYGNLKQEVSEEMEPHGKTSSKFENDMSKSARCGETREPEEITEEPSACSREDKQPTCDENGVSLTENSDHTEHQRICPGEESYGCDDCGKAFSQHSHLIEHQRIHTGDRPYKCEECGKAFRGRTVLIRHKIIHTGEKPYKCNECGKAFGRWSALNQHQRLHTGEKHYHCNDCGKAFSQKAGLFHHIKIHTRDKPYQCTQCNKSFSRRSILTQHQGVHTGAKPYECNECGKAFVYN

SEQ ID NO: 49092 - protein, 67 aa, Homo sapiens
  MAP TO AL049594.4; EXPRESSED IN HELA, SIGNAL = 0.63; SWISSPROT HIT: P21542, EVALUE 7.40e+00
TPAAGIAMRQGELRGRWRQQRPLRTAEGPHQPPHPHLRARRPHHLLQKATLSATHQELSASNSTFLI

SEQ ID NO: 49093 - protein, 118 aa, Homo sapiens
  MAP TO AL031274.1; EXPRESSED IN HELA, SIGNAL = 1.8; EST_HUMAN HIT: H79759.1, EVALUE 2.00e-40; SWISSPROT HIT: Q01740, EVALUE 7.00e-63
TQLKEFVLNDELPGRIITGKVFIRPSIKEVKENSVIFNNTSKEEPIDIIVFATGYTFAFPFLDESVVKVEDGQASLYKYIFPAHLQKPTLAIIGLIKPLGSMIPTGETQARWAVRVLK

SEQ ID NO: 49094 - protein, 71 aa, Homo sapiens
  MAP TO AC007498.2; EXPRESSED IN HELA, SIGNAL =  15; SWISSPROT HIT: P39770, EVALUE 2.00e-15; EST_HUMAN HIT: AU132405.1, EVALUE 9.00e-38
TSSHAEKIIKEDSLGILFPFRDRGKFKNTACDICGKTFACQSALDIHYRSHTKERPFICTVCNRGFSTKGN

SEQ ID NO: 49095 - protein, 62 aa, Homo sapiens
  MAP TO AC011370.1; EXPRESSED IN HELA, SIGNAL =  24; EST_HUMAN HIT: BE266599.1, EVALUE 1.00e-27; SWISSPROT HIT: Q08014, EVALUE 2.60e-02
VSKLEREKTQEAKRIRELEQRKHTVLVTELKAKLHEEKMKELQAVRENLIKQHEQEMSRTVK

SEQ ID NO: 49096 - protein, 26 aa, Homo sapiens
  MAP TO AC011370.1; EXPRESSED IN HELA, SIGNAL =  24; EST_HUMAN HIT: BE266599.1, EVALUE 9.00e-09
YQSLKERRLKKRRGFVSWSSASTRCW

SEQ ID NO: 49097 - protein, 44 aa, Homo sapiens
  MAP TO AC009483.2; EXPRESSED IN HELA, SIGNAL = 1.2; EST_HUMAN HIT: T87359.1, EVALUE 1.00e-03; SWISSPROT HIT: P39188, EVALUE 2.70e+00
MMPRLDLDFNTWAQVILQSQLPKWLRLKIHSTETRFFTLKFFLI

SEQ ID NO: 49098 - protein, 37 aa, Homo sapiens
  MAP TO AC008124.8; EXPRESSED IN HELA, SIGNAL = 1.2
STISASMGGVTDLLGTKNASENFMYLIPKVSILLNRE

SEQ ID NO: 49099 - protein, 48 aa, Homo sapiens
  MAP TO AL049591.12; EXPRESSED IN HELA, SIGNAL = 0.68
MANSFTKDRNQRFSQRPIRRHRQNIHVRIVYGIRKMKVTRKFLIRKVD

SEQ ID NO: 49100 - protein, 87 aa, Homo sapiens
  MAP TO AC009758.1; EXPRESSED IN HELA, SIGNAL = 9.2; SWISSPROT HIT: P23269, EVALUE 1.00e-07; EST_HUMAN HIT: BF679294.1, EVALUE 7.00e-12
PRVMSASSITSTHPTSFLLMGIPGLEHLHIWISIPFSAYTLALLGNCTLLLIIQADAALHEPIYLFLAMLAAIDLVLSSSALPKMLA

SEQ ID NO: 49101 - protein, 34 aa, Homo sapiens
  MAP TO AC007539.8; EXPRESSED IN HELA, SIGNAL = 1.6
MNKDGWEREKDSLHFCYVFIVLVAFSRLPTLFSE

SEQ ID NO: 49102 - protein, 39 aa, Homo sapiens
  MAP TO AC007556.2; EXPRESSED IN HELA, SIGNAL = 1.6; SWISSPROT HIT: P98164, EVALUE 2.00e-19
PNLCKQICSHLCLLRPGGYSCACPQGSSFIEGSTTECDA

SEQ ID NO: 49103 - protein, 24 aa, Homo sapiens
  MAP TO AC007539.8; EXPRESSED IN HELA, SIGNAL =   3; SWISSPROT HIT: P52067, EVALUE 1.70e+00
QYWFILSARLAFVIIFQVSCWDRE

SEQ ID NO: 49104 - protein, 36 aa, Homo sapiens
  MAP TO AL079295.1; EXPRESSED IN HELA, SIGNAL = 5.8
SCILNETANCTQRKGLVGNDTSYLSIISWSCQLTGI

SEQ ID NO: 49105 - protein, 95 aa, Homo sapiens
  MAP TO AC007556.2; EXPRESSED IN HELA, SIGNAL = 1.3; SWISSPROT HIT: P98164, EVALUE 5.00e-53
RIERSTLTGVDREVIVNAAVHAFGLTLYGQYIYWTDLYTQRIYRANKYDGSGQIAMTTNLLSQPRGINTVVKNQKQQCNNPCEQFNGGCSHICAP

SEQ ID NO: 49106 - protein, 36 aa, Homo sapiens
  MAP TO AC002524.1; EXPRESSED IN HELA, SIGNAL = 1.7; SWISSPROT HIT: Q04688, EVALUE 4.30e-01; EST_HUMAN HIT: AI655967.1, EVALUE 4.30e+00
LERIMFKEVKAASSQQPGTESFNPTTYETINSANSH

SEQ ID NO: 49107 - protein, 29 aa, Homo sapiens
  MAP TO AL135744.2; EXPRESSED IN HELA, SIGNAL = 1.7; EST_HUMAN HIT: AW379923.1, EVALUE 6.00e-10
ARKSNVSYKNPSLMPKEPHIREMKIYIDK

SEQ ID NO: 49108 - protein, 32 aa, Homo sapiens
  MAP TO AC017067.2; EXPRESSED IN HELA, SIGNAL = 1.8
WSYNMSTVNMIMLFLFLKHVNLLLINTMSTLQ

SEQ ID NO: 49109 - protein, 39 aa, Homo sapiens
  MAP TO AC012632.2; EXPRESSED IN HELA, SIGNAL = 1.6; EST_HUMAN HIT: AU130240.1, EVALUE 3.00e-14; SWISSPROT HIT: P26639, EVALUE 2.00e-15
GVSSNDFSSLEALCKKIIKEKQAFERLEVKKETLLAMFK

SEQ ID NO: 49110 - protein, 38 aa, Homo sapiens
  MAP TO AC012632.2; EXPRESSED IN HELA, SIGNAL = 1.6; EST_HUMAN HIT: AA191131.1, EVALUE 1.00e-03
VCLAMISLLWRLCVRKSLKKNKLLKDWKLRKKLYWQCL

SEQ ID NO: 49111 - protein, 48 aa, Homo sapiens; identical to SEQ ID NO: 44829
  MAP TO AC012632.2; EXPRESSED IN HELA, SIGNAL = 3.8; SWISSPROT HIT: P26639, EVALUE 8.00e-21; EST_HUMAN HIT: AA047555.1, EVALUE 5.00e-20

SEQ ID NO: 49112 - protein, 49 aa, Homo sapiens; identical to SEQ ID NO: 44830
  MAP TO AC012632.2; EXPRESSED IN HELA, SIGNAL = 3.8; EST_HUMAN HIT: AW873033.1, EVALUE 2.00e-13

SEQ ID NO: 49113 - protein, 47 aa, Homo sapiens
  MAP TO AC005137.1; EXPRESSED IN HELA, SIGNAL = 1.7; EST_HUMAN HIT: AI269960.1, EVALUE 5.00e-07
GRELFMTDRERLAEARQRELQRQELLMQKRLAMESNKILQEQQEMER

SEQ ID NO: 49114 - protein, 69 aa, Homo sapiens; identical to SEQ ID NO: 35570
  MAP TO AL096700.14; EXPRESSED IN HELA, SIGNAL = 3.8; SWISSPROT HIT: P40421, EVALUE 7.00e-04; EST_HUMAN HIT: D44816.1, EVALUE 8.00e-35

SEQ ID NO: 49115 - protein, 38 aa, Homo sapiens
  MAP TO AC019219.2; EXPRESSED IN HELA, SIGNAL = 6.5; EST_HUMAN HIT: AI682253.1, EVALUE 4.90e-01
MLNASCHRISDSKFFSFETGLALLALQLADGLLWNLVI

SEQ ID NO: 49116 - protein, 81 aa, Homo sapiens
  MAP TO AL133262.2; EXPRESSED IN HELA, SIGNAL = 2.1; SWISSPROT HIT: P31999, EVALUE 2.00e-01; EST_HUMAN HIT: BE140795.1, EVALUE 6.00e-43
VNETILRPLNVEPPLTDLQKSEELIKKEMITMLHYDLLHHPYEPSGNKKGKTVGFGTNNSEHITYLEHNPYEKFSKEELKK

SEQ ID NO: 49117 - protein, 65 aa, Homo sapiens
  MAP TO AL121761.5; EXPRESSED IN HELA, SIGNAL = 7.7; EST_HUMAN HIT: BE086012.1, EVALUE 3.50e-02; SWISSPROT HIT: P21647, EVALUE 1.40e+00
CYITSHRKTQWLKTIIILLLPWFLSVWNSGRAWLGCSGSESQMWLQPDGNWNWNKRQSVWGWGTG
